United States Patent Application Publication US 2025/0057892 A1 - sequence listing, part 4

SEQ ID NO: 3225 - DNA, 2911 bp, Toxoplasma gondii
  source 1..2911: mol_type = genomic DNA
atttcaaggagcttggcgccggttcgccgctgccttactgaagggtcgctgccgccagcgacggcttcactggatttcccgatctcccacccactgtcatccgtttgcgaaccactttttgttgaaccgtgaggcagatcactgcatgcgccaaagtcactgtcacgtcgtggagacgcggaaactccagtggcgcatgcactcccgacaccgctgctgccgtctgcagctcctggccacggccgggctttcgcaccggttttctgcctttctccagagacgggtcggtcctcatggccttccgtcgcttcgtgaggcgggacccttcgtttgtcgccacgtggtgacttagcgcagtcgtccgcgccagcagtcccagagcagaggccggtggagttgtcttcgtgttgctgacgttttcgaagctggtgctgctgtctcacattgaaagagcgatcctccatctcctctacacgccgcatagcggcagcagaaagaagggcacccttggtgccaggcgcttgcgtcaaagaggtttgcggtgcttcgagtccgccgtcctccatggtacagctactcgcgtcaagaacgggagtgctcaacttgtgcagccacccacgagaggaagtgaatcataaagttcggcgtgcactaggaactcccgagtccgcgatcggacagtctaacggacggcgggatatggcgacgtagaaaacgtttgtaactgatcctgtctcgattcacaggctctacgtttattgaccgacaccggaggaacacggtccacagaaacagaccgaagcttcccgagacgcagatcctcgtgcgctcctgcacatgacggtccgtcctccgctcgagtctgctgtatcgctgacgaaaacgagtgtctgtagagcacgatatgtggggttccaagtacgcgcagaagtcctgacagtaccgtggcgggccctgcggtatttttcatctcaggtttggagagacgcagaggccccggctcttctttgacaggacgcagccgcggatacacaccccctatttcgcagggaaacgtttccttgcagaacaatactcgatggaacgcagtgtgtttcagatgagttgggaatgaccggcagttcagcagcaagggccgcccgccagccagcagtgacccagaaaagagagcccacgatgtggcagaggcgttgttacttctgtccaagaaggagcacaaagtgtgatacgaggagagtatgtggcttggaatccgcgaaacggtggaaaacggccagaaaacggaaaaaaatcgaaacagtaggagggcgtcgtcttctcacagacgtgcgcatctaccacagttgttgcacagacccccctgagaaaagcacgcctcaccacagacatcgacggaaaaaaaacatgccctaatacgcgtgtaactgattgtgtgtgcatggcagagtaagtcgccaacagactaaaagtggccacagagaaggtgcaaatggtagcaaacgaggagatgacaggatagagatttattcttggggcaacccacctccgaattcacacccttcacgtgagggagcagacaagcgcggacagcatgccacccagacgagctgctaagcaaaaaacacacgccacgagaataagacaaaaccattgatatcccattttcctgagagcacactgaacaaatggaggcgtgagctcgcgtgaatacctcgtgaggctgaaaatatatgcgaattaactgttccacacgaggcacgcggtttttcgtcataattttgctgcttcgctcttggtacgcgtctctgaaagacaggataaaactagcgatttcctctgttcacgacgttgccttctcagcactgccggcaggcttgaaggcacttcaagctcatctttcagaggaaacggcctgtgaacttattcgggcgatactgtttgagcgaaaggactgttaattggattttcaaccaggtttgcgatgctggcctattaagccaatgcatgaatgacctcgtgtgttgcctgctgcacccgtgctggtgtaacagaatagtgtagtcgcggcacttgcccgtaactgaatgctgaaagggatttcctgtacagaaagccgtacgaatgtaaggttgttatagtgcggagatatttcgacaaaggcttcctgcctttagtgcaatggttcctacccgacaccgtacacgagtgactgctggaaaactacgacagcgcatcaatccaaaaaaaaaaccgcggccggtcatactaccagtaaaaccgaccgtcaaacaagtagccaaaggacttgcaaatgacgaggaaagagaggggacgtttggaagctcgtgaagaagagctgctcacgaaatgtcgctgcgattgtcttcaattctagccggcggagagcctacgaatcctcggcccgcttggtcgggagctcgatcgcagattcctctattggcagtgtccacggaaaatcgtgaggtggtgcttgtggtaactaagcatggagagacagcagcgcgcattcagaacaccccgtcggcaagggatggcgaagagaatcagagagcgcacgtcagtgcgttgagatggcatcctcgtaagcttgatattccttaaaggggtttggcttgttttgacaatgttagtttatatgcacccgaagtcgctgagcaaggcagaagacatgactgtcctgacacaactatgaaaatgcgaacacgtgcaataactgccccgaagtagtcacttgctttccggacagccgcgattgcactgtttctcaagagaagttcgttttttcctgagctttctgctcgtcgaaattactctcaaaggcttgagaactccggtgcagtggcctgaagtaaatgtcactgatttattttggcgcgtctctgaatcggaa

SEQ ID NO: 3226 - DNA, 4206 bp, Toxoplasma gondii
  source 1..4206: mol_type = genomic DNA
tgaatcacagtttccttttgcaaacacgagagttgtgggtaattcgaaggatttggatgttatgtatcagcagctcaggacgtttcggttactttacgtagctgtatcgtttctgtcctctcgcagtgggttttcttcgtaatgcgtagtggttcgttggtccacccatcgacgacctactgttctggtgaagaaatgagttttcttcaaagcgtgttgttgtaccagatctgcgcctttgctgtgtgtttatctgccaacaagtgttgggtggcacaaacgatgactcgtttttgctcttgttatcatgtttgtatgttggtaaccatccggtgcgtttccgtcggttgctgtgctccagcgccggatgctatgcggatgtaattgagagtaagaggaaacattatgtagtgtttgtgtcctcttgttgctgtaatcccgggatgtgagagaagaaatatttcttgcctgtgtgccgcgtactctcacaggcgacgccgttgtgtatgaatgaggttgaccgtcggaaccgtctgctatccgaggagaaccgcgtgcaagtgaaagtgaacgttaagtagccaatgtgcatctggcagccggcgtgcgtccaaagactgccgattgctgtggttataagggaactgtccgattggcgagtcgtggtacgcctcctcactagagtaaaaagaagaatgggaatgtatttgtctgtatacagtatgcgcaagagcgtttccacacatgcaacatacaggcccttagtcctgcacgcctgtagtgattgcgacatttttcccagtgtaaatggaacagcttgagcggttcccccggcattgcctgtgcggatattcacgactttgcgagcagtttttcttgttttgtcggctaccgcggaaagcgtctatgccagtcagaactcctggcttgtagccgtcaccggctccctgttcacttgtcctaccatcggacattcaacgctcaaatatctgagtacatgtgactgttgttctgtagtgtcgccaccccctttaagggatcacagtgtcgcttacccatgtatgtttgtgatgcagttatttgcccttctgtcgtgtcgtagatgcttgtatgcgtctctgacaagggactcacgtttttgtttgggagcactgcatggattccctcaatatcagcataccgttgtcatccagcttgctccactgtattgattactgttcttagcgagtcagttcagcaccttcagcactgacagtcaccgtcgttacgtccttacgtttttgtcagtacatttgtaccggagattttgaggcgccgcttcgtctggagcaattgccctgatcttacgcgtatcagcggggaatgtgttttgctgcggatgtcaacaaggcgccgaccgctctcttttctgtgacatcgaccagtcaatgcttgtacgaatatagcttggatgacgtgatagagacaatctacctcatttacgtacatcgagaaacgggtctctcctcactggctgatgtattcatgcgagttcctttctagccagcagttgatgcgtcgtgttacaaacatttggggagagtttctttatcaggaacgcccagcggttgagcgccagaacccttgccatcggcgtaaattctttagcatattctcgcaattcattgttgtaccttgtgtttcttacagtgtccgttgatgagacgcactgccttcgaatgttccgtggtgcaatttagtgccgtgcctcgattgatgccgtcggggccacttcgtgaagatgttacttcgcaggaggcaatacagaactgccccatagacaaataaaaacgattcaataggattgagcgcatgtgttcgggaccagcggtcggtacactgcttcttagttacgttttctcgattgagctgtgtcatcacctaccgtcgtcttgcggctggaatgcagtggtcattcaccacagtgttttcgatggtgccgaggatcttttgcaatgtggccaagtgtacataattgatttttgtattcccttcagagatccatgtgtgataatacattgttagtattccctctcagagcccgaatacgtgtatcattaccgtccgtttttgtaccggtgaaaacaaaacgctgactgcccctgctggaaagctccctgtacgacagtctgaaacggcagtgttttgaaatggcgagtccatcattctggaggacgactcaaggtggagttccttctcagagcgattgtttggtgttttcaggaaaacaagtcatgctctctgatgtgatcgacttcttccttcctcgcagctgtctatcatcgagcgaaaccatgtcgacactgcgttgatgagattttaagatcgaggttaatcatagaatatagtctcaaaccggatgaattgtgtgaactgctccggacaacaataaacatttcgccttcattgcagtttggttgcccgttttacatgcgcacacaccgatgctgtttggatgccaccctagtattttttcagaccatagcgagaagcacactgttcactctgtagaactgcgtggtacgaaagttatacacacaagagcttgcgtaaaattttggaacgctcctcgcgtcggtgttctttgcagcgccccgacgtatgaaaagctgtacattttgcagtagagtttacggttactcaacttaccggcgcagttgccttatagccgatactgaaagaaagatgtcctgcgtgacatccgtgttgcgcgcctttcgtgcccgctaggcaatgctttcggacgcatgcaagtactctgttgtttcctgccatgccgcttacaacaactacgattggaaagacctggatgccggatgtcaaacacctagcggtaccgcgaacgtttaccttcgatggaagatttacaaaagatatgggaagcaagaaacagaggatggtgttcaactactctgagtttcccacatatttgcgaatcgtcaagttctatacttcttatggctatttcggttacctctgtttttgctgacctaccccagagaacacttggcctgtctcacgggtagagtttcagtgaccctgaaagatgaaactcaggggtgaagctattttactcggaagcaaaaaccctggtcaatctggagtggtctacggccacagctgcagtgtaagacctgcaatttctggctgccagttggcaaatgtcttctcagagtatgcgacgctgtcgtcttgacgcgtacttgcgccactgacaacgtgagaaacgcctacacagctgctgacgaaaaatgacaaggccgccggaatgttagaggacagaatagcagtcatattttcattcctttctcctctttatgtgtttagagctataccactagttcacttgcactcgcacgacaagactacgatccacacacactttggtggctatcatgccactcgggaccccacactctgccgtcgtctgcgatgagggtccacgggcctagtcgagcagttacccagtccacgctcgtcgcactgttggatacccacgtcttgttcatggttgtctttccaccttgagacagtgctttgccagagcacggtaacgctggcaacgcgtgaaacacttccacgtgagtgtcggaccagcgttggctgcatgtgaaaagtcgactgcaagccgcaagccacaatcgaacaagaaagagcggtggtcacactcgggaggccacacgggcaccgaattacaaatgccagaacacagaagagggtccgtgtctttttctgtgctttgggccgattcttctgaggctatgcttgcgactttagcagtggccgcaagcgctgtacaaggtcgtccacttgatccggtgaaacgcgtacgaaagagccacgacgcacgacttattcgttcatagaaaaacggaaaatgtgccctcaaatttcgtttcaaatatctgaactgcttctgctgttgcgttacggacagaaattcgttccttccggtctccgcatcggggttcgccgttatctgcgtcttctttttcaggcatctgagcccgtcggcaccacctgtaccaaaatgggacagcgacagctttaaaccttctacgcgggacggaaatctggcgtctcaagggtacattgttttcttctcctgttctcgtactctgtaatttctgtaactctccgttctaaactccagcggtcgatgcacga

SEQ ID NO: 3227 - DNA, 2570 bp, Toxoplasma gondii
  source 1..2570: mol_type = genomic DNA
aaagacggaacggagaccttcgaagcgccaacagaagtgcgggaacaagagagagaagacagaaacgaggagaccggagactccgggggaagactatgcaggggaaaattcgtagcggggttgatacaggcaggggcatctggaaaggacgaaggaaacgtatacaggggaaacagcggagaacgggaagaggaggaggaaatgtgagctaaagaggaggaaggaatctgctcttccaccgttgaaagatcatcttcctgtttgacagaagctaagaggacgccgcgacctgcgcaaggcggatgaggcgaagagtctgacacgcgcggatgcatggggaaacagtgaaggggcacaagaaacaaaggagggtgaagctggcaagaaagcagtagcagcgaggcgtattccagggaccggaggcggaccagggcgaaatcgagcagagtgaaagccgaaaaagtcgtggagacgcgcgaaacgggacagaaaaggcgcgtatgaggccggatcgagacactctggagacgtcggggcgaagaggcgaggccgaagcaacgtgaatggtaagaatgggcagacaggaggtctagaagaaacagtatgacgaaacgaagaagtgctgcgggcagacgggatcgagaaagaaagaagacactgccgcagagaggcttggagaagtcgcgcgactcacagtgtcgcccgctagaatcgagtcactatgcgacgaaatgttttcgcaaaaaaggctcggtaaacgtagaggtgttcgagccgtttcacagggatgagggagaggcagacctgttttgtgtccccggcacctccgcaggtcccgcgagtgtcgtcatgtggctctggctcgttcgccgcgccgtcctctgtggagaattgcgggtcaatgcccatgtttcctttggagctgaggttcagggtttacacatctgttgtttaacgcatctcagtcttctcggggtaccttacagacgtccgtctgcacggctcacatgtccgacatgtctggagggagacacagttaagcgaatgcagacacctgggactgtcggtaactgtgaaatggaaaaggccgacttatctctgttgagcgcattgactcatttgcggcccaggaaaaactcacgcggcacagatactaactgcgtccggcgctaagttgaggcgcccgcttttctgctcagagccagatgtgcgaactttggcaagatgacagcggaagtgcggaacacacggcgcgaagagctagcggaagaagtcctccggtcgtggtggcgttctccgcggctcgacaaaaatcgatttcagtcgaagaaagtgctgaagcttgaagtcgagcgcaaaaacgcggcggtgagtcgcccgcgagagggcacttttctcaggaaatcgagcggtcgcagttggacccgatacagcgacaaccgtcttgttgcgttcttcgcgattctggaaaaagtggcccgctccaccgacccgatcaaaaaacgattctcctgatgtggccagttttgtccgcggtccgcatcatgagcgggagtggaatccctttcgagtgtacagacaactgaatgtgtacgctgccatctagtcttctggctgcatgcaagcgtgcccggccaaaagaatcccggaacgccgaagaaagggaacttctgaaagcgctttccgctacagagacaaggaaaggcaaccatagttgcacgcttttacggtcgacccgcggcagtaaagattgtttttcggtgataggctcagagccgagagacgccagcttggcgtgcagacaacgatgccgccgtgctgcctgtttccaacttctctctttgcctgaaaaaaataccggaaactgctcatctttgttttcgtatgaagagtcagcaaagaaaggcattgcgcctggggtacgcagaggagaccccgcgccagcttccgggggattcccgtcgctcggataagacgtaccggtgccggagagcgcggctgccgcacacttttacgtctcgagtgacggaaactgcgaagcccgcattctcttccggacacgggatagacagttcgcaggtgtctcattcgtgtgcgctttgccacggaactaacagagagcttttcgcaaaagcgcatcgcctacattaaaacgaagagtccgggaagttgtgaccgtcaccgagggcagcatggcacgcgcactatttgcactcttgggtctgtctcttctcgcttttccctcttactacacgtcagtatctgtcttcggttttcctcggcgttcatgctgtttctactcttttcctgctgtcctcaacccctctgtgttcgcttctgtccacttcaacacccctcttgcttgaacaccagtcacgtctgtctcctatcgcttgctactcctcttctgctacgagctttctcatgctgtcctatcgttgccgctgtttgtcctccagcttctcgactctgactctcatcacgattgatcaaatttctccgtcgtcctcgtcacctggaatcgctcaaacccttccccccacctaaaccaagggcgcccgtccacccca

SEQ ID NO: 3228 - DNA, 3841 bp, Toxoplasma gondii
  source 1..3841: mol_type = genomic DNA
ccgctgcttccagaaggcaggccctgacgaaagggtagtgtatgtacacccgaagtcgcgtgaagcgcggggctctgcagtcgaccgcggcgtcacttcccttcatttcggcggctccgcagacccgcgatgtggctgaagaacctctttggactgtgccttgcgagtcaccagccgatctccagttgagcgagaagcgttgccagcgctgcagcactgcgatgacgaacgaaaccgcaggaaaaccgacggtgtcgatgaagagcgagggcgccacgcccaggagaagcacctcgatagcggccagcccgcccgcgatgccttgacagagcagcgagcagaacgggtagcagcagggcagcagccacgtggaggatcgaactgggacaaggaccagcggagacggcagggcgcagtcaagagaagagacgttggcctttccttcagaggcttcaagagagagcgacgacgaagggagacccccgcgtgtctcagtgtggcaaggaagggagggcgacttcgagcgctcagccttggtctcgacagtcgccggccgcgctgtccatttacgtgggggtttcggctgttggtcttccggggaaagcagcgggtccagatcgactgaaaaagacgcaaaaaggtcttgcgcaggtctgcttcccgccgtgacagcgtagccaacgcgaggcctgtggaagcgagtgcccagaatgagagaaagaagcacggagaggaagtgcaaaagagcagactcgacgctgaggagccaagaggaaacagagccaccagagaactggaaacccagtctcacatccgggaggtcgacaggttcgagtgactccagccagggggagtcgtggcgtacgtataccgcaacgaagcgtcgcgtcggacaactcgcagcgtcgccgcacacgggaaacgcctgctcgtcctctctgccgccttcagccactgggttgtcttgtccggcttcgcctgtccggccgcggccgtctccctgtggccgaactcttgcttcagctgcgttccttgtctcagcgttctggcgcccttgcgtgcatttccgcaactcgtgagcgaccagactccacaaaacgcgctcgccgccagcccctgcatcgcactgagggtggaagaaagccacgcagttggcgggcggcggcagtctacgcagccagagaagcagcaggaaaaaagtcccgagggaaaaaagagcgaggcacgggagagccaagacgaaccgaagcagcgagaggaaaaggccaatgtgacacgcgaccctccaggggctttcctgcgaaaaggataacgccgccatcatcggcggagccggtgggacccgcggacaacaaaaggagaaccgcggaacggaccgggcgtacggtaggcacaagacaagcgacagaacagcccacgccaaccccttttcggggctgactttcggcgtctaataaatgcagcgtctgacagactgggcagcgcagagactctttcggaaggctcgcagaaaaggcggaagacggcgttcgattgaggcaaaggcacacttaaaacccagtcgcgggaacacgcgaatcttgagcactgtgttccaaacgcccgctgagcagacacggacaaggcgactgctgaaacttggaccaacgattccacgcgaccccttcgccaccaaacgcacccgccaagaaaattcggaaatcaacaatgttgcacggaaactgcagacaaaagccaacacacgcagtggggtgtatgtacatcgggccgcgtggctgcacacgtgggaagctggctagagtgggcgagactccacggcgtaaccttgcacgaaaaacgacgtgattgacgtttgctcccgtgaaagaaggctggcaagcagagaaagtctcgaaggacgcagcatcgccggaagaactgcggtaaccgtaactggctttctcgaaacgatgtcggtgaatgcttcttggcgcacaaaacgggtgaccttctggactgttgctgcgcctcggattctgagtggaactcagttgtgctcgccccggcaaccaagttcttgatgactgctgtaccaacgggttctacaaactggagagtgcggaacctggggatcgcgtttcctcccccgagtacggtgccaagaacgcctgcctgtcctgggtaccggattctctccgtgtctcgtttctctgcttcttttccgcggttctatagagcgatagcctccacagaaccggcaagtctccctgtgttttcttcaggagaacgcacgccggccacaacgtacccgggagaagagaggcgtcagctaacacgttcaaccgttcgtcgagcgcccagcggcttttcgctgaaaagcggaaagtgccatcaacgcacgagctaccagcgctggtttcgtgaacggagcaacttcagtaggatttccgtggtcacaaatgcagcttcgcccggagaagaaaacgggaactgtgtgtttccatcaaagacaacgagcagacgctgagaagacacaccgagactgggagcgagggtcctctggtagcattcaccgcgctacaaaaaaagctggcggagagcctgggaggcgtcgatgttcctccgcttcgcgcttctccaggcattcggttcagaaagacccagggaaacagttgaagaagttttgcagttcaaagacactttcttctctgtccacttggtgcgtcagcctgaaaaagaaaagctcccgcgtgtgaggctggattcttcaacggcacccgtggtttttgggtcgccgttgttcatcgaaatgcgttttctcgccactgaggaggcaacccgagtcgttcaattttttcgggtgctggctccgtacgagactcgtggcggatcttcaccgcttcggcgagaaaatcgggcaaaaccgcctctcttttcgtggttttgcggcgcgtgtagcgcccaagcagacttcgccagttgtacctcgtgacgggagtcgcagtcagtctctctgtagagattgtagtgtgtctgtttattgtgtgagagtactttcggtgtgcagacacgaattcgaatagagcggtgcgttcgtagatcctcttcgctgctgtagggcgacgccttcgtaccccgctcttttctgcgctacaagggtgctgttttgggggggtccctggaccaaagcaagaggctctccttcattttttcaagtccgtccacgtttggactcatacgcgtatagttgctggaacagacttcttgggagtgctatgccgctctctgtttgtcttacaagcagccgcgcttccgggtcgattcctgccgtggaactctctcgcccgctccggggtgtcatcgcctccgagacaagatcgcctgcaagcgtcttctgggtcctgcgtagctgtgcattgaactcctcgttcatgtcgtttaggtttcgtcggcctgtctcggccactggaatgtgtcgatgaagaggatcagatgtaaaaggccgcggctttcaggttgcgagtggttgaccgatcgcggcttctgcaaaatctcggcctccttctggaacctcgactctgtctccacgagcttccttgaccttctcgacgcacctcgctgcgtgtctctggcgttcccgagggtatgtcctgccttctgctctttcggtttcgtttcttttgtttcggccaagctcttcgccactctccctgtttgagagttccgccggccctcggctcctccttcttttctccttttcccgcagccagctgagtgactgactttgtctgccgcctccgccttctcccgcgctcctccgcgtcgcctccgcgtcaaaagcgcattccgcttgtggccgcca

SEQ ID NO: 3229 - DNA, 2602 bp, Toxoplasma gondii
  source 1..2602: mol_type = genomic DNA
gtgtcagcttcatgtgccgagtctctctaggtcagcagcgagatcggggaaaagtggacggtgctgctcgggaactgcatgcagtgctactctttgtggaaatgccaacccggcagcgcttcggtgttacgtcggagatgtctctaaagatattcgagttttcgaattcccgtgctagacatttggtcatttggcttggcttcttgttatcaataaggtatatcacgtgctgcgtcgaagatgggtttcctctgaccaatcgtatgacagctgtgctcttgttggttgcttgtcactggctgcccgaccgacgatgccgcttatttagagcgtgacagacttttcgcacggtatgcagttaatacggccgttgatgaagcacagaaacacgaaaaaactgacacggattgggctccgtttgttcgattttcgttggcaacacacacgcagatggggcaggaaaacgtgtgaaatgaaagccatcagcagctatggtgtaaacagctcatgtggacgattaaagggcatcatccgtttcaagtacattggggcatcacaggctagatacaaatgaagtcttcacggaaaacgagagaaacacgacgcaacaaacaaagaacagatattatccggaaccgtctgctcaccagttgttggccgttcaagagagagcttttaatgtcaaagggagggttggaagaaacatggaaacacgtaggaagttactccggcattacgacacctgaagtggtgtggcctcaatcgtaagcatcaagggttttccactcttgaagcgaaacacgcagcctcggcggccactaagcctctttttttagggaggggactgtggagatctggaaacgagcacaactatactaatattcatgctttgacgaagtctggctcctgcttcagtcatgtctctcccctcacaaatgcatccaacggcatatcaggactataatcggacggctgacgacgttggtaatagcatcctagttttcacgcgactgctcctctaaataggtggggtgaaaacagttcagagttgcaagttcatcaccccgatatttcatgataagaatgccgagttacagtaattagtcgcagaacgtcgggtgttgatgtaagctttccgccttgcttctgcaacgctacatgtccgcaactgccctgcggtcccgacaagcattcatcgcaggttagtttctctgcttacactgtggttgtctaaatgtcgtgacccctcttgtaggaccctctttgggcgtcatcattctaggaaagaaggcgcataaacgtagttgtaggggacgtaaatatccgagaaggcgttcttttgtgatcgaggaagattatacgcgtgtcggtcggatatgcgttttgtacacacgactaaaaacacctgcccgatgactttttttcagcgtctccttcgctgagcctgtctgaggaaggggaaagaagcaaacagctagggctgaatcgtttgcacagcagaacttccgacgtctgagaaaggtcttgtccaaatgtgaaatacgatacactgagtttgtgcacgaacacccaacgatattgacacacgttactgtcaatgcatcgggaaaatgctagcgaaaccgtctgcaggaaggtgtgccacaaaaaactcagagtggaaggagtgatgaactgtggaaaaaattcaaggcggaagaagaggtgttcattttgtggaggtcgcaggtaattcagcattcaaggaacgacgcatgattcgaggggccacccgtgggccccgaccctgttgtccatccttgtgccaagccccaagttgctatgcgaaagcggaagcaggttcccttcatgaatttgatgtattcgcgtggtcaaaaattcattgtcaagttcgtatttccatggttgaattatttcacacgacggacgcccctccaccccaacccgttatacaagcctctcttgtgttacacgtgaggcaggagcaggcgcccatccaccaagaagcgacaggttgcgatgtcgagcgaaaccgcttctacccgtctgagtgacctcatcgtgtcaatctctggcaccccactttcgagctgttgctgaaactgtgtgggtggccgtatgccgcctacactgtgtatcagctgagcagtcacacttccagcgcctccctgattcttggtaggcctcatcagcttcagaactgcgcatgttctagcccacatgtagactgcagggttgttttggaacctgtcgtaccagaggtggcggaaaaagtcgttcaattgccgtcatgttgacaccataataatagttcggctgaagaaagccagtcattcgttgatctggatgtacagtgtcctgtgaaaagccctacccggtaattcaacgccgtcgctgggttgatgctgatcacatgcctaacgcagtcagccgaagctgttgtaggcacttcttcagcgacatgagcgacagtgtgggcatgttgtggatcagctgccgacgtaggccctttcgtgaagacaacagttcagtggcttcgtgtggcatgtcggtccctcaacgaacagcttctgtacagaatttgcgagcctcatgtcgcata

SEQ ID NO: 3230 - DNA, 4271 bp, Toxoplasma gondii
  source 1..4271: mol_type = genomic DNA
cttgtaactgtgttctttgccgtgcctttgcgataacaccttctatctatccatcgcatcccgggtccgtagtcagtttactggcttttggaacagaggataccttcttgaatgtgtgacgttgtattcaatggctgaatgctctggttttgaagcatttgatgtgagtatggttcgaccacttgcgaaccttcgacgccctaatgtgcggcacgttccctctttgcatcgtttagttagatggtgaccttgcttctcagagtcatccacaatagagatacacgcgagaataatagcacggcggtggtggaaagactaatcatcacgtgcactctactcgcgaatctatagcttgcgttttagtctcacttttgaacgcagaaacttcggtactgtgtgcacggtggttgactgtcattagatctttgttgaccagactcccaccatttaggcggacgaacttccaacggagctggaacagtttgcataaatgatgatgtgaactgagacgaagctgctagtgactgcatgcttggtcaatgacgcggagggtgccatagtgtctggacacttggtgactggctcgtcgcggtggcggaacaattgcttacctgcgcataccttttgctattaatgctttgaacgcgtgcacatagtacacctggatgcgcagtttgtcgtttctttctagtgctttccctgttccctctgcaaggacgttgaccgagctgtagaaagacatccccactggccagcatgaggacgaaaacgcgtgcactggccttcgttgtgtgcatggcagcaactcgactcggaaacgtgactgccgacgaaccggcaaatcaggagcagcactgctgcgtcccccacgatggttggtttcctaaatcgactttctgtcgagcgtagtgaacgccgcaaactgtttcagcttctggggaaaaagaactcgcaaagggtatggcgatcgccattcccgtgtcttccatgtgatctatgcaccagaggaatatgtacagctatacggactgcagtcgctatgggaagtcatcagttgaatgcggaagcagccttggctcgcgagctggtaaggacgccatgcagccacttaactcttcacctctcaactagtgtcacattaaggcgaatgaagccgatgcgaaactgtataaagatggtacggttctctcgagtgtgccgtctcttctcctcttacattcattgttaatcagaagataagaagttagtagcagcggaaaaggtaaccgttcaccgccacggacctgagagatcaaactacgacgcagtcttcagaaagcggcactcgctaatgaagctgaagaagatgcaaggcatgagtaagaaatactacataaaccaacttcagcagaattcggacttttccctgtcaggttgagagaagaggttcgtggacattagttgcgatacattagacttcagtgcagatgtacttcatttcacttctcttaggaagagaaggataagcacgaggaggcagagatgtcaggcaagtgtgacaaaactatgctgtcaatctacaatacacctgtaacctcctttaaagctgtgagccaggaaagagtggccgctgcaaagaatctcctccagcacgaaggggtcaacctagaaaagcttgttgcggaggaggtgcgtgtataacagaaaccgccacagaaacgagcgagacccagtccacaatactgcaggaagagcttggtagaaaaatcgaagaagccaagtatgaaggtgaaagtggatccacggaggccgagcgagtaagacaagcctgttgaaccctatttctcagaagcattccccttgcaaaaacaggagttgaacgatactcagagctttttcctggctcttcgaaagatcaagggtcctcaccacatgggcatgctagttgcctgacaaatgagacggtggcacactacagaatccctagacgaaccgtgcgtgaaacccgcgggaagacgcggagcctctggctcttagttattcgtgcagagcccgtaatgcagatgttattgcgtgggaccgaagcgcatcaggttcatatatgtaaaacttctcaaccgtgtcgctaattgtcgctcggacccctggaagaggccagcccacagatacaattttcttgagtcgagagttgttgtcattcgcaagtttttcgaggctggggagcagcatagaaagcgcgtccggaagaagatacagaaacctgttgagtgaaaagcatcacagatgtgcattcgcatatgagcggtgatgttccagtgacccacacaaatctaaattgtgtcttgtttcaacgtacaagacggttgcagcagaaaaattaagctgggggtccaagaagtccgcttttgaaaatgtgacgcgacgatggacattatgccgctcagcattcgcgcgcgcacgttgcaccaagcaatcatccagatcgatgccgacgcctgcaccaaaaacgagtttgatcctcgctccggaagaacacggtcaacacggtactcagaagcaccttcactttttttttcagcaaaaatgatcgatgagagactgttttggttcaccggatacttaccagagcagctggttatccgggagcattcaacgagaactcgtccgtcgccgcatcctaaactgatcggccgagatacacgccaattacacaaattccaaacttgatccgtattgattgggcttgcccttcaacgcggtctgatatctccagattcagcagtgcagtcacttactcgtacaccacgtcggcttcgctgaggtttaaatgttgcaagatggaccttattttattctgcagttgtaaatgagtacagcaaagaactcaaggaatgaaggcgttcatgaagcttcgcccgttgaactcacctctggcactcgaggggacctacgtgctaagcctcaccacaggggttgctctgcagcaagacaacaccgcaggccatatcagatacaatatgttcttcagtttgtggctggttcgtggcgctcttttgtgttggttgacagtctcttactggaagggagatacgaagccgccgctgtcccagttttgtgagtgtggctgcatgccacagcagaggaaactcggcacagaatggatgtgcgcatggccacagagaaattgaatgaggtttgtcaccagcgtaggcatacagatctactcatcgttcctcaccaggtctggagttgttcccgtaaaaggcatccagtcggtttctgagtcgctgtcggagtattcagcatcatttcttgccgaagccccacaattatcccccatttcgatctgcacggcactcttgaagtttcactgtttttaagattagtcgttttcttcaatgaagtggccggtgtgtctccgttgagtcatgaacctatcatgcagaggtccagcagcggtgtcgagccgtgttacaatgtttgcgtgctgcgtttgtcctcatgctcaccctcgatagtgtagtgtgcatgcacccggaaacacgacccttctgcccactagccaaagcggatgatgtctgtgcctgggcagacaagttggccgcagtggaaaaactgaatgaatctgtgcgacctcttgaacaagtgcatctacgattgatcatcaagtaactctgtatcatggtgttggcacgtgactggcagcgctggagacgtccttcgtatgttgttgtcggtggtgaagtgatgcatgcacccattgtacgtcttcgtctgatgtccatgcttcagctccccagtttcctcatatgactgcctgtttactgaaaacccaaagcatagtctttgcaaaatagtcgcagataacttttgtcagaaacaggatctgtctgctgggtttctagctgcatccactgcagaccggcaggaggtccgtgtaagacagtgcctcagccttgtcacgagaaggaatgaaataaagtcaattttgtcacgtaggcactaaacgaactaggatctatcgtcgctttgtgcccgcgctcttttttctctccccatctgcttctctttcaatttcgggcttgatccacccatggaggtgagcgtcggtggttgacagttccttcacggcaggtgttacctaatgaatgtggtctcgcatctggttgcattattattaaccaacccagttatcgtggcttgagcaccttgttagctaacgaccgtcgtgattgcttctactcgcgaaccgctacctctatgtcagttgtaaaactgcgtctcttccgcga

SEQ ID NO: 3231 - DNA, 2903 bp, Toxoplasma gondii
  source 1..2903: mol_type = genomic DNA
ctctgaatccactcaggaaaagtagtccagagggctcatttgcggtgccggatccccgcgtcttttgtagagtcagctgctagccacattgccgccccccaggcttcccttccagcaccggcagactcactttcgtgagtcgaacaatgtgtcgcgctaccgttttccacatgatatccgcgccgttcaaattcaactctcggcatgagacagcaagggcctggagctgagcaggagacaggtctttggcatttgcgtggatgtcgcgcaggagacggaggaatctctcatccaggctcagttggctgaacgtcatgctggtttgagcgagctcttggaggtgaaacaccttgagtgacagcttcgtgtcgtcgtcgtattgttggacagcatgcaaagtcatcagcaccttcttctcctcttcgcgagacgcaaagggtactgtgaatggcggacagattcgcgcgtacgctccgggggtggacgccgacgctggcgaaaacagtggcgttcgcagctgcgaataggaccgcgtcctcacagcagcgtagcgcgagggaaggcaggctgaggagtcagtacactccggcgtcaacgactggccggcaccgccagccacacacgatggtctactctctaaatggcttttccatctttcgagtctgtgtgcgggtcctgttgtctgagctgacgaagaacacggccgtgggggcagatgtggagatgcgctgcaaccaagtctacgagttcgagagacgacgagggaatcccgacgactcacaatcgcggtcggctgctgctcaccactctctgcagctcttgcagcttcggactgcgttcgaagaaactggactcggcggcgcatcagcgtttcccgcatcgagagagcgtcgcgagtcagctcaggcgaaagaggccctcgaccccgacagcccgagaggaagcattccttcgagcaccctttcaagttcaccattctggaagagaaggaaaacaaaggggacgcgcttcccccgaagcctacacaggcaacgaccatccacaataaagtcggacgaccagaaccaaaggaggaagtcggggaaagcacctgtcagaacagggaagggactgtacggagcatttttcaaaagaaaagaaggcgtttttcgtcgtgttgcgtcgaaaggaacggctagttctcttgcgtgccacaaacgcaagagatgctcgccactgtcgctgcgattcgattactttgcattgtttttcggcagcacaaggaatggcgcggcggcagctgctcgaaagatatttcctgagaactaagcggagtttgaatctctaggaaatcaacggtatgcgtccatcgtggagagtttcactggctgcgatggggctgtcgattcaaagcgcatgcacaaaaaagttgagaaactcactccgcttggccgccacgcctgtcgagtggcaacgacgtcgattcatccgactttttgcctcgcaatcgtgcagctaggcttccgcgttcccaattttttctcactctacaacgacataatccatgtggctcgggctgaaggaaacggaggtttccagggaacgcagccaacagttaaagcagcggtatagcgatcagcgaagggctcccgcctcgcctttgtgtgtcttgtaacccagacacgacatgcgattttcggtaaatgccgcctagttgtgagcgacctttgcggttatagatcacccctgggttgaaacactctttgttgtctatcctgttgtccacacgaacgaaactggccagttagaaacaatcgactgattccgagttcggtgttctccccttacgctgcccttctcagagagttgccgctcaccttgaaaggcgcattcgagatttctgcggagagtcacatgtcacgtgtggacagtgtcgcttctttttggaaaatggaagcttcgtgcgattcttggtggagacgtggtatgcatcaaagaaggcgaaggacggcgtgcgagagggttacttgttgagcaccagtggcgcaatggatagcgcgtatccctcctaaggataaggttgtgggttcgagtcccatctggtgtgggttttggatcagtttcaaaagaggctcatcgccttcctttttttcactcttttgatcggtttttgctctcaatgacaacagtggattgtttctccttgacgaagaagtgcctctacaccccttcgcctcttgggctctgctccgtcccccccccttgtggcactcacggcagttcaactcgcgcttggccagttcggtccacatttccgctgcatctctactcgtcagcgctgttgttgatctcacctcgttgaccttctcatttctttctcttccgattctctttttgccccctttccttcttcagactctctcgcccgcctgtcggctcgtggacgttggcgccgcgtcctgccatgtttgttcttcgctgctcacgattgtttcacattccccacgtagtttctcttttccagtgactcgcgagttttcccggggctttttcgtggccttcctcttccagatatcacacgggttccgctgaacacctgcgaaaacagcgaactgcgtttcacgtctctttctctcctgggcctggctgaccgcttctgggggattctctgcccttgatttcgtgtttctctcgtctctctcttctcatccccttccttgcgcccttcttgttgctcgtttcggctctctttgtcgcctcaatctttgctgtccttgcttccgttctctcaccgacccgtcgttgattgcctccacttgaagcttccctctctctgagattttttccctgtgcttccctcgcgagactcaccgtctcgagtctcttctcttctgttgcagagcggatttctttcttccacacca

SEQ ID NO: 3232 - DNA, 4472 bp, Toxoplasma gondii
  source 1..4472: mol_type = genomic DNA
cgcatctggcgactgagacgtactcgatgtcgacgacgattcgtcgcctggaagaaccaccccagagtccgcccaaccgttctctgcaaacgcgtttttctctcctccctgaggatcctgcgaaccccccgagagccacagaggcgccggcgcagaagacaagacactcggaagaccgccgggaggggagatggaagcgaaggcggacgccgaagaagaggctggtgtcgaggacgaagagctagaggatgaggacgaagagttggaggtcgaggacgaagagttggaggtcgaggacgaagagctcgaggtcgagcagaggttccgattcagggagaaggtctcggcgccgacgcgcggttggccgatgagtcgccctgtcgttgagtgagtcgaggtgggggagagagacgctgcgaaggcggggagagaaggggaaccacccggctgagtgtcaaaggaaccgagaggcaccgggggtaaaggcggcggagagaaggaggggaacggggaagccgccacgccaggctgaggcggcggacgcgcaggagggccgttacggccctggctcggatccatgcggagaaggcagttggagaccagcctgcggaagacagagacgcctcagaaaaactctttcgagaactccgaaggacttcttcatccttccttggaaccgccgcataccccagagacgaggcggggtggcgggccagcagtcttcaccgcaaaagacgacactgaacagagaaggctcgcgctatctgatgcgctattgaaactgcggtgacacgacagaacctgggccggaaacaaacagatcgatgtgactgtggtagcggcaggtttacttggcgcaaagcaccagtccaagaggagaagttagagaggagcgttgctacctccacgcgcggtcgtttgtgagaacctctcggcgccctcggagtctcagaagtcagaagaaataagcgaagaaagagaccagacagacaggcggaagacacaaggaaagacccgcaaaagcgacggaataaacaggaccaacacagaaaacaaagagaggtgtatctgaaaggaaaagtcctctttaacaaagggagttcgatttgacagaggaggttctatttgacgggagaagatttgttcaacacaaggcgttccatttaacggtgaagctttccttgacaagagaggcgagccaggaagtcggagaagccccagaaggccagtgataagaaacccggggtgtatgtcgacggagagtgccggcgagcgaaaacaggtttaagaagtgccgacggagttgctggagattctgtgagacgccaaagacaaggtcttcttcgtagtccaccgaggcggaggagaacacaagccggccaaggcagaacctccaggaggtagcgcatgcagagaagaaaagagagaaagccgttatcgtcgaagctcgagaagaactgagtgactctgtggcacccctgatgcagaagtaccgaaaccgaaaaggaaaagttgaccactgccgctagtcctggttttagcaaaagcgaagtgtgcactgggacacacgaagccattgaggcagaagcaagaaacaggagagaacgagggagaagagactctttttgaatagcagagaaggacagggctcgtggctgtaaacgctcggtgaaaacggttaaagtcgcgtgctgaatcggactggagggtgcatgcaacgccaagctgaagcgcgaaaaagtctcgctttctccagtctcgctcacgactcgcaccctcctcgcaatcctcggtgtgttacgcgggagaaacgcggtcatggcattttcgctccttcttctgtggctccttttagtttgcagcaatcagaaaccaatccgaggaagacctaaccacgtgcattccctccgcgatgtcttgttgtcccgcgtgggaaggacaggaacggagagcgctgcgacgctcccgagatgccatccgtcacatatgtgtcttcgtaggcaggatccactgctaggaaatctcacctagactcgtagtcgatgcacgattgccgtgaaataagtgtgtatcggcattttggtagctttgcttatttgtgccgtcacctttgcgccgccttctcacgtgtgtgccgcttttgcccacttctcggttatcggcgcacccagcatcggtaggacacccagctgttaacgttggactacactcttgtgatgagcacaaaaaaggcatagaaacggcagctttctggactctttgaaacgggctctcgaggagaaagaaaagggggacacgcgaggtttcttctacgaggaaacgactcttgcacttccgcgaaccagccaccgtttgaattcgacggaatcgtatctagcacactcactacaaaggcaacctgaagaacaagacacctgaatgtgcgacgaagtgtgctcatacatctcaagcttactagaccactgcgtgtctccagtctttcaagagaacgacgtttagtgtatcacacgtaaggagactcttgtgaacagttcggtgaaatgcactcgcagaacatgcttgagttctgcagcaaaagatcatacaaagattccgacgcctaagaaacgctccgcagccttaccaacagagtcttcgaactcctgtcgcacacagttctacgcacggagaggatttccactctgccacgaaatcgagggattccttgttcaacaggttcgtattacgagagagagtttcacaccttgtgccacgcacggcatgagatcacttctgaatgtagaaagtgtctggcggaagtgacaaacaaaagccactttcgtcggagcacataggcaacgaacaaggcattgacacggaagtgcctgctttcacaatttccccagagatctgtaatggcatgacacttagggtgaaacgtgtttaaacatacgcttgtgtttgagtccccaactattgctgtgtctcccaactggactttgttttgcttttaagtcgaatattgtttttctagttatcatcattcagcaagcatgagcttagcacattccttccgttttttcagagatcggatcatactcgtcatgtctgtgttaatcgacttgacttctacagttctggaccgcggatccttgtaaagagacagaacttctgagatcattacaagattcaaggaggtgtctctcggattcctgctgctccctcacaattgctcgagctgattcctgcaaggaaaggcttcccttgttgactcgacgccgcaggcgatgctctctacatactttcggtattttgatctcttgcctcccctgagaaaacagaacagcgaatggacacgctagaatgcatgtcagtggaatggtgcggaagacaatgagaagcgcaagtttaacagcgtgagtctgtgtgtacatgcgatctcgagatcgacactaacgggtcaatggctgggttctttgctttcttttccgacagttcacgttccgttttcaccggaaaagacgaagaatcggcctcttcgccgcgtttccctcttgcccatatgcagatcgagtcaaccgtttcacaaatacccgcttgcgaaaaagccacatgctctttgttgttatgccaggggagaaaaatggctgccagaggaatgagggagaaaacgggagatatcgctgataacgaagcctaatcgtatcgaacactgcaatgcgtgcttcacaggacagctgtacttcgtcggtaccacggattttcattgcttctgtcgtaataagaagtaacagcacaaaagaacaggacgactccattcctgcagacgttatgtcagtgtttgtttttcagctcttcccacagatgttgtcactttgcttcggttccacatttccacgacagctgcctcagacttcattccggaatcagagggtcgtttaccgtgtaatacgtacacagagaaaacttcagcgaaacgatcaaggctgctcgtgtggccgtcgtcgtgtgggaagtgtaaagtccctctagcagtttcggtcggcgacccaccagttgtacgtttgaagacgcctttgcttttgctgcggtgtctgaagctgaaactttccggcgccaatgttcgactaagcagagaacggaaaaaaaagagaatcagaggcaagttacacagatgctcttggttttcgatggcggtttccgttaatacggagcaggtttcgttgtaaaatcgcccacctaaatgacagcttctgttgcttgtttccatgatttttttcgtctgaagaatcggccaacctacactgcccctcggcctcggaccgacacccggtcaaagtagccgttcatttttctccgtttctctgtggaaatcgctcttgttctttgccttgttgactttcctgtggcgacgcataccatgcgactcgcattatccgtgtgagtctcgttgtttttcttgtttctgccgcctattactttttcgccgttca

SEQ ID NO: 3233 - DNA, 553 bp, Toxoplasma gondii
  source 1..553: mol_type = genomic DNA
aagagcacacaataaaaggaggaacggcggactgcttcccttcaaaggcgaggcgctgcccgtccaccatcttggagacaccgcagcctgcgcgtttcgcgcagaggagaaacgccaaggtgttcgacgtggaagaactccagagaggagaggagcagagagagctgcgcgagggagagaactcgagagtccaaactcccagggcgcgcgtacgggcgcgaaggagatatagacagaaagcacgtcctcaagagaggagaagcgcgagcggaggcaacaacgtgagcacaagctctcagaggcgatcaagacaaacgactcgaggaccagtgaacgaaggcagtttctttcgatgacaacagagacaggtcaccgcaagcagacgcgccttcgaggcttgtcagcagttgtagacaaaagaaataacaacgacggactgggtgttcacgggactctgtggcattcgcgcgctgggccatctctctccgtccattcgcttggctccctaacaagccataggcctcttgtctacggagcagatgagctcgatgca

SEQ ID NO: 3234 - DNA, 2680 bp, Toxoplasma gondii
  source 1..2680: mol_type = genomic DNA
gacagttcgtcgaagtgtcgtagatttccactgttccattcgttcgcgcgacagccaaccaccgactgtcaggactcgccgccagcgactccacgccgactgccttcacctccacgcatctgaggaagcaagccgcaagaaacaggacgcattctctgaaagaaacctagaagaggtaacgaaggaaatctccaagagaagaagaaagaaagcttcgtgaggaaagagcggcatgagtgagggctaaagactaaagactaaacgaatgttaatcagatgctagtaagagtagggaacaaagatggtggaaaagagccttgagtgtcaggtttctactgacggtaaaagccaacagttgttgaactagaaaagactgagacgaacactgcgttcgtgtcctcggcaaacatcgcgagacttctgtcgtcaacgacgggctgctccgtggaagaagggcctcgactctgtccgtctctgaggctgtttcttttgaattctgaggaggaaagtctctcttttcggtgaaacgcggggaacggcaaagggatggaacctcttacctgcagcaaacgacgtcggtctccatcgcgggcgacgcgcaagaggaagagttggtcccccttttcgtctcgcctgcagacgccgcggtaaacggcgggggcgaacgagagagggaagagagcgaaaggaggcgctctcgcgccctctcgaagagcggcagtgtgtgacaggcaaaagcaagtgcgaaaaatcggcctctacttgagtggccgtgtcgtggagaaatagggtggaacgggacgaagatttctaacggcgtgcacgagaaaaaactccggaacttcactttagcaggaaggaacacgtagaaaaaaggaaaacgcaggatacaaaggcgctgaccctaggaaacgcgagagaatcaaatacgcgcagagagagaaagggcatgcagtatacggggcttgtcgaccccacaaaaagcgaaaaaaaagaaaggcgctcaatcacacagaaatgagttaggaagcgagcattgaccgcgaaccaagcgaggaaagatgtgccaaagaaaccggagagggtcgccaccgaaagcgtgccccatgatccgcaagaaaacgccggaaacagagcagagaacggcgtggggacaaccgggccggcaagagaaaaaaacgcgctgactctttttcgcggcgaggctgcgcgagaagtggcgagttgcagagacatgagaaaaaaatcggagtcgcctgaccttgctgcagggaattcggcgaaaatgagatcgaaggacgcccttttctccgcgagtcttcttccgtgaatcaacgcgatcgttcgaaggcggcgccccaaagccagtcccgcaaatcgccagctcgcaagactcgtttcacatgtgtgtgccacagctcttgcctgtgctgtcaatgccagcgaaacgcggacgcgaagagacggcgggcacacatgcacgaactggattttcggaaaaaacaactagtctatgcatctggaccgtagtgccgctgtcacgctcgaactccggtttgccttggacgccttcggaaaccacggaaaaacgccagaaaggttttgcggaacactggacgaacggaggagggcggcctgcggagatgcaggaagcctttcgccggcgcgaaagtcgcaaagaagcaactccgccgcgacgatgaccaatggtcgaccagtcgagaagccgcgacgacagagaaaaggacgcgaaagtggcgcccgacgccagcaaatccagctaaatgtgtgtcccggtgcatatctgtgctggaaatggagggagttttcagctgtctgtacacctcgagctgacgacagcgcctcgacacaatccgcaagtccgttatacttcaaccctctcatcgcacttttacgccagtttacagggcttgggacagctgtcatccatcacgccttctgatttgtttgaatgatcactcattcttctctgtcaggctctctggatactctctgttgcccgtctgtgtcgggatcttgtttctaagcttctgacgccgagcaggaacagctgtggttctcatttcgcagcggaagagtttgaaaacgtgacggagaaagggcgagaagcgacagcagagaagcaagagccgaaggaaattcccctcggtctgatttttcggttgcttccagttcctccgaaaaaaaacgcggaggggcgtcgagttccagctgcggtcccggtccgcccaggtcgttgccgcctctgaccgatgtagaagtcggggcaaacagaacggaaaacgcctctacagatatcgtgctttcttcgcacgcacagggagagggaaggtttcaaaaataggtacggtggtattctcagattcacggcagacgatacgagtaacgtttccttcgtcatttgacccccgagccggagaagggtttgccgtcaacgggaataacgacaaattgcggcaacaaaagcttttcagtcctgcagtctccagataggctctctatctctctctggcgcaaaacgaagatacgtttgttttctcgatcccctttcgttctcagtacgtcacaaatcctttccttctccgtgcagccgtcggtgaccagcgcttctcccagtccgccgtttctctcgcgcatctccttttcttcgtctggataa

SEQ ID NO: 3235 - DNA, 3117 bp, Toxoplasma gondii
  source 1..3117: mol_type = genomic DNA
tcccttcgcttcgcattcgagagaatggagaggcaacagaagaaggcgtcttcccgggagaagagctgagagtgaggaggccctcggctgtctgacagagacacgcgaatgcggctgcgacggcaggtcccctggtctccacctcgccagcgtgtggagggcggtcgctcttaggggggttcgactccagtctctgagcgcagaggccgcatcggtcggcacctgtgaaacgtcccactcctgctctcctgtggtgagactggaaacctcgccacgatcaagaagctctctgtttcctgggaggaacgagggcgcgaaagcgtgaagttcatgtccatgtcccgtgcagctccaccaattgtctctctctctgcacccagctgggcgacacaagcttctccctacccggtgtttttctttgggaacgcgacggcgcatctgtgcatatgcaaaaggtccatcaggttcttcactcactgcccgagaaccgcatgcagtgacgaaggtgaaaggcgcccgatttgtccgacgcttgccccgcttccctctgacagacaacgaggaaaaaaggggactcaattcgctgggagagaaggcgatataccatgcgtcggactgcccctccaggctgtggagtttggggagagcacggggaggaacggaggagttgttcccctcatcttcgccggtgcaagtctctgaaactgcacaccccggagagcgaagggaaggaggctgggacggagaaaggcgaagcggggaagcgcaggatgagcgaatctgaaggaaactcagcagtgctaaggctctgcaggtggggagagtagacgagagaggaggacgacccagacgcgagaaggaaggaaacctggacggagactgtgtctccgtcacaggaggcagtgaggaagcgcgaagggaagaagagagagaagaagagccagaggaaagtccatgctgagggagaggaaccgcgtgagtcgcttctgatgcaagaaagaagtacagcacgaaaaacgcgagagtaggaacgaaactcttgacaagcgaccggggcacacagcgacacccgggagacccgagcgaaacgtcaactctcccttcaatccaaccggagagagaagaaagggacatctcgctcttctgtcttctcccgataatcgataaagggagaaaagctgttgaggctgaaagatgcgattcctgggtcgcatgcaatttgtacggtggcccggaaacgaagacgagcggagagtcggaaagcgtcgatacagcagggtagtgtcagagacagagcgaatcaataaaaagaaaaagggagaaatccacgtgaaagttttctgtctccttcgtggacgcggtcactcgctgaccacctgaacggagaatcgcgtctgtagaattcgcagcacgaaagaaaccgaagttccgcaattgtccttacccctcttcgaggtaaaacagtgtagatcgacgaaaggagaagaaaaattgttctcgttctgtctctgttctcgctctggcgagaaggccgcccccccccccctctcccaccaagagcgcaaaggtgtggaagaaggagcggcgtgtgggccaagatcgtcgttttccgcgccggtccacaaacgaagaggtaagaagaagtgaagctgaaggagaggaagaaagagaagggaagaaagagaaaacgcgagaaggagcaaagcgcagcctctcgatccctcaagtcgattttcctttgtttgcctccggctcagtctcgagctttttctcaatgtctttactgcatgcaacacgagacaagacacgagactcaggaaggatatggtggtcaggtactccattattttcttggaaacggaaatcgtcctaaaagatgcaaatgcccggtactacagacgcgtataaaatacgctagctaccttgttttcatgttcctgacggcgacgtctctgccagcgtctgcgatttcgacgcatacacggtgtctgatgtattaaatgtgtcctgtcaactcgttgctcttgctctgtccacacgagcatagcacctcaacattctggacagacgagcggatttatgactaacgcgggtgctcggttattcaagcttctcgtccgtgcgtgcaattcaacactggggaatctctgaggcaaataccactgtaaaaagcatctgctcagagatatacagatgcgtagatacaagtgtagttgtgtagtctctgcggacagcgccagcgtgttttctcgtgggcgaaagcgagagaaacgccgccaatcttgaaatgtgtaaagtaggagtttccccagacgtgtggtctctctctctctctctatatatatatatatataattacatatatatactttcaaaactacatgcatacaaatgcatgctggatgtgcatctgtatctatgccaagcggcaataactcgccttaagcgtcactggcagggacaagttcattgctgcttttacactcgcagtgtgtctgccattccacaggtgaggtcgtcgacgtggcaagcttttcagagtctaagattcgtttcttcatctcgaatcgtggtgcattctttcgtggagcttagacgccgagaaggcggcatgaaaaagagtttcactgtcccgcatggatgtggaacgctggcttttatcacttgcagcccgtgtggcacagcaaaagaaagaaacggctaatacagaaatacagacgagcaacgagattcccaatggagacacgacaatagagagaagtagtttgcgaacggagcaagacgccggaacagaaaagcgttttagcgaaaactcgagagagtgaaaatccaaaagcaacgagaggataggggggaagcggacttcacgatagaggcacagaggccgagaatgtgacggacagtgaaacgcagaacaagggatatagcgggaagaagagagtgttcgaggttgaaattcggcctccttaccacgcggtgtacctacggacatatttttatgctctgttagttatgggcagctacttgtgaagggttccgagctacgtaggatccttgtgtgacctctgctgtgggctgcctgctcttccaaaaaacgctttggccacttggtgagca

SEQ ID NO: 3236 - DNA, 4819 bp, Toxoplasma gondii
  source 1..4819: mol_type = genomic DNA
agaatcctgctgatccaatttccagaccctcgtgagaacaataggcaattgggggagtccctaaataggaaaggcttcattaactcggacttcctccgagtgttgcttgtgtgttgtgacgattttttccgtcaggcgcgcaatgcagcgtcacgaccaattaactacatttccaagtgattgcgacatcggaaagacgagacagccagacggaaatataggctgaaccgctaggtgaagcagtggttgagaccgagcgacgcttcctgtttatcctgttcgattaccagtggttcgtcttcgtcgcttatgtccccggccggtgttgggcgagaagatggaggaaggtgacgtgacaaagtccataatgaaaaaacttgaatgacaaaatcgtcagaacaggtatcatcaaaaaacgtgtgatccttcttaccgtggtcagcattgtactaaccggcgtccgcatagagtggagaaaaaggagaacttttttttctgtgtgtgtgtcgctgtacggtacaacattcttcgtacaattttttatgtgcatggtaagaacactcccctttttttgcctgctggtcgaatagaaaccaaacgaacctcgcgatgctgtgataacagcgtcttgcttaactgtcagtggaacaacagtgcacacgtggcgactcctgcaactgcgtctgtctttgaagaagtacagacacatgtttttgtagcctgcccagaaaaaagacttatgatatgaaagcggagggtagtctaaaatgaaagaagtcttgagtctgaaacgggtcttgtacgagtcgagtcgtgaatatccctaatcacacatgtagacacctcaacagcgcgttttgtcacgaagaaacaacgcggttaatctaggtaagcgactcacttttcgtgaactgtctctggcagacggatgcttggagatagatacaaccggcggttgttacgtttgtaggtcgaatgcttctgatcctgtccacgacccaccaggaaccgatatgtccctaagcaccataactaaaagatgtcaccaacgagaaacagtcatgcaataggaaagaggcacacacggttgccagctaccccgtccattgcgacttgtaaggtcctggtctgcggatttagggttttaggttgtttgcggcgacaaacgttcggacagaatggtcgaaacgattccaccgttccacgtcagatggcgcttccacgcgaggaaggttgaggaggttctttataccgccagagagcgttgttgcggaacacgagtggactaaatcgtaacggtcagggtgatgatgacccggattcccatttccatgaggcacgttacgccacgagacttcgtatagcacgcttccacccgaaacactccatcggaggccgtcgccatgttggcagcagcaggctaaccagcatgacgggcaagggtcacgtgaagccaaggtgatggttttaagtaagtataaccgctgcgtttattgcagtatcaggacggttagaggactgttgctgtggctgggaaacagacgggctctgtgagctttggcgcgtacagttccggtaaatattttgtctaagaatgccgcatcccgttaccccccctgtgcacgtaccgtgcggcggaccgatcacttggttttcctttgaacatgaaagtggtattggacgtcggtgtttcgccactttaccgtagtttttctctacgtttcaaagagacagtccgttgcgtttcctacgatgaatatcagcatttcgcttccgttaaatgaacgctcctgatggggctcattgtggctagtttcagaggcacacggtgattcttttgcacagcatgtacactctctggagaagtgttttgttgctgcgcgaatctgccaactggtttcgggcgagtgtgacaaagagactatcggactccacaggaagcacaaactgttggcactgttggcatgcatccccaagtgtctgaacctgtttagggtttcgggctcgcttttaggggttagggacttcttttacattttaaggttgccctgtagggttcagggtttgaagccatcgcgctccgtaaaacccgaggctaaatgtgcaaaggcagccgataacagaaaacggatcagcacaacatggtttgttagggtgtagggtaacgtttcgagttcggtttattgtttaacgtagtgtttagtgtaggatcaggaatgaggggtgtagggtcgccgcgtcccccaactgtcagacaccgacatcggagacgctcttgaagaggttgctgacctcacgagtctcgcatattgtgcggcttgtgtttgggagggtggatggcctagatgcatgccacgtgtttttacgaagtggggtgctacgccccatactggacctaaatgtgcacgagctctggcatgaatatgctatggatggtcgcttaattgtatgcccagcggcgggtctgccagttccaccaagaaatctaaagtttactctggttatacccgttgtgcgttttcggcacaccgggacggtgagagtcaggacaaagtaatttcatgatttggaggaggtgcggctttgcgaaccattcatgtctctggtgttgtgtctgttgatggtgtttgaatcgcagggaatgtgtatcgtcagggatgctaggcgtaaacgaagttgcaggaaatggttcttagagcggttgatagttggagggagcgtttcgataggggccatgggcggtcgctagaagcgacatccccggtacacacttaacggataaacgccgtgttgacaagccatcggttctcgaggcgtgtgaaagctgggttgtctgagggaggcacgtgaggcattcgtgacacctcatggtcttactgaattggcatcggctcgcccgctgtaaatgcgattggtgtttgaaaagccgatgtggtacctcgtttgtattcactaagaattgcccacctctcttttctatctcattcccgggcgctgtgacgcttcgggttcattttgtcgggcacttcccgtgtctatgtcttgctgcggtaaccagaggctggatcccacctggagtcaatagaaaatgccatctgtggtggagctaatgaagctatccaattataggctcaggagcacccaaggaaaccgtcgacggatttaccttgcgtggcgaaactcaatcttggctaccgtgttgttcagcggaaaaacgcctctgcgtcgctattgactcggtcatacaaagcgaaaataaaagtaacgtcgccacacatgtctcttgcgcagtacgaagaaagctgcgccaagagcagacaaaccgtattcgacaaggattatcgcgtgaaatatcattgcgtttatcgaggtacttttcaaattctgtttcatgtgtcgactgaacatactttagagataggtatcgctctgcgaaattcttaaaacggaacccttctatgtctcgctgcgtttgcccgcaatgagtgatgggatacgagacatcaatcttacaagagttcgtacaacgttggacctgtgacggctggcgtcacggccaactgtgcggatggcgtcctttccatggacgtgcttcgacttcaaagaggttcttgctttctatcttggtcagacgttctggacaggactgctcggcagtcattcaatcgcgcagtaagctggaagggagttcattttcaagtaacggtatcgtcttggcttcatggaggcaacaaatttccgaacgttgttaccatcagtagtggaagcccccttgccttctgcggacgaacactgaattatcgtcatccgcacatgctccattaggatagcatatagtcgtatacgatggagctatctcaattatcatgactgatgggtgcagtattactgcactggttcagcgcagtgaagtcctgcttccgcgtttcgcgtagctttctgccttaaggggtaaccaattaaatgggtagtgaagtgatatacacacatcgaaagagcaaatgtgatggttgcggcctgctgtaaaacactatctgggtatattttacatcaatggcaagacacatgcctatactactttgtgaaacgaagtgactacactggaatacggtagacaaaggatctgtcgctttttctgatgttgaatcggacagtttgctttttgcaccagactccagaccgattcaggtcgccgccctctttgttcttcagctgttttaatgctggaggagatccaatttgccttctgttgtcgttggccggagcacagcatgtgccttctacgcgaacgtgtgagcacgcggacacggggcccatggggcctcggtcacccgccggggccagcagccattcgacgctgtgtgcggccgcatcactcgttgctgcttccaggacagcgcaaacttcgcactcattccgttgaccggacggagatacatgcacacttaagggtgttcatctggaaattaatcatatttgcagtactcacctcaaaaccatctgcggatttctataagcctaaatgattagggcagacgaagtcattcggtttgactcaatccctcgtaggcgatgttgccggcagagaagtgtttcatgaattgaaaagcactgaacgctttcctggtgagcgagccactttcccttgtatctctacggatactcgtgcaatcatcccatttcggaaccgttttcgcaacaaagcaggagcctgtgcttgttttccccgtgtcgtgccgctgaggttcagcgcaaacgacgacgcctacacccgatagggtcgtcggatctccggaggtaaccagcggtgaaaagacaa

SEQ ID NO: 3237 - DNA, 2831 bp, Toxoplasma gondii
  source 1..2831: mol_type = genomic DNA
gaggcaactggaactccagaaaaggtttgtgtcgacacagctggatctgtcgcggaaacagctggagctgaggccactggaactccagaaatggtttgtgtcgacacagccggatttgtcgcggaaacagctggagctgaggccactggaactccagaaatggtttgtgtcgacacagccggatctgtcgcggaaacggctggagctgaggccactggaactccagaaatggtttgtgtcgagacagctagatctgccgcggcggaaccaagcttttgggcggagagtgtcgctacagcgggaggaggagtagcggctgtgaggaagtttgtgtttccggttagatcagagagacgttgggcgacttgcgaatctcgggaacttggttgttgcgctgcaaaggccttctgtaaatctgcttgcaggggaaggcgtggaactccagttggcagttgaagagcggggacggcaacgggcgcgagcggcgcagaaaagcgctggataggcgtcgccgtgaaattggggatcggctgcggaggcacagagtctgcagtcgccgacgagcgagcgggcgcctcggtctggggtagaggtacacccgaagcaggcaaggtagaaggcgcgggagctaccacagtttggggtgcagccacagaaggatctgcagaaggcacagaagcaagaagtgaaggcgatgttggtttgctgaggccaggcatcgattcggtcacgcgggagaagggtgcaggtggagggtggaggacgaggtcgggagaaaaggacggggaaggaatgtgcgcgggagatgagagggtcgacgcgcgggcaggttctgaaggaagcttctgaacctcaggaacgcttcgaacgaggatgtcacgcgcgactgtcgccggcatagtgctggcgtcaaccgcgtagagaccagcagcgtaaacggggtaagagctgtcggcggcgcctgcaggtgaagggggaagtctggaaagagaagcagcaccgtgatccagaacagaaactctgtttttcgaaggatcaacgaccgcgggagcgagtcgccgcaacgctccgtccccgtcgcgctgcactgcagtccgccagcggacggcgcagccctctcggggcgcggcgaggctcgcaaccaggaagaaaaaaatgcatcgacagacgccggaggcccggtggatggagcccgccatcttgcacaacctctgggaagatttgaagaaaagcagtcgagacttgggcgaactgcagacgcagaaaacgtctgcagagcgtcttccgtgcagcgggttctacgctctaccggtctcaaaacgtcgtcacacgggggttttaccaccgtcgaagcggggactcccagactcggcgtggtgttccaaagtgtgaaatccgaaccagaatacacacacaaacagacgaaacggggaatgcctcaaaaactcgaaaagctgcgatcggacagcttgcccagcgacgccgcagcgacaccacacccgtccagctggatacagtgcgcctctcggctctgtacgcgacgcgccagttaaaagctctggaggggaatttacgggtgaaaatcgaattgggaagcgacgcgcgtggaaagagggaggaaacgcgggggaaactggaaatgaaaactgccgagtgcacgccagaacgatggagaaaccgacggcagagacggcgcagcgtcgctttgcccggcggtgggtagaatcgatacgacgtggactcgcgctcgaaaccccgatgtttgccgccgactgccgttcatcagatgaggacacaaaagtggaaagcgtggaaacaatgtgtaattaaagtccgccacaaaaaagcatctatgcatccccctaaatcgagaaacggcagcgaaagacagctagcccccaacctcgggtgtacgtacgtacacccgagaggatccagcacgcgctgtcgggaatcgagacgatcggccggaacgagttcctgcgcaaaagagacgtgcatttcactggattttcccagagaagtgtgctgtccctagagttgtatggacagggaaaaaatggaaagacttgtcttccttcaggaaattcgcgcagtctgcaaaagcgacgcaccaccgctccttgtcttttgcttttttgccgacggcactgtacactacacccgccagagaccgatctgcgcatgcacagaagagatgaaagcgcgcgctggcaatcgacatgcacagaagcagcaagcaaagcgaaaagcaggaggatctgcctacgcatccacggaggaagaaagtttttctcgagatttcctcgcttttataggcacctgatcgatagacgcttcacttgggggactgtcgacttggggtgatctacgctggagttgacctttgctcgcgttcttttctcggctgtttcttcttgtcccagggtgtaatgcaaccatttgaaagcggcaattttgaacaagcctctagcctgttttcgtctttttccctcgtttctctccaggattatctcccttcctttcaccctccataatcggggctcgtctggtcctcctccacgcactgtctcctcacctgtagccgtttctattcgcgactagctttctgttttcttgacttcccttgtccgttttttctcccccctcccctgaggtctcgccctccgttttccactggcaaatctctccgttctctcgtcgtttcccccccgtcctgtcctcccttttctccgttcccctctacaaagtgcggcggcccaaagacgacgacttcgcatctggcttttccttgtttccagcgaagcgcttctctttcttgactgtccaga

SEQ ID NO: 3238 - DNA, 2939 bp, Toxoplasma gondii
  source 1..2939: mol_type = genomic DNA
tttgaggagagtgccgtcggcttgcgacgacttgtgttggagttgcgcggaaggtcgtgatctctttttccgcgaaggagagtgtcgtaggtgagacattctcctgaatagtttcgctagccaagagctgaaggaacttcgttttggagaacgggtgtgatactgttgtcgacagaagaccgcctggaagaagcttcacacacaaaattgctgccggcagttcgcagccgcatcgcgatctaggcaaatcgtaggcgaaattcagccccatcatttcgttttcggcttacgttctttactcaccgatctacagccgtgatttgcttccagaaatcgagtaatgcgtagcaagttacgtttctcgttttaccgacgcagggatagttacacaggtgccaccactttgacgtttttgtaggtcgctgtagattcgacttccattcctaagtatccggaatcgctagaagggaatgtcggaacgcgcccgactgtcgctgcgcgcgagttttcactttttacgaacgttcagataagagttcacctactgcgacacaccaaccatcacgccactgctccttccgcctgtcgcggactctgtttaccacggaaaagtcgcacaacagaactccacgccttctgcctggaggtttatgacgttccggacagttgctggggaaaggaacgttggaaacttggtcaagaagtggaggatggactcgagaatccacgtccgtcttacagatttgtgtcccttcctttcactatctcaagctggttcgggaggtcagtgtcgccgggaagataacgccagcttagaggcacatagatggacacagacagtccttgaaacctctcgaggaggtgggccgacttgggctgcggaacgctccagaaggaactcgacgttttccagaggaagaaccactccggaaaaaaaaaagctgcgcacaatcgtttccatagcattctttctttcaaaagcctcgagttacctgcagctgtcggcacacggggtcgagttgcttcacctctttctctgtttctgacggactcttttcttagacaggaagttgatgctcggaataacgcgtcgagcagcaacacttcgtcagtccaaagtcttcaagatgtgcatcggagggtctcgcggaagcctcctctcccgacaggcgacgcttgtctgagactgcactgacgaatcctcctggatgactgcagtctcggtttcagttattttggacgctgagagtcaagttcgcggtgtgaccttttaaaaggcaaatcagcgtctgtttgcagacccagtcgctgcttcattgaaacgatgggtacctgctggactccgcagtgtgaagttccccgtgtccaagtcagacaacggccgtaagatgcagtcacgccgaactgtctgcatctcggaactcgaatcaccttcaccctattcactctcctaggcaatatgatgccagaagaaccacggagaacgcacactactcagtagagaacatcgcagtctggactgaagaactcacgccttcacagagtcggggtagtctcagtggttttctgaagaagcaacgccgtagcgcactgtgagttccacagctccagcccagattccgccatgcctctctcgcgcgaaccggcacttcaaagcgccgaacatctgcattcacgtggaaaaaaactggagtttcccggaacccctctctgagcacgagctcactggtttctccgggacaaagcgacacacttcaccactttcatggacatctgaatgcatgtcgaacggccatttcagagaggactcgcggcgttctatgcctcgacgcgagctgtctgtttagcgccggttctcatgagcactccgtggaggaccgttcagagagccactgacgagcaagagactctttgtgttacgacttgacaagtggaccttctcgacagttcacggctgcgtctaccgtttcggagccgttcagagatctctctgttgtaaattgttttcttccatcggaccgggcctcgcgtctgcagtctctgtgtgtctgcctgtgtgtctgcccgtgtgtttgtgtgcactggcggcgagagaggcgctgagtgtcagttgtttctcaacaaaaagtgggcatccttcgagctccagttccctcgactctctctttttcagtgtggctgcactgcactctttcaggcctcgccgttctgccctcctttctcggtttttctcccccgcacactcgcctggcctggaagtcgcctcgagaggcgcctcgggcgcgaatctcggcctttctacgcatcccatttttccggcggcgtgacttctcgagtcctcgcgcgcctcaaaaaaggtttagacagaactgtcattggcctccggtgtccgagctgccatgcgagaaaaagaggccgaagcgtttcctctcgacagagttgccgcactgtcacttccctgcgcatctgcatcagtgtccacgcgttttcgacgactcgaaaacgacgattttctctgtgtcccgccccgtttttggctgcgctggcgccgaacctcgtggtgtttctccgagcgcgaaaagtcacgtaagacaccgcatgtgaacagcgatccgcagagcaacagcaactcagtctttgctttctcagcttgtcaaggttttttccccgtcacttcttgcgcttccctccagatcctctttctcctctctctgtcactcgtcctcgccgttcatctgtgtgtcttccgcgccgccttcctctctcgtcctttccttcaacgaccgcgtttgtccgctcgagattcttttctcctttctctcgtcctttcttgccttcttcttcttctttctctcttccttctttctctcatccgtctttctctgcttcttccgtctctgcttcttcgtctacctctggattgcccggttcgcgagcga

SEQ ID NO: 3239 - DNA, 1972 bp, Toxoplasma gondii
  source 1..1972: mol_type = genomic DNA
gccggtgatgctggtgcttaccaccatcttgcagagcctttgttattctgagaaaactccggaacgaaagggaggcaggagactccaaaggttcctgtttcctcccttggacaaggacaggatttccacaggaggcgcagcaggagaaagtgaacaggcacaggcgtctgtcccaatttcgacagcaggctgatagagacagaaaaaatcctcagattgcttcacagttcctttcttcgccgttcgggcagtgtgttgtttgctgatggctatgccgcgagaattcgagctttgaaactttgcgcatgcagaaggcaaaacagagaggagagagagcatacagaagtccataaaacagcaggtactgactatagaagagacagcgcaagcagagcggggcctttgaggtgagaaaagagaagatgatgaagaagaggacagaaggaagaggaagcagcgagaggaagctgtctagcagctgagaggagggacgatagaatcgactcagtgtcgtgaaaggggaacgggtctgtgtcctcccttcgaaatccagcaaaaagagagaaacaacgaagcgccagaaaggcgacggattttcacagggctccagatggacgcacggaaaaaggaaggcaagaagcgaaggaaaacgagaagaagagacagagcggcgaggaagaagacagagacgaaaaaggtgcagagaaagagggagaacaagaagaacaagaaagagaatgctggacgttctttgtcgtgcaactctcgctacggtacgtgggcaacgtgtatcgatgagcgaaagggagaacctaagagaggaggaagagaggggaagaaacgcagagaaagagaaagaaaaaggagggaaagcgtttagagagttagaagggtttcgtgacgcagatgcagagtggagagagggagaaacgcccgagaacgcggccgacagacgagcagcagatgttgccaccgacggagggggaaatggcagcaggggcgtttgggagagggagagaggaagactggagggcacaacgaggaattgaagaaggcagaaaatggaagccgcttgggtcccgtacacggattttatcgctggaagaaaaagcagagaaaaggagaaaagaaggacgcgtgcttttttcgtgcatgcggctcgcgactgaggctcaaactggcgctggactacgcggtgagggcgggtgcgtagacactcgatggaaagatcgagttttcttttttccgtctcttcctgaacacacacattgcaaataactgggacaaaggaaagggagggatgagcggggaagaacttccgtgagaaacgaagtgaaaaacgcgagttcctccatttctcgctgaccctgagaggcgggtctttgtgagccacacgaggccgtctacacctcagtgggaggcctcttttccagtggctgtctcttgcgtcttgtcggtgtttcttcttatccttctcgcttttctctgttgtcttagatgctcgcttttctgtttcaatggcttgtcgcgcaagccatcttgttgcggcgggtcttgtctatggacagcacatttccgttgtaggccgcgggcgcgtttcccgttgtgtgcggtcatctcgcgcttcttctttttcttcggccgttcctcttcatttgttcaattagcatcctcttctctcttttccgtttgcgtgtcattctcttcctttcttctctcacctctatcttccggtctgcacgtttttttccatctcctccggcttctctcttctcttctctcgtctcgtttcgtatcttttcttctttcctcatctcctctttcttcttgcccctcattcagtccttctgtgctcctgtttaccgtctcgcacggtctgtatcttcttttctcacctctctcttctcgcggcgtctgatcgtcttctctcgcctggtttttacctctcctctctctctctctctgcgctcga

SEQ ID NO: 3240 - DNA, 4504 bp, Toxoplasma gondii
  source 1..4504: mol_type = genomic DNA
tattttatctgacaacacaacttaccttcaggtgaaggaggctgtccagcgggcccttttctggtagccgggctgaatggaatagcttctctcgcaaggcagacagatgcggtgactgaagcagataaacattcggtcatagaggtaacatcggctgtattttatataccttgagtccctccagaggggcttgctccgcttcactgaatacacagtgaggttcgacgctcccaagccagaaggcagaagccactatttactttcgttttccagttgcgtctagcgcagacctgaggccgaagcgtcagagactagcataggatcaggcaataactttatatgatccagcctacttagcatgttttgcatctccagtctccggggccaacatcgctgcgggtggaaaagaatgttttgatgtacacattggcttgcgtcatcgggacagccaccttttagcgttttcttgccgtcggagaacgttagagatacagtgatcggtccaccttccgcagcgtcattgtttgcaaaaggtagcagagtctgttcctccaactcagttcttaaccgagaaacgcatgcctcttctttgcgtaggatttctttctcttccgatagctacgggatatgaaacgtcatagatgcttcttctgtcgtgatgaatacaagatctaccttttttctagcttcttcgaccttctgtgacagctccgaacgcagacgagttgactctgctcggaacattgcgtcgcactctgccacctgctaccacgtgatacggtttccgatcgcatccataaacgttttttacttcgcgctgctccagtgctgtcctaacaatggaattcggtgccatgatttcttcgatctttttagtgtgttccttagtcagagctggtgaccaccaatgatttgctgcagtcaggttcacaaactgtgctcgcaaggcccaccttcttttactctgttgtatctgtcatgcacctcggctataagcatctcctgtttctcctgaattcgatccggtacagggttgtttggtcaagtatctctggtgtgctgtataccttttctgttttcgtttgctcggcaagacgttgcaacttgaccagctcctccaaagcatgttccttcgtggtaatttccgcctgcagcgtttggagacgctcggccgtcatatttgaacagctgaccatgcactctttaatcgaacttcacaacagcagaatccaagtccttacactcttctcgcttcctccatacacaacgaaacagcttccgactcttgaatttcacgtgccaccacgtcaatttctgaaaggaaaagttaaagttgtgttggtgttctgcctccaagtatgactcaccctcctttagcgccatgtcgccggattctgtgcgtttgatagcatcaagaaggcaatgatatgcttgctcttgttggagaatctgaagcgtttctagcataaggcacttctaagtcgctttgatcttgtattagtcacctcctttcccaacgcggtcaatgtttctgctgctcggtcgactacattgcccgaaagggctagcgtcacacctgcctcagtcggaagcgccaacagaaagtcctcctgaattcactggcgatgagatgccctctcacggggagtctctagccaaccagaccttctcaattttgaggctttgtagcagctccagttctgacctaatttcttcggcttgcattgacaaattctcgctttgcccgtgacgctggtggagcatttgcaccagtgcagcgttttcttcgtgaagctgaacattcctttgctccttttcctgagtgcttctgctttgcgaattagtctctcgaagctgcacccatcacaccaccagagcttacaggcggatattggtgagcgtctcctcacaaagatatatctgcaattaaataacccggttggtgtcaggcggtctgccccggactagcaaagtcatggttacctcctttctaactcctggaagttccgatgcagaagcatttaaagttttcgacagctcatttaactctgtttgcagatctgtgagagtctgcaacgctcgagcctcatgtaagtggccttcacatctattaaagacgctgcacctgttgaagcgatggaaaatcggtttccatatcagttatccttttgtcaaggagcgtcagacagaatgcttgactgtcggtttggcatttgatcatgctcaaggacgcgcgatcccgctgcagtatatcctcaacctctgtcagtttctgaacaagggacaacgcctcctcgctcttcaggcaatttgcgtgcctcacggagtcgagttgcttgtgctggttctagtataagcatcatttgacaccagagagcaattgaacgtggaaataccagttctcccaacaggactgctttcatctgtttctctttttcggctcctagtttggctgcttccaggtttgtttgcagagagtttatgtcgcgctccctggcacaacatttcgcctccagctcttcacattgttggcatctctcccgagcctgagcaaaaccttttgggagtgtgaagctacgtagcgttgcctgattctccttaccatctcagcaagggaggtacaagagtgaagcagatgttcttgttcttgaattctttctttggcgtgctgggatatttttttgatttcctgttttatctgtggatttcgttagttcaagttaggtgaagggagacgtcagctgcgtcgaacctcacctgcttaacttctccttgattgctattcataagagcagcggcttcctccacttgttcctttaagcggtctcttttcaccgacagactgtcccgttttttaaacactgtatctattacgctgcgcacttcggatgcggtttccaccattttctccgtcagtaggacacttggaaggattcccgctgacgaatctgagctgctcccgaccagattttcgagcgataagagaagaggcttgcaggctttctccactgcagcctcaaacttctcagcagcggccagctctcttcggatttctagcagatgcttctgaagacgtgcattcaaagggttggctgaaaaactaccgatgtaaaaccagcatgtcctaatcacagactgaggattaccttcgacggcatgatttttgatggtcaatgacaacgagtggatactggctcccacagattccaaacagttgtgtgactccggtgagttgtcagtgtgcagtctgagctttttgctgcccggacaggggctaggcagcaaacggccctgtccattggaggtcgtatgtataacatccatgataaacaacagctggcgttcccaatctaacaacagggaccaaggaaagcacgtacgcaactatggttcgaggtgtcgtaaatgaggtcgttttttttgagtgacagtgtggttgtctcgtacagagttatagacaaagcgggacccacggcgacacgaggcttttgtaatgacgactcgggtgtatatacagcttaggatgtgagtggtgacatttcaaccagcacggtatttgacttgctgtcgcgcaggagtggtcagtgactgtcaggccacagtcaagacaagcagcaccacaagctccgtcactggcgaatccggttattcgtttagcaatgcccaatccgattgtgtgcatcactcgctcgcaggtgtgggttaagtctcgtcgtttcatgtcaaacacttggaggtggcagaggctcgtacgaagaagactcgcgcgaacggacaccgagtgacctgttctcaaagcatgactgtcggtgctggctccgtgcgccggaatgcccgcgtgtcgtgatggaggcgttgtgaaaccaacaattcttcaatgatgtcggaagaaagaacttcagctagggaaaaagtaattaaatcttgaggaaaggatatgcgacaagaaaggcgcggtaccggctgggatcgaaccagcgaccttgtggttaacagccacacgctctaaccggctgagctacggaacctggaaggcgatatcttccggatgtctccacttatttcgcatgcaagtcgtcgggatttcgctttcgtggagggcttgtcttgtcagagtgcactgtgtaaaacgatagtgtcacagaatctgcgtcgctgttcatcttcatccatacacttggaagcgtctattcttaggcaaatgggacgtttttgagttggtttttgcctttcgacttctctgtccacagttcgagttgagtcccgtcccatttccccccatttttcccccttgggtgtaaagcagggccacggctttctccaatttctttgcggaccgtccctcctctgcgttccgttgaatttcggcgttctgctcgtttccgtagcgctcaaaaatgccacggcaactcgactgcgtctatcgctgaggctcgcaactgcatacacgcttgagtaacgcacgcccccacccgatggtgtcctgccgaaagaacagacgcga

SEQ ID NO: 3241 - DNA, 1800 bp, Toxoplasma gondii
  source 1..1800: mol_type = genomic DNA
cgtgcggtatcggattacacttggacaccggaaacatagacatcgagccgctctgtcagcttgtgatctgcatgcagtgacgcagcccttttggcgagttctttgaggtgcagagacaaagcacgaggaacgaacgggtcgtagaagagggcctggcccagctccgcgtaccggaaggagacgcgagagggaattgtactccatgttgcttgcgcctggccacagagacagagtattcagtgtgaaagcgcacgcgaaggccgccctgccctcggtgaagccttcagttccacgtcaacaaaaagtctcactcattttcggactcagatcgacacgtctcgcgacgggtcacagcgcagcgaggctcaggtgtatgtacacccgacggacgcagggaagaacgcggaaggaaatgatgttcttcacgtccaatctgagtcaacggaaaagagaagacgtcggggaatccctcgtttccagaccagaagacacagaaagacgagagaaagcgacgaatgcgaaaaacagaggacaacccggcgacaaaaagagatagaaacgtgacagagggataaaaaaggaatggagataaaggaggaaacgagaggggcagaaagggatagagaagagaacacgaaggagaaagaaaggcagatggaagagaaaacaagggagaaagaaagggagaaagaggaagggagaaagaaaaacagacaaggggagagaatcgttttctacaccactcagtgtactgcaaattgggtggttagggaatctgcgaaaggacttgtctctccaggccgttctcctacgtattgttagactgcatgcacgatgagaacaacgcgggggcgatgcatcatggagaaagaatctgcatcgcatatctttctacttccccaacagactccacgtgccgagaaagaggatatcgattgttcttcaaggtctctggacgcatgcagacaaagtcaagggcgggactttcgcggtgtctcgacagtggatcatgggagacagcgaggacaagaacagtggagccgaacggagaaaagtgagagttgagagaacgtaacctccccgttgagtgaagaaagaaaagagaggagagcagaaagaatttgcaggagtttatctctagagtggagaaggagatttgtgagagaacgcagaaaaacgcatgcagaggagacacacagcatgaaaaaacgcgtgttctttacgcgttcaaccgtccctcggataggattcttcaagaggcgattgccagatggttttgaaagacatgttttctgttttccaggtgtcaatacactcgtgcggtttcttgattgtcggatgttcttgttttcctgtccgccaccttttgtcggttttccccttttcggcggtgttcgacactgcacacatctcgtctttgttcgtttgcccgtttttctgggttttctgtcacttgcttcctccgcagtttcctttctcccgtcgtgaagctggctctcgatgtatctgtcgccccttctcccccgtttttcctcggaaagcatcaaacacgcacgaagcacaggcgagacaggagacagagaggacgctcgtcttgagtagcgaaacgagacagaaagaagaagagagaaggaaaaagaggaccagcaagacggatgaaaagaaggacagggaagaagaggaggaaggcgaagaaaaggacggcgaaaaacaggaaggaggcacagaagtgaagagcggagaggaaggagaaggaaactaggacgaggaagataacggagtgaagagagaaaagcgaga

SEQ ID NO: 3242 - DNA, 1627 bp, Toxoplasma gondii
  source 1..1627: mol_type = genomic DNA
gcgtttgtgtgtgccagaaagcctggagagttgcgtggaaagaaggaggcagcagtcaacgcgagacctcgtctggggtgtacatccagagctccacccctgttgcaccagtggtcgactttccctctgcgctttttctactgcgctgcggtgctccgtaaacgctaaagtcactctaagtcttggccagaaaacagtgtcttccagtgtacgagtgcatgcgcatacatacatatatatattcatgcatacatacgtacatacatgcatacacgtgaattcatagtgttacattctttcaaccaagtagatgcatctattatttctacatacatagatctgtacatatatatatatatatatctgtatgtacatacgagtatagacatgtattcatatgcttatataaactgttaccgaagacagaccaggctggacggttcccggtcgacaggagacagcagaggagggcgcagggagagaacggaaggaaagggaagccgagaagatggacgaagaaggaaatcggaaaactacggttttttagcaagacgccgcgttcatgtcgtcgaactggtgcgatcgactcgctgtttctccactggagctctgctctgcacagaatggcgacgcagacctcaagaaacgcagaggtcacagagaacgcgggcagagaagaaatggcaagagagacaagaaagctgtcggagtcaggaggagagagggaacgcgagggaaaggcaaatggcgcctgagagcgaggaaacgcaaaaacctaaccgagaaggcgaggaaaaacgaaagcagcagacgggagagagacgaccggaccgtgagatgaggagaaaaggcaggggagcgcgcggcgccatcatgacaaaggaaccaaggagtagcaggaggcgtgtgtgaagacaggaagtgagggagatccgtggagacagcgtttcaagtagaccttcttcgcgacaaagtacagattaatacgtctccacagggtagaaacgtcttcatttttttgtgcaggagagaaagagtcgaagctaaagcgaccttcaccagaccggcttctctcggcgatccagagaggcgacgcatgcgagagagacatgagtcttttgccgcatgcatgccttttttttgcaactctttcaaactgtttaaagcagaaactctagcctcttcttccagggaaacgagcttcggtgaagttttctttgtctgtctggatgtttgttccccggagccggggacggagaggagaaggatctcgcgtttttctccgtcctttcctcgcagaacagcgggcgagctctctcacatgcaaatctttttcctgagaccatgtcttgattttttctcctccgttcctctctccaccaggctttctcgagtctcccgctccgtcgaactggtgtctccgtcgtattccttccggtcctcgtaatcgccgcttcacgatgggcgtcttctagagaaaggggagcacaagggagcgagagagaaagagaaacagcgagaaagaggacgagagaaacccagagagaaagaggaaagagggactgactccgtggcatctcgccatggatgtttcatcgatgctgccatccttcgtcaatcctcaaaa

SEQ ID NO: 3243 - DNA, 4179 bp, Toxoplasma gondii
  source 1..4179: mol_type = genomic DNA
tttcgctcttgcccgtcactcgccctcagtgcggcgtttcttcttctccttctttcctttcttctcttcttttcgcttcttcttctccttcacctcgcggtgtcgctccgcgccactgcctccaggcccgagccccgcaggcgcaggtccgccggggggggcactcagggcgctgcatgcgctgccgacggcggaggcggcgcggcgactctccgcagtcgcgaacttctgcgccaagacgctgctgctgcgtccgtcctctgcacctgcaggccgcgggaagctgcccgcctgggccgcggcctgaccctggggaaacgcggtgggcgccaaaccacgcggaagacgcccgcgcggcccccccgcgccgcgaggtggacatacacccaggcgccccgggtgtacgtacactgcggggtaggcgggggctggtgtatgtacacctgggcccgagaggcgggagacgccggagaggctgcgggcgaaggagacggcgctttgaccgctggcatctgcattcgtgccggcgaggccgcggctcgattcactcacgcgggagacagagacttgcgaggctgctctggaggccttgcggtccagctggcggagacggtgaggcgcgacggccgacgcgggaggtccggcaagcaggaaggcggcgaggctccccgcgaccttcttcgtctcgctcgaggcgtctttctgggcgcccgcgagctccgcgaagacgggtgcctggtcggctcgcgcctcgggcctggaggagactgcctgcgtgaggtccgcatccaaaagctggttcagagaaaacgtctgataccggtaaggctctgggaggagcgtcaggggaggcagcggctggtggagggcgaagacccggcgctggtgcggcagacaattcgagagaagacccgggccgtaaactgcatgcggagcctggtgagagcgcagagccttctgttgcgagtgccgagcgacatgggcaagcagcgacaatctggaggcaagaaaccacacgctggaacttaggggagctgggatgcacagagagagaggggtggaggcgaggcgaaggagaaagacgaacgcgggcgagggagaagagaggcgcaacaaggtcacagcgaagaacagagatttgaaggtgagaggagaagagaaaagtgaggagaggagaaaagaacggacgaagaggacaggaaagacaaggcgaaaaaaggcagaaaggcgacagatggagggaacaggaaggaaacaagatgagaacagagaagagaggagggggacatgagggggggcagaaaagatgaagaacaagggaagatgagagcggaaaagtcggcagaaagcgcagaagataaaacaaagaatgaggaaaaagggatgagaagaaaaaaacagaaaagagaaacaacctacctttcaggcgccgaactgaggaggtcgtcgagcgccgagagaccccgcggagtctcaaggtcgggagacgcgacaatttcgcaaaaaaaggaaggcgcttcttcgcacgggtgtctctccagctcgttgactgcggagtctgcgcgtcggccctctttcgtctcttcctccgcagccatgtctcgaaattcaggggacgagggagaccagctgacacaaaaaggttggaagaaaagagcggaaagaaaagggtgctcggctgcgctgtatagacaggcaggcacctacgcccaagacgcgtcttcctgccgaccttgtttccccttgaaagacgagagagaaggagcggagaatgcaagaaaagagaccgcaaagcaagcgaaaacgtggaccaaaaactgagcaaagaagcgagggaaaaagaagacaaacgaggaccaatatcgaagcggcccgaggtccgtctggtcagccgcccgaaggcggtcgagagggaagagaaagcaggggaaggcttccaggaaaaagaagagcaaaaagaaaggaagacgaaaggcgtttccacgccttggcagaaaacgcaaagatttgtctgcaggactcaacggcggcgccgtctttttttggtgcatgctgcgctttatgcgtacacatttttctcgccttcccaggtgagtcggcatttcgaggagactcgcgagttttcacacacacataaacacagagagtggacattcggaaaaagagaagcgagagggcaacggggactcgagagagaaagagagagacagaaagcgggtggaagagcgacaaagaaggcgaataagagagaggcagacgggaggcggagacacagagcagagaagagagatccttcgaactcaacatgggtctacctgcttttgtttgtcgatgttttccttaactttgacagttgcgcagaaaaagacgatcccggaaaaaacagacgcatgcaagtatctacatcagagaattttctccgtttgagagtccagacaccaatgccattcttctgtgaaaacagtgtgcgctttcagacgttctgtttgctcagggcccagccgcagtgcttttgttacgagacccacacatcttcaaagtcttgaaagatacctccaaactccacttttacacatttctgatacagcttttaggaaagaacaagtcttcctttactgctggttacctacatacgtactccgtcgtcgcgaaatatgaatttacaaagatctctcgatgcatatccgacgtctctcttttttcctctatccatttacatatatatatgcatatatatatatatatgcgtgtaaatatatatatatatatatatatttgtatgtgtatatgtatagatatactgtgtatctatcagtccttctcgctctctctccatatagaggtccatattatgtctagatgggaatctggtaaacacggcgtcagtatgaatagccatcttccttactcgttgggtaaatacaagcataaatgtgtgtgcagtgagggactgagagagaagcccgaatagaaaatcgtggatcccgcaagagacgagtttccacagaagaagaagtggactggtagagcagataggctgataggactcagcgaaaaagaattttacgaaaacgttctggctagggagatagattgaactctgtgtgtgtgtgtctgtcacgtttgcacacccagagaaaacgtatttatcaagaacggatgttggcccccgtttatccggtggaacgacgaaacacccgttggaaacgacacacacacacagacatatagtagacctaaatatttataggagtatggatacatgaatatttggatagaataccaacgtgtatgtgtgaagatgcaaacacagtagatttttatcgcagatagaagcagatttaatacatgatctcgcttacagagaggctctctgcatctgcgcatgtaaaacgactgagatgcattatattcattcatataaatgcataaatatgcatatatgcatataaatatatatatatatataaatatatataaatatatatatatatatatcacatgtatacatatacataagtgatgagtgtcgaagtgctgaagactgtatactggagagacgcttcagagcgttttcaaactgtggagttttcgggagaacatctcttcacctccctccactgggtggacggggaagtgtgactgctgtcgaagccgtgaccgcagttttctcgttttgccggattaaagaaattcctttcttccctaagagtccacagaggcagtctgcagcgacatcgagaagcgtttacagccacacacctttcttgtccttcttggtctctcctgctggcgcgactcgaaaacacagctgcttgagtccttctttttgtccttcttttatccctttttcgccttcgtcagctttctcttttatttctcccggctttctctatcgtctgtgcctttttatttgtttttcctctttttacaagtcttttttgcgctcgcatgcagttgctgtggaaatcctcctcccccccgagagtgaacgcgtcacggtttgagtctccgagagcagtggggcgccgctattcccctttgcgtctcctgctgctctgcgctgccgctttccggcaccttttcttttccttcttttcgtctcccgcttttcttttctcgctgcacttttacctcgttggcgcaggagtcctcttccgagtgaggtgtgtgcaccca

SEQ ID NO: 3244 - DNA, 1830 bp, Toxoplasma gondii
  source 1..1830: mol_type = genomic DNA
gagtttacggtactgtatgccactgtctccgcttgcacgacagagacgagcgttgctctggtctagtttgcgatgaattgtctgtttgctatactgaattaaccaagtcaacatagaagattcagttcgcaaatgctgtctcgctggcttattggattcaaagcgctcgttacttgtggaaggcttgctgttttcagtaatatattgcacatcagctgcaaagaggaggggaacagtttccagctctatgtttcaaggcaaatttaggagagtgccgatcactgcatccgaaatctaatgaccatatcactaatttgcaaaccgcgagctctacgagtcactgaatgtataatacggtgaggcggcaaaaaaaagagtggtccttccagtactcgcatggaaccgcgtaaatgcctctcttcaaagtgcgcgatatcaagaagtcagtcctcctctattgttttcgaagtcattcactgtcatgtaagagcatctcttgtttcaaagggcattgatcgctgtcacggttgatgtcggtgctgcaataagcacactattcgtgaccgtcgatccacttggataaacgaatccaccagcatctggagcaatttaatcctgcttggtcacatcatctgcatagacaacctcagcctctggtgaagttgatcgcgggagcgagtagccacgcaacgctacagggtcttcccttcgcttggtgcagcgggttttcttcatggggttccttgctgagtggagtttgtatcaatgatcagtcgcctcaaacctgccaaatcgaaatgcgtagaaggcaccctaaaagtgcctggtaatgccaccgggcaacgactggtaaacgaaaattgtgccgctgctttaaaggtcatgcagtggcttgggctggggccgcaagtggggcaaccttgcgacgactttgttgtcctcaattttcaaacatggcaccggcagtaggagtgggcgttgtccactgctgtaataagtcgccgggttttttgcaagactatcaccttcgtgaggcactagagcaacccttgtatatattggtggcttctgcgtataatttccgttccacgtgttctatcacatgggtgaatgctaacgtgtaccgaaggtgtcccaggacgcaaaaagctctgtccatgtgaatacacagaaatagactgttcgattgaatttgcatgatgtgctcttaagaggcgaacacataacagagcgcgttatagttcagtaagagagcaataccttatgaatgtggtatccctgcagatccatgtcaacaaatgccactacctttgccgcagtcacaccgtcggctgtttctcaaaatcggaagactcgccatacacttcgcaacaagcggaaaagactttagaagcaaaccctctccgaaacggcgccttgccagctttcggtctgcgcgatattactatagtgattcccggattctttaaaagggacaagactcgaaactgtgagacactttccgttttgaaagcctctcgaatgaattgcttcatcaatgtaaaacagaatcaagatctgccccacgcaaaattgactttcttccaatcgaaattgtgattcatcacggcctaccgttctacatttcgtttgcgtacgaacacgataagcctggtgagttccgtagaagtaaacttccacagtaacgcaaaggcttgtgttatgaggggctgcttcggcgtcgactgatgcagaccaactgttcgagcgccaagactattttgtcgccacgcaactgttggattctgtgattccttcgaggcactggtaggggggaagctttggtcacaa

SEQ ID NO: 3245 - DNA, 1778 bp, Toxoplasma gondii
  source 1..1778: mol_type = genomic DNA
ttgagtcgatgtagtgggcgatgtcttctctttgtatgcctgttttctgaacgtgttttgtaggtgaaaccaatctgaagaggcctgaagaggaggttctctgtgtcaatccaactcttttgagtgacgaaaaaacacttgtgagacgttggctttggggatatctccatcatgaacggccgtaaattcaattccttcaaaggaggacgaacccatcgagtcacaaagcgcgtttccgagaagaaaaactggcggcgaaagaaacgttgttgcgtcatgtttttgcgtatccggcaagcggcacagctcacacaccacttggatcaacgatgagccatagcacagatgtcagtgcagaaagcttccagttgttgctataccacactgttctttgtaaaccctacgcgcatgttgaccttgagaacgccaatcgctgagaagttctcattcgtacatatgatgccccgatgtacaaaataagactgttcgtcaatcatggtctatttgacgctgattgactgagacagagcgagttttcctttcgtataaaccaatgactacatacgcgtgtgcttgcaacaccacagactgcgccacgccaatcaagtgcagtcgcacccctgtggaaagggcacaaccagtttcatatctgagtttgaggagggctctgcacggcctgtggagggccttctaatcaataagatacatgtagaaaatggacggcagcaactctaaaattgtctttaatagtgaatcacaaacgaatacagcgcaatccgtctgccacttttcgtgtgctggcggcagctagatccaaaccagcagggagcactggcggtgaggaagttacgaactgatgtacgcaactttccagagagacagagagggtctagccacactggatatgaaacgcaatagtcaaaagtgcttgtttcggaggtcgctagctcttttggggagcgtactcggagccacgcctgggtcccctatatcagggcattttttatctgcagcgttgactcctgagtccgtttgatgcttaccgagagctgtggttcaagcttccctctggtacacattaaagttggcaaaaaagcaggaggggaagaaggggaacgagatccaaagaagactaatgactacctgatctgtctgtcgaggctctggagaccagacggtcacaagtctctctcgacagtgcatgcacgtccccgcatgcagccactctgtggtcgttcgcatgtaaactcgctcgatttctcgggtctgtgaacgtgtggggctgaaaataacattggaaaacggaagttcatgccccgtgtctttattcttcctcactctttacatttttctacatgaacctgcttcatcctttgcaggcagcccgtctgttagtgttgacaccgcttcggcttcctccagtggactgccgagggtccactcaactcacggtcaacacttcatctcccgttaagtaggatttacagctgaaagaaccgctgatcagctgccttttcctctaatccatatatcggcccacagcttttctgtactgtttgtgtgctactcatactcgtctgactgacacaggtggcggcgctgaaggcactcggcgatacatttggacgaaagagcgaactggttgtgaactgccgagtgacagcaacttcccgtttaacgttatgactgcgtagttgttactcgaaagtacatacattggacagccacggttgccaatcatccgagaacctcgctcttcatcagacggccacgcacca

SEQ ID NO: 3246 - DNA, 2023 bp, Toxoplasma gondii
  source 1..2023: mol_type = genomic DNA
cgcaaacgcgcttttgcataccagctgtacagatacgatattcactttggtagtctcgtttctgtgaggagatcgtacggtccagccagacggcacgagaaacttgatctgaaattgaggatcaacttagttgacagtcgtgtggctatgataaggacgaaaatacacaatggagtatcagctgtacattgttggggtggtgggggggggggggggagattcatttaggccttcaactttattgaatagtgtcacttctgccaagtgcgagtgtgtccaagtggagtgtcgaggagcaaatcgcaaacaggagtgcagcaggtacttgtagggcggcggcatccgctattttggtcatagcgaacatactggaatatccgactcgacagctttcttcgaggtattttagactcgaacgagattcccacaactaaacgcctgctctgcttattcttggaggtgcctttttttatagaaaacatggactctgtatgagctcctcgagatccagtggattgcctgtaggggcaggcagggctgttcctgcgtagattgacaagaacggaacgacttaagatcggtgggtacagactgccgaactaaacaagcattagtcgagttaaatgatacagggctgaattcttggagacaaattacatgaaatcgatgccgaccttcgttttgctgctctcttacatgtgtttgcttcgaagaagacatcgactgatcactctgtagcgcggtgtcatgtgtcaggctttccctacgcaaatcaacgaacactaagcagccaggaaagagatttctcgcgtagaatgcgacatcgatgctccggaactgccccgaccacgaaacagcctgaaagatatttgttgttcacggaaggactcgggaatcttcgccttacgttgcttctctgaaaaccgacaaagtggccgctatgtaatgcagagaaacgtcactgaacctggatatcgaatagacggaagccagaattcgatccctgttaaacctgcagaccagccagtctatcacttcacaggagttccgcatgctttccgtcaagtatgcatgctgtttcgctcgtccacgttttttgtctagcatccacgaatcgaaggatcggtgagatcccttgccttttttcttgttattaagaagcagtcttgtcagaatgagaaaaccgaacggggactggccacgacggatccccgggaagctttttcgccggtagttgactcgacgcaagcaagcgactccgctgagccaccttggctgccgttaccagctacatgtgttttctttagcaaaagtgcggcgcttctggatttcgaggtccccgtgcttcagccgacaaacatgttgagttcacgtgccgatagcgctttccaaaaacatgcgtgttcccgtctgatatctctcgtgggtctacctcctgtgctggaactgtaggccagcgtgccgttgtttcagacgttttcaccgtcttagtcgtttctctccaagctgattgtaccttcatcgtcgcgttccttctagtaaaaagagttggtttgcttgccagtgaaagttattggaagaaactgtcaaagttgcgtatgggccgccagtgcgtgtcggtgtgcgcgaactagagcgtagctgagtagcccccccagggttccacaacgctagaaaggaaacgtttttgtgtgtttcgcagttgacgcggttgcatttgaaaccacacacgagctttaactcccactcactctgaaagcagtgacagttcaaggcaatgtaacgccaaaatattggcggctctctccctcccgaggtgccaggctcgcgtgcccactgccagtttcctctccccttcattttttccgacattcgatgggggaacttccccgtttcaaccatcgtcgccggagttgaatttcccttttactcgctagtctaccactgttaccgaatgtgaattccttttctcccggtgccgtcccgcttcgactcttgtcaccgaactgagtttcctcaagta

SEQ ID NO: 3247 - DNA, 2192 bp, Toxoplasma gondii
  source 1..2192: mol_type = genomic DNA
tgtatgcgacgaagtttcaaagaatggcggaagccctgcgttgctcccaccgcgcagtcacggttgcctatgcggcgggagccggccttgagaggagtggtagataaacagaaggacaatccggccttctcagacgaccgcccggtcactaaagcagtttcttcgagtcagagaggagcaacacccccggaacgaacctggcaaaccggttcctatgtggctgggaatgacaggcaggttaccgcgtttacaggggctcgggtgcagaagcagccagaggcaaggaagatgaaagacgcagcggatcgcacgtctctctttgttttcgggtcgggtaacaaagaattcgaaacagtccagcgaagatggcagaactagcatgcacattatagttaacagggacaccttttcgtggggggcgttcggtcaaccatcctcttaccaaagaaacaccaggtgtatagacagcttatgcttggaacagacatctcgtaaaacgagtttgccgtctttttacgcgactgaaaggagggggagatgggctgagagaagaactgggacgcatctatggtgctgcactgaaacggatatcccaaggacctgagaaagtgtccatagtgtagcatctgtctcctgaaggtgggagcgacgaacaagacactactatggaaatagttgtcaacgcgaaataacaatggacatcatcagagtcgcggtcgcgtgttgccgcgtggctttttaatatggtagacacagtacagcgataagtttatcgcctgtgacactgcatagcggagaagtgctccctccgccgctggttggtcaagtttaccatggtgaattgaagtggaatatcaagttctttgcacgggggttcgttaagttccgtaccttaagtcttcacatatcgggagccggctgtgacgagacaagccgtctaactagatgaaagcgcgttcaggatcggctgtacaaacgatattttcataaatctgtttcttgtgcaccgtccggaactgcggtggaactgcagttgcttttattgtgatgaacacagagtttttcaagggtaatccacttgtagcaaactggctgtctcggcgacagtaacgtctcgatcatgacttcgtcgagaagcgagatgcatgttcgcatccgcagaatagacaagtaattatacagcgcaaggctcgcgggcgttgccatgcgtttgtcgattatgtgtgtctgccacttcctagatagtcacgcgtgctgccgaccacattggaacgcgactggcattgcctgatttttgcttcactgggtgtaagctacgctcgttgaaggcttcctcgcagtgaagccttcacattggagccacagttccgtacaggcaggcgaagggtgaagaaagtggaaaccgttgcaatctgaaacggcggggagatgctttgagatcgtacagaacgcatacacgagccagtcgatcggcttggcgtgaagcacaggggagcgtaaagtgacaaccgggtcagaagaccgaattgctgtgtagccgtgctgatggatagtcctcctgttcaaactgttattacaatttgcttcaaacgttgacggacatgggaagccgccactgcataaaacgtggagttgagactattgggaaactatgtttccagaggcggcttcaaaaaacactgtttgtgcatggtcgcgacagttcaaaccaggactttttgtctgccttctgatatccgcttgcttggcggcgaaacgaaacggataacctttctcccgattcgaagcctctgctgcttcgcccgagcaggaatgctccgcaagcgacagctctcacacagtcagctggcaggagccgactgcgcaagtgtagcactttgttgccatttttttcattcaacacatagcatgcaacgctttcgacggcgtaatgtatgtcatatctatgtaaatcgacgcggtccgtggcgggaaccaatccaaggttcgtcttaccagtagctcaataatgctaatgacactgttcctatctttttatttatatcaccatccaagcaatcgaacctgcgaaaaattcagccgtctcccagtcctcccccaattggccaggcataccatcagatgcgcgttgtggcgcttaccatgtgcgtgcatctgcttcgttattagcgcgctctgtatatcttcaggaa

SEQ ID NO: 3248 - DNA, 4938 bp, Toxoplasma gondii
  source 1..4938: mol_type = genomic DNA
tattttcgtcatggttctcatgaatttttcgtcgagacaccgcgcaaagtccacgccgaggttgccgacggccatggcgaccagttcgatcgcagcgagcatcaccgggccgtccgccgagaggcgcagcttctcctccacgagagccgcgaggacgcggcctttctcgtagctcgagctgcactcgtcgatcgcctgcacagctgcggcgagggcctcctcggagcgccccgaagcggcgaaggccaccgccgacaatacgcgctcgacgaacgcggggaagcgccctgccagcgccagtccatccattgagaaaacctggagaatgggggaggaaggaagacgaaggaacgagagagaggaagagaggcggccgaggaggcggacagacagagagaaaaaacagaggcagaaagaaacacggagatccagcaagagagagaaagaggaagagcaagttgaagaaagaggagagagagaaagaggagagagaggaagagaaggagactgagtctcttatgtctgacgaattgatcgggcagagaaagaacggagagcagaggtgaccgtaggtccgagaagagctccaaagggtcgaaacgcgtctgaaggagctgaggagactcggaggaaaagtgaaatctccaagaaagactggagccgctttattggacagagaagagagagaagacgagaaaagactttgtgcgggaaggctcttagaggtctcgagagctccagcgagctccaacgcccattttaagtctggaagaatgcagaagacatctgtcgaaaggcagagagcaacaagacggagagacaggcgtcgacagagtcgaaggcaggaaacggcatacgaagaaccggaaagatctgctgcgcggacgccgcgggagtgacctggcgctcgcaggtttcgcgtcttccaagcgctggtgtgtgccgggaacagcaacgcagcgaggtttcggaacggagcaaaaaagtctcgccgttgaaaaacagcgtgagaaggcaagggtgcagacaaaacggacgaaggagcctttaggtcggcacagaccccgcgttgctgggctgcgatggcgaggaacgcggtgtttctcgacagggaacggcgacgggggagaaccagagagttcaggagacgccgaacgaagagcgcggacgagaacgcgttgcctgaagtttctccacagcgacagaaacgaagggaaagcggctaacgcacgctaagacattttctgcggtcgtcgaaaacgacgcacagagcagagagcgttgatgaccgcgaggtctcctcctctcgacagctgaaaacggtgtggcgagaaaccttcgcgttcggcgcgctcgttcccccgtgagttgagtagaaaaagctctttgaggatatcggtgctgagttgtggaagagaaaaacgcggtttcagaaggtacactctttgcgagtcgcgaaactgttgcgtaaagcagcagcaccgctgccgacatgtgccgcagcctgtttggggaagacagctcttctgaaaagtcgcgcaattgcagtcttttgttcgtgcaacgcgggagttttttgccggttgtgtgctcagagagacgaacaaggtgcacagactatgtcatttaccctgcacttcgagctggactgcggcatcgtccttcaggaactcccagaaaaatctcctttaggcactgaagaccgcaaaacgacaacgcgaacgcgtcacatacagaaaccatcattgttcatgcacagacggaatgactcatccctttcggtttccacctacttcactcctgaatgtgagttgtttcgagggctccgagtcgtccgccgctctccgctgccgtttcaacagagcaaacgcagctgaaaaaactggcatgatcctccacccgtttgcacagaagaccctttgctgttaaccgagctctccattgttggacactcggccgtttgcgtcctaaaactgccacgctcgacggttgtttcgaacgaggcgcaggtcggagcaggactgtccaggtcggatcatcgacctcaagacatgtcgttggggaggaactgctcccccacagaaaaacgagcaagaaaggaggcaaacgaacagcttcctgcggagaagaaatcggttccgtacagtgttagctgcagtggggacagggggaggaatgaagcgcagcttctctgccgcattctgccgtcgtcgtgcctcgagggaagctttccagtaaccgtcgcgagcagatatagcgatacacgaaaaaaactcacggatttgtgccgacacaagctgctgtaaagcaggcagatgcctctttatctactgcccgccatagtatgctactttgtgcgaccgcggaaagctttgctaaaagattaactgagttgctctaacctcccccgggcatgcgcagctccgtcatcacagttgcggacctcgaggaaacacagctggaaagtcgactcgcgaaaactgctgggtccgtgtcgaagaactgaaagggcactttgatttcaacgcgccgcgtggtggtgacgttcgtctgtacggaattgacagatcggatgcagacacaaaagaacttggaagagtattcgaagtccccctagggaacacagtcacggaatgacgacaacggagagtgatgtgcatgttcgtcaccctcgctaggtccggaagacaaagaagcgcctcttgtcgatctctctttagggtccggaagtggaaaaggaagtggaagcgcgctttttccccaatgaagaagccgtccgttcgtggagagtgagatgcacttcttgccgggacagtagccacacaccggtgatgcgacctcaattctgttcctgtctatcttctgtgttcgagccttcacaattcctcgtgtgtctgccagcggggagcgaactgggaatgcagaacggaatccactgttcggctgtcgtttttctgtcttgtaaactctgtgcgtgtttgccagctttattgagcgggaggttggagtctatgttccacccgaaccgtcactgtggtgtctcgtttgctaaataatcccccttccgcacagtgctggccaagttcctcgaatctctttagctcactgcgcaccgaggatccactagagaaaactcacgactggctctaccgcgtggacgtctgacttggtcgttcgtcgactcaccgtagccgctgcttgcctcggagaggtactacgttgggaactaggaaacaggaggtcgcatgagttattggcaaaacagtttttcacactcgaaaggacgccgcgcgtgcacactccgagttgggctcctgttccgctcccctcgagtgacctggagaggctctcgactctttcagaacgcgtggtatttatgactgctctgctcttccccactcggttcgcatgctctctgaggttgccaagtcctcaactctacgtcgagtgctacgtcacgaatctctgtctcctttgcacaacttcagaaacggagcgaacagctgctctctacaccagttaccgtctgggcgctatatgctctgctaacacacactgtcagttgcatccgttgaacaagaagacgagagcgaaaccgagagttcaaaatgggcaaggtggagaacctgtcttcacatggaagaggtttagcgcggttctccagaaaaatatctctctatccttgctcgagaatagcctctggatgccacgagcttcgacatcgaggtgccgaaccggtctgactgcagcgaaaaattcgggaactgtttctctcctctgcaccacgggcgccgcatttctccggaaaaagcttgtgtctcgacgcgactcacctcggtgtctccagaatccttctcctcaagaaatgtctggcgaaaaagagctcaatctgcctccggaacgccttttgtcgcacaactttccgcgccaggtgtctgtaatacacgcgaaacgctcgagagcgcttgacctggttggaggcgcctactcctcaagaaaagctttcgaaattgacacaatgtgaccgccaggcactgcctgcactgaactcggagttcttcgctctctcccctagctcgaagcgcaaacagctgagagtctctcctcgcccggcgctcgagcgtcggccagatgtccacggcgatctttcgcacttgtctttgcggtttctctcgggtgggtcctcagtcgcccccaaatctctccttcttctgcagcgtcggcctgcgatctccgtttctttctctttccagcttctctctctcgagacacaaacaacgaagatccgcggacggcgagacgtcgtgactgctccgtcaagagcacctttgcggctaccagcccccctctcacaccagctgttctgtctcgtcctgttttctaatttcgcgtgccaacaaacgatttggccatatgtttttcaccttctcctcgagattcgattccttttttctctcctaagaatcctcaagcgcctctctccagcctctccagccgggggccctccggtcaggtcccgctgtgctgctcgacgtcgcctcgtttccttctgtctccttcccgctcgcttttttcttctcttctgcggcatcgcaggttttccagcttcactctcttcctagttgcctctctcttcatggttttcgtcctccgtctcctccctagttcctctgcctttttctctcgctcttgccgtctcttttcctcgccgcgcgtccacctccacttggccagctctgttttcttccctgccaactcctctgcagacccgttctctctgtacctctgagctgtcgacctcgttccgccgctctccatcttctccctcggttcctctcgcctccttgcgtagagcaacctcccgttgtcttctgaagagtcttttttccgctgctctttcccctccgtccccctcctcctctcccccctgcacacaaa

SEQ ID NO: 3249 - DNA, 3600 bp, Toxoplasma gondii
  source 1..3600: mol_type = genomic DNA
tcttggcattgcttgcatgcagtcttctgcaacgtctgttcaagaggcgaaggagagaactctcaacctccgtcggaaggcaggcacagcattaggtcgcgaggaaaaagcgtcttctccgctcagaaggaggcgcccaggaagaaagaggcaacggaagagacagggaagatccaggagagagtgatcacgaggaaacgaaggggaacgtagagcggaggaagcgagcttctgtttaccaccgcgcccctgcggcagcgcaaggatgtccaaacgctcgaatctcctcgagactcaacagattggactacggatttacttttatggtggtagccgaaaagccaactgtgaatccgcagatgtgattcttttgtccaaaggaaggcttcgttgtcagcatgaaacgctacacttcggagcgaggggaaactcctgtcgccgccattgaaacacagaagacagagaaatggagggacgctgatatgaagagcgacacacagagaggcaagagagagtgaaagaaagacgagaatgcgaagacgctccagagaacgagacaagaacgcggagagagagacggttctccgacgcaggtagcgcaagccccattcgccagtggttccgcccccgtgcctttctagaaaggacaaggctccttccaaccttgttcagcgacgaaatgctacagagagtgccatcctcacggccgtctggagagaagaagttggcctctgcttttcctctccgctgacggaaatccctgacagcggcaggctgcgcgcggaggcaggagaggccgtcggaaagccagggcgacaggaacggcgaggagtacttctgagaccaggaggaaaagtttgggtggttgagaaaagcaggcactctttctccgctctcggcagatggagagaaactcaaacacaggtggaagcgacggtgtgcactggctgcgaggcggccgcgatttgcgcgatttgcgcctggcagggacgcggccagcgtggaaaactgcttgtcagggcagaactggaagaaactgaacacggtcgtttcggcctgcgcctccagttcgctttccgaacaagagaaaagcttgcttcttcgcttcctcgcggaagaatgcacgaagtccagctggctaggaagccgccaaccgtttgcatgcacgcgcgccagatgcgccaggtggacatacacccgacgcgcgcgtagcaagctgcgagtcccggcgtcctttttttctccgcgcgtcgccgagaggcggaagcgcgtcgatgggaaaaacgcgagaaaaaagcgcagagaacgcacaaagcgaacggagactgaagacggagaagaagcggtcgacgaacagaaaaagcgaagaggcttccgctcttggcaggaccgcaaacatcacgccgcgcgacaccgggaaaaagcggagcctcgcggtgtcaccgtgtgcagcggaagacttgacaaaataaaaaagacatgcccgacgtgaaaagaccccaaaaaacaaaaaaaacaaaacgtacacatgtcaacaggtccagagataaaccttatatccgatagccatgcatgcacacaaaaatatatacacagtcggaataccacgcatatacatatatataaattaatgaggaaggcactgcctgccctgggtagaggttcctggattggactgtctttttcaaacacacaaaagcaagacgtatacgtgtatacatacctatgtatacatatacatacatatatatatagtgtatatattgtatatatattggaggctcgagtgattcagaggcgcatttcgctgcagggaatgtgccaagcctcctttcattcgtaagacgctttccgacactcgtgactccagtttcgctggagacaggcaaatgagaaaaagattgaattccgacattgcccactgtcattgcgagagagtccagtgcggtggcctgtcagtgtagagaacttggttttctttattttatggccggagtcacctggttcgtctccggcagcaaagaagtcacctgtgctgatttttttcaggcgcttcacagatcttaactccatatatacaccaagcagaaagaattcggttgaatctcgcaactgctttgccgtagattctgaatcatcggtgacttctctcatcggtcgtcagaaagtcaagttgcgaaagggcagtgaactctcgattttctgaggcgccgccatgtgcgttgcttcccagcgaagcacaacgcatctcttttcttcttcgctctgtcctctcttgtctgttctcgtccctgtctcttctgcaccattttctctttttttttgtcttgttctgtgcgaggcagcgtttgaatcctgcgagagacctgagtgctctggcgcgttccacgccattttttcgacgcatttccgccgtgtgttcccatttttgcgatcgttactgtgtctctgccgtatcctctccactcgtccgcaagcggccttcggtttctgtccgcaagcggccttcggtttctgcgcgcttctctggaaagtacgtcctctgcacggaaggcgccgatccttctgttcgcgttcatgcgccagttcttcctcaagaaagcgagtgaatccactaaaaacagttgaaagtctccctccggcacttcgcagagtgcgttttcaacgtcatcagtgacggcgcaaaacgttgtgtgaacttcctcccgcctccccggccagtctttccgggctgtctgtacacctgaagggtcgcgagaccattatatattgggatggagatgaggagaagatgtgtgaagcaggacatgttttttatgttttagaaagggacctcaggaaaaccttgccttgcctgcttgccaagagagtagttcgtctctgcgttggacgcatgttgtgttttcaggtgcagatgccccagatgttttttgggaggcaaaggaggggaaaggcggagaatcaagagagaagtttgatgcctttctacgcaaatctcgaaacgtggaccgcttggaggaaaaggcctcaactgtcttgccaagtccaaagggtgtgcacactgttggttgcggtgtgcacagccgctggagcctgcatgcatgtgcatgcgcttcgggtgtatcgacagctagctcctgcctcgaaagcggcggacccgcgcgagcgccgagaggagaaaaaccaacgcagagaaatccagtctcttggacaacctttctccaaagaattgcatgtagcgagcgagacagacgatctgcccctgtttgaaaagaggaaggagggaaacgctgcaagcgctgctgcggcagcgcaggaggttggcgtctccgcgagacacgggcgcgcagacaagagaaaaaaagatcctttcgcattctcgacgtgaatcaaatgggacttttgcgtttgcctgcatgcacttgagagtttcaatcgaaaaaagcagatttgccgcgagtctcgcgcttcttcgccggctgccatggacataacagaagcgacactccagccttttttctcctcaaaaagggagatttctctctcggaggacgagactgcagatctcttctttgcttgaccaagacttttcttcagtta

SEQ ID NO: 3250 - DNA, 2273 bp, Toxoplasma gondii
  source 1..2273: mol_type = genomic DNA
aggtacagacggacagaaaagctgaattttggtgggcgtagacgcatgccgatgggaggcgaggtggaaggtcgtgcctgccacgagaaacctgcgcggctctgtgggtgtccgtgtaactctctatggcccacgtcaggaaacatgaagagaagcggagtctactctgttctgtgatgcaaggaagcagtcaaggttccattaccgaccgaaaaaaggaactagaaaacagtgctactttgtttgtaggtgtggtcgcaaaagtagcgatacgcctgcaggaatgggacacgaaaaaaatatgtgcttcatgcttgttgtccggctcgcatgctcttggtttttgtcacgacctcttctaatcgcgttttattttgttgattatgcgttttattttcgcgcaagtggcttctcagttacggcgtttcaaagtgcattttttaccttttctggaaacgtgtgttttctccatgttttccgcaaaccatactgccaccgccgaattgactggcgagacgttgcggctcccgcgcatcgaagaaaaactcgatgtagcgtgcttacgctcgcgttttaaaatcaagtgcttccttcaacttaaactcggagtatagagaatgacggcgtctgcgactcactgcagacctaaaatcagaagtcggctgcagacttcgtgcttaccgcgcgactgcaactttaaactagaatgataatttctcgtaaggaaagaagtaagacgcatcagagtcggcaaaagcgttaacgttgcattttcatctgccacgcagagtttcgacccctgtcctccgtaaagtagacggaaagcgtcaaacagagcgtctacgccgcagttttcttttataaatgctttgagaaacatcgaaccgaagcttgttctccacaaaaaaattcggagatatccggcacttcgttacactcagcaacctctagagttattaccttggagatgaagcagttcatccgactgtagcaaagaaattcttctgttgcttcgtaaatttgtgcatctcgctacagtataactacgtattcgttctaggagaaccattgtatctgttctacaacctggggacgtggagagtcactatattcattaagctaatatgatggaccaaatgaatgcaggtaccatagtttctcccaagatgccccccaaccgtcgcgttgtgaggaaaaataagtgtcgctgtaacaggcgcccttcacttgggcgggcggttgacccctgaatgagtagcgcagtgggtagctccattcgggaaatgcttgcccacttgctccctggcaaggcagtatacctcgtgttacctggtattctgtgatgatagtgcgatggagtggttacggtcgcttaataaggtattgggttaatctggagaagagttacgtagaagtcctggtaggcagtcgcaagttgtttaacctctcattaccatgtgtgttgttcagcctcggacgactgtgaagagcggttctaatcccaacaaccgagagacggagagcaaaattatgtcagaggcttactggcacaactgggtgagttcctgcggtgtttttaacccggcacgcagggtggaaggcaacatctcagagaacaggaactacggcttgtgttattctttgactggtcaccaccgtatactatgcatttgccagctttttctggggactctgtactacgagttgaactgcgaatttagatcttgatgtctttgtttaggggatccgcgttctattgtgcctgtaaagggggacgcagacatccccgtactgccacaacggcccacaccagttgctgtttctcagcagcctaccgcaacataaaatagacacgatcgcggttcgagtatcgacgtatgtgcacagactgacataattaatccttgcacggtatgtaaaaagcaaagggcaccggcgctcgttcttccctttcagtgaatttccagagggtacaccttgacaacgtaccctctgtttcgaatttcagaatgtcaaaactttgggggctcaccggagaatacgctctccgcggggtgtacagctgcgccttcggcctaccacttttcctggccctttctcacaaaaacacggtcacaccaagcactgggatgcctcgttgcttgagcgtcatttttggttcttcaaccgtccaactccaccttttgagacgccaacggcatcttgagtctctgccgaattttcgtgggaggttgtcacgctcacaaaaactcgactcagttctttgggaacga

SEQ ID NO: 3251 - DNA, 2164 bp, Toxoplasma gondii
  source 1..2164: mol_type = genomic DNA
gtaagcttggctgcgttgtaccttcctgctatcccgtcttatccccttctgaagtgcaggcggtacgccgttttttcatatttatgctcactgagtttcttctaccgtcagaggaaatgtcgaagcaaggattgcgccatccagggcccggaacacggcggcgtccttccagtcttgctgctgtagaagaagactcagaagctctttgttcgttggaatggaggcgggaagcataggggacgatgtggtactactctcgtaaggagcgcaaaatccgtctcttccagctgcactactgacaggtccaacggatggggacgatgacctcgtcgctgcgagggccgcgctaaatgctgccattgtgttccaccagagaaaccatcaggggcttggtgacccaacggctccgggcacaggaaaagagtgtctgaacaaagcctgtaccggtgatagcgcagctgagggctggcacatccagaagagcccacccgccctcctttgtgctggacgactccgagctctgtttttaaaaattgtggatcgttccagtttcggtcttcacaacttcttccacaatttgaactttatatggtgggtttctttgacatcagaagacaggcgtttgctgtggaaaactcaaagccacaacgcaagacataccgatatgccgctatctcccgcgttgagtgccaccccagctccttcgttaaattttcgacaaaaggttctgtccgtcgttgcagaactgacccggaatacgccaacgaagcagaggagtcgaattacaacctaatccgtagcagagagagcagacatttcagcattcgtctttgtggtcgccgattctaaaggtggagatacagctgactccacagacgcgcctctccgcacgtacacctgaaatgctgttaacagttgtgcaaagaaggtttcgcagtcactgttctggtgcacaggcaatgaggacctaaaaaagagtggaatgtgaggcaacacggagcgcatggcgatcgaaaatacagggtcactccagcgagctcaccggtgcctcgtatacgcggacacaagctcgtgtaagagaccgattccagaagaaaccgccacgcacatgatatatccagcaacagccctcttcctgtcgtcgaccaactctttttgaatcaggacggaaaaaatcgcttgtacttgtcgattagaaaagccatgtaacggcatcggtctgaagtgctgcctggttcgcctaatcctgtccagcaaggcgttgcatgcatgcattccgaggaagctgctgagttctcaccagcaaaccatgtggggccgctcgaagacaaactaacagctaacatcatgtttcgccctgcttcacatgagcttgggaaatgtatatgtcccacttttcttctggatctgaacggtttcaggaggcattgctcgtcttccgtggtatgccccggagtctgatgaacgcttctctcgtctggcggagattacgcctgctctccgttctgcgcaagtctttttttagtatccgcgtacatagtgaaacaacatttttttctttcacatccaatcgccgcgcatttgccgcggttcgatgggcggagctgtggcgtggcatctgctgcgctccgtacactaccgctgtgctgctctttgcgttgacgtcaacttgattctcgtctgacctgtgattcgcgttattggtcagtcgtgacttggcaaatcacacggtgtttacatgagtagcggtggcgtcagcgaaagcccgagtggaagtatcgcgagttgggcggtcgctgcggatacctgttggactcttcggcaaggccgcttcttcccgctggctctactcgtttgagaggcatccagcagcctaagaattattggtggaaaaaggactcctgcatgtatttcgaccacgtatccacagtttccagttaaatgcgtttatgaaccaccgatatatcgtgtgatgactcctgtatcagttgccttgttcattcaatcacgctcaggacgtcacatagtacgtttttttgccaattgttgcttatttgtatcccccgtgactccgtctttccacagcatctgcgtaatctgtgtatccacgcgagcgcgctgctgtttctgaggcggtggtaaagagtcaaatttcccgtagcca

SEQ ID NO: 3252 - DNA, 1708 bp, Toxoplasma gondii
  source 1..1708: mol_type = genomic DNA
gagaagacggacaggcatggtggagagactccagacagagacggtcgccatgggagggccgagaagaagcgcgaggaggtgagagatgaaagagaggcagtggaggagaaagaggtgagagagaggagtccgacgaagaagcagtcgactgagagggcgaaggaggtgacagggaagaagcgagacacggagagaagagcgaagagaaagatgtagaagaaggagacgaaggagaagcgagagaagccgaagaaagaggagaggaaaccgaacgtgagggcagcgaaggatggggatcgtcggcgcccgtgtgagacagccagggcaaggacgagtcctccatgctggcgagaaggatcggggaaacgaggaaacgcagaaaatgccggacggagaaagaaggggacccacccaatccgagacaagagagaaggaaaggcagtctagaaaacgaaagagaccggcgaaggaaaccagccggaagagaaaggaagaggaggaagcagtaggaaggcgaggataaggaaggagagttactgacaaagtaccgacgtgttttgaagagattgatgagaaaacttggaagagagaggcgcgaagcccaatgataagggaaatgttcccaaaccgccggatcgtgttggctaggtgaattgatcaggtttcatagagacaatcagtgactgttcttgtgattttcatgaacggagtggtttttcgcagtttgaaatcgtactaacggcgagaagggaagttcatttcaaagaaagggacgggagagagggcaggagcaatgcatgccgaagtgtacacctatttataactcgactcgctctgatatacaagcgactacatttaattctgtatggaggctgaggggtgagaaggtggaaaatgcagcagcagcagcggacagaagcagcgagagaatgcaacgtggagtgtgttccgtgtagaaagccgctggagtgaatttgaacgagcggagcacaaggaaaaaaaacgagaagcgaagagatccttctgcctccaagtcagtagcaacctttcatgttctcgtctttgccggcgacgctgtctgcatctggttgcgcctttttctcccttggcttgtcttgctgcgtcacccgccaaagaactgtcgtcgcacatgcaggtaccgacgaaaggcgagacgctcgacggggaaattcgagagtttcagttttcctttttgtaaaactaaccgtgcctttctgcttctgcccgtggagccttcctctttctcgcatttttgccagcttgcatgcagaatgcgtttctgcaacatccgttgtctctccgcacccgttttgagcgcttctccttttagcgagactctcctcagtggaagcgcggaaactccagttgcactgttgtggtctgacacggggacgaagcgagggaagaaagagaaggaatcaaggttaccagccaggcgcttctctgtcctctgtccgcgtcctgcgacagcagctcgaaaagctccagacgaggacgagtgtcgacgttggcgccttgagagggaagcgcaaaggacgagggaggagacgagagaagctgcgcctcagaaatcggagagaaaggaaagcgtaaagggagactatacaacggtgtagccttgtgtcagaggtcgttcgctcagcaaacggggacgtcctcctctgctcttggccgtcgcctctcatca

SEQ ID NO: 3253 - DNA, 2256 bp, Toxoplasma gondii
  source 1..2256: mol_type = genomic DNA
tttcttctccaaaatatcctcgtcctctgtgtagacacactcgtcgaagacgcgcgtgtctaaggcaacttcttcggcatcccccagatgcttcacaggctcttctgcctgccgttcctcagctggacgggcgtccccagccccagcggaaagcacggcctccctctctcctccatctccaacctgtgcggtctcgacgaagtgccctggaccagcacgcaaacagctgctgtgggcgaaacgtccgtctcttgcagaaaatagtgggatgaccgaaggaggtttccagcttgcaaaagaagtcactgcgttgattcctgacagtccagacaacgagttgcggtagaagacatgggaagaccgctgtgacgcgtggcgggagtcgccgacttccagtgtatggtggagaagcctgggggcactcggcctgactccacgtggcagcgtcgacaactccacgaactgtctgaaactgttggattcgcgtgaagcagacacgtgaccctcggttgctcgctcctctggagaaaaagcgacttcagcgtcgcggtagggggtcgcagaaaaacactcgtgccggtggccgtctcggactgtccgtctaaaaggccgcggtgtctgtactgcggacgcaagtttccgtagtctggaatgcgacttcattgtcgcgcttgcttcgcttccacgcgaggtagacggcgcacggcactgtttccggtctcccccttgtcagtcctctggcaacagccatggacacttccatgcacagagatttggatttcgctttcatgtggcgatttacatgcattgagttgtatttatactttctgcatgctctcgcttcagcccccggccacagccgttctcagttcggtcttcgccttccccctcggttcgggcggcacaagccagaggggctttccacacacttctcttgctaccctggtgaacggacttctttgctccgacagaacatgaaagaggcaaacacggaccgcagaacggaaagcggtgtgctctcggggtcgttgttgtaaggaggcagtcccagtaggcaaggtaaaagctaatatttctctagcgcgtcgttgcgaatggccttgagcggcagcattcacccgcaaaaaccagccagtgagacccggcacgtccctcatgaagaaataatgcaaaaactgcgcgtgcggcagagctggtgaccaggaagtcctgaaaagagcgagcggcaaagagcgagcagcagagtacagatttgactggaatcactttcccccttgtgtgcctttcgtgaggccacgtggtgcgatggacagcctaagggtgctgcatagatgagaaatgatccgatcaaatgaacgaggacgcaagctaaggcacataagtcaggagttctagaggctgagcattcgcgagagagaattgagttcgagcacctttacgattgcgtctgcatgcatcaccaccgccgcacagaagcgtgcgcgtgttcgggctctcgtgaaggactgcagttttttcctcggagagagggtcgtttcagcatatttgatggaaattcaccggcgttgcgctactgtgtggggaaatcgggaaaagaacaagtttcttgaggacttgaagcggttttggcgggtggcaaacggctcgtcacgtctgccattcctgtcagctgtgctttgtgtagacacactgctgcacgtgcaggcaatccactttttttcttctgagccttctcgtttttccctactttttctcctagtcctccgctgtgctgacggcgcttttctttcctgtgcttcttcgacgtcagttggcgttgtcttttccgcaaacgcaggagactctgcagcgcctgtagcgtcgcgtttgtgtgtacaccccggtaatcctgttttttccacagttatttgcgtccatttgcaacctccggtcgggtttcccctcgtcttggtcatcgaagtaagccactttcttccatgctcgtgctttaggtgggccgtgacttttccttgctctttgcaaagtcgtctttctgcggttcccggggaaggagtggtgtctctgccgtgctgccatttgcgccgactctccccgtggcaattttgtcggctgtcctgcagtagtgtgccgttctctgtggataaagtggaagttgattggtatcccttttgtctcttcggcacgcttgccgcgaatttgcatcttacctgacacactggcagctctcgctgtgctcttccataagacgaagcaaaa

SEQ ID NO: 3254 - DNA, 3166 bp, Toxoplasma gondii
  source 1..3166: mol_type = genomic DNA
gaatcacgacgtgactgaacagctgagagcaacagcttattagacagggttttcttgccttagacatcgaaacgcagtcacgaggagtgctgatatatgagagcctcgttcgcttgtcagctggcatcccacaattcctaaacagctctttctggaacgcgtgctttgtcggctctcaaacttccgaatgagccctctgtttcttgtacaaccacgctggacacaggaaaggctctcgtttcgcagtcactccgttggcgttggttaccatcgatatgtatatatatatatatatatattgttgcgtgcaaaggcatacgcatacaatcatagatacgactaggctggaacaaagtcttttgtcttggcatatattttggatgaacctgtctatcatgtcaaaactaccggcggagtcacaaggggcggggggacgcagcgccgtgtgtcaaaaaaaagggagtgctgcttcagcggagttttgtacgtggcttctcttccgagatcaagtggttctggtcacagcgtgtggtacggactgtggatcggtttttcggagcgtaaggcagtttcaaccgaactaggctaccaaggatggttgctgtcgcaacgaagaatttcaagacaccgcgccttctttagtaactattaagtggtgtctcttctcacgaataagcatcctctgcaaggaaccgtgtggggtcatcttggagtcacccagaggacacagaaaagagaaactcagccgcctggaaacggatgaggttcctcttggatccaggtcaattgacttgcgtgtggatgccaatgggcgagcagagttctgtcccctggtgttgtgcagtcgccggcatccctactgagatagagaaagaagagagattatttcctcgtggcgacctagaaagagcgaaaccgctgtcgcctaaaccctggcgcggtttccggtaagtatgtactgttgcaaatataaaggcaccgtttgagacttcggaactttctgttgacctgctggttgttgaggagcgagaaacaggatcagcggaagtgaccgtgtggatctgcttactccgccggtgcacacagcctcccatcaacttctggatttctacggaaaagcgcgtgtactgatgatagaaatagatcagaggctctctttgatgatataacatatgcatgtatacatccgcaggcagttatatatatatatatatatatatatatatacatatttgtaaggtgtaggggtacttgtttgatattacagataccgcgaaggaataggagccacagtggtcttccgctgagacattttcccagtgcttgctgcggaggcaccaaacagcctatttaactgggctccctgacgtgagagcaccacagagtgaggtcagatatccgagagcttggtgggctctcgcttagtttcattcactcgtactacactttccatgtctactacgtgtgctacaacatttaggagggaagtggcatataagactggtgagaaacgaacacggcccccccaaaagtcagctgtgtgccgttcattgacagaggcagccttaaaaatcttctagtcgtcacactattaaatttcggtgtcattctctcgtattacaggcatctcagttcgctcgcagacgtctgaactcatctcaaagcatcgtagacagctgtgtgattcctggcccctcccagtgaccatgggggggaggagaaaacaaagctgcgtacaatgaccgaatttttgatgtagcaggggaacctaagtaacgtattggtggtattgctgtttcacacttttcgtggcaaaaagtaggaaaccgagagacataaaggcggtgatcttcacaaattcggactgaaattcttgagggtggatatagacgaaggaaccctgtgaaattcctttattccgtggacactttcgaacagttttggctgcctcagcacaacccttgatttcagccaagaactgcctgcctagcatccggcaaacctacgtcttggacacaaagaatgttgcttttactcacactgccagatcactttcgaagatcgtgtaccggttttgccacttttgagaagaggactgcttctcaggcggactcaagtgatggagactgtcagtgctgaaatcgttattagcgtcagttcaacgcagcagtttcatagaaccaccacagtacttgagacaccgagcgatcgaacagtagcttccacaacacaggcagaccaagagaccaaggggccgtcccacaaactgttgctgcgcctaagaggctgatacgtgtctctgcgaaattgcgtgcagtttgtgtgaccaaggccacccaaccatttgggctcatcgcagtacagcagagggcccgtaccatcgagcagtgctgttccttcgttcgcgtctctgttggggtcggtattatattgtacggttctgttccgatacaggtagtgctacacatttggcataccggtgtagtatcatatttttatgtgaaactccctgcgttttctcccttggctgcttgagtgtgcacgctcaaagcgtaacaagctgtcatctcacgttcgttgatagcatctcccgccagccaaatcgctcgaaaaacggcaaaaaagcgctggctacgcggaagcccagcgtgcgtattgtgttaactttccagtatgatcaagactgccaaaaccgtgttttttcgtcgtaaacttgtggtgaagacgaatttcagagaggcggactttatagatagctgattaatgcttcatggattgcctgtctattccgcgctcaaatagttacgttcgtcctatttggaaaattgatcccctttgatacagattccgtctcgacggcaataaccctcctttcgtttacaaacagaatatccgatggcacaagttcatattggtcatcttgaatgaaccacgggtttatagtgacccgcgaggcgttgacggggaaagtgctttttgtcgtggatgcaatttcctctcgaaacagttgatttgcccaacagactggctgctatgtttttccttgactttcgtgttgttgtcacgcatcatgaaacgtaggttgacgccctctcgacgaattcgagaaccctgtcatttcttttggaacgtggactgttcgtagggatgtgaccgaaagcaataa

SEQ ID NO: 3255 - DNA, 3009 bp, Toxoplasma gondii
  source 1..3009: mol_type = genomic DNA
tgctgaaaggtgtgaagacagcgtccgtgtttttgctgggtcacgttttcttctgtcacctccaggtaagacaacgtggaaggacccgcacaaaacttggtagtgtacgcaccatgcagatttctgcaaatagctcttgtccagtgaaacgtgtgctgtcgcagcttgtggctgtctgcagcaactcgagtgtcgagagcaggggcggacgggaaagagacaaggtggtagggaagcaacaagcgcatacgttagccccagcggtgttgagtcacatgtgtttcggacacgtttcaggaatcacagtgtttgaacccggtaaaaacggtttcagccactgtctgcgtgggcggcgtcgtcctttactacgtcgccacgtcacaagcacgacaattgccagcgaaaaactctggctgtaccaagtcttctctataattgtccacccaaatggcaagcacgttggctttaacatcagacgagcgcggctcgctggctgaggagtgttgattttgctggcgccgaaggcggcctaagaaacggtttttacctctggcaggttacctggttgtcttctgctgaagaggaattacttaaagactggcccaacaaaacagcttgcaacccaaagaaatatgcgaagtcgcagctgaactcttcaaccaacatggatagaagcactttcctgtcgtggcacgaacaacgcaaacgcatgtctttcctaagcactgtagttaacggcatctgatcaagtctgatgaaagggtgtggcgctcagaggcaggcgaacacgacggctcgcatttgaaaaggtatcttctgcgcaagcctgccatcgcaggattgagacagtttgaacaacatgtgtccgctcatgtgtgatgtttttttccgtctcatcacgtcacgagaatgaagcaaatgcggcatttggacaaactcccgctggctctcggtaggagagaacaccgtccacagcgggcgcacgtagcaggctatgtagtgtgtgtagcaccttttcagttccccttccgatagcctctactttgctccgattttgaggcttctgcgctggtcatggcaagtgcggtgccacagaggcgcctgtcttcgttgtagacaaaccggatataggagctggagattctccagcaatttgctttgcgtcgtgtaatgttgtattttgtgtcccttcggcaaataatcgactggttccaacgttacataagggaactgccgtgcatgattcgaagccgggatattttccgtctgtcgccatttacacgcgagaaaaggacattcgaggtttttctgaatcactcgctctacccgcaaaggcgttgtggcgttaatcgcgatttcgggtttctttgtcagagacctttctttgacgttcctgcgtaaggacacaaagatttgttttttctgggaaactgtttatccagtcgatcacctgccaatgatttgaaattgacgggcagcattatgtgtagtgcttgcgttctacatgctgatttcgaattttcaaattcaaccctctgcacgctgagacaggaccggagcccaggaaatcttgttgcacttttgaatgaacatttcgtatcaccaccaccccgatggactgtacagggcagctgaagtgttcggattcagtatgctgcttcagcttggcaaagcgcaaacacggcgatctgtcagtgaggtgtatgaggaaaggttcacgaacagttcctcctgtggcaatgcgagcatctccctttgaagaatcatttcagatcagagctcactggcaagaacacacgttcacctgaaaagcgaatcgtcaatattgtacatcatgtttaaaggccgacagtcgtcttttttggaagtttcggatcccaaatcagcgaaccatgaacacagtcaccaaggatggaatgctgtgtcgagttcctcgcaacatacacggttcatgtagaaagagcaccacgctgagactcgcagggattgtttgtgagcacggcgagcatttacattccctacttcgttttacccgtacatctgtgtgggtgctatatgagttcctccattgggtttcgaccggcttgtcactggcagccgcttagcacgagaaaaaaagttaattcctacctgcgaagtcaaagatacgcaggttttttagtggggatgcgtttgtctagtccttctgcctacagtaaccgctaagacagtccgggtcggaacgaggaccttcactgcgtagacggggtgcaagttcgattgtgtctgcgagggtaatgctttagaaggagttcccacatacgatcgacggatagttttgcctttcacgccagatgcgacgctcccatccaacttgcggtacatgctagtgcgcccagaacgcgtgctgcctgtaactgggcacccgcgatgcacggcgctgaatttgcatttggaaacgccggcaacagcgagacttccctcttcaggtcgtctcttcctcatcccacaaaccagacacaagcgcctgactccttcctctccatttttttgtagcagtccacaagccgcgtctcttccccaacccttctggctcgcggtcgtaacagagtcactccttctgggccacttcgcaagtgtctccctgggtggccggctttgccgcccacctataagtccttctgctcgcgcttctgctctttgcgcaggaaatcaagcagaagaaagatcgccacgtcgtctgagtgtttagcttcgcgtcacaaagccgcctttcccgtccttactttttcgttggcgtcgtcctgctcctttcggtcacgtcacttccttgtctgtcacgtcgtctgcccgcgggggtgtcgccagcggcattcgtcgtacgcactcgttgtgagccaaatcgaaagccgtttttcttgggagtcttctttcgttttcgtagactcttttcgaggactgaagaggtcccctattttttcagcagttctagggacgcagcagccaacggcaaatacgccttcgccacaa

SEQ ID NO: 3256 - DNA, 2924 bp, Toxoplasma gondii
  source 1..2924: mol_type = genomic DNA
atttggttagtgaagaagggcaccggagtcccgattgaattcagtggcagcagaacggttgaggggctgcagaagtttgtttcggattacgcgagtgtgagcgggttgtttgatgttactcgggatgaactgtaaattgtttttaggatctggtcaagcagtcacggcgaagtatatgctattattttataggagcataagtggtgtttcccagaaggcatgcattatgtgtgggattgctgttgtcccctctttttgtacgttatatactgcgcgtgcggttcaaaagcatcgtttgttaagattctggttggtactaatcgcgtgtctttgcggggtcacatttatgtggtaacggcgtcagaatgattcagtcacctttcaaaagcaagaacttcagttgagccacagcggccggcactatgatgtggattgaagtttcatcatatcgatgtagctcgcgaggctgacgacggtatcaagaaattttagttgtctataaacattatcaatatttgggtatcctaccacggaatgcggtgtctgtggcaggaacttggatatatactaaggcatggcgcccagttcaagattgctacctaactcttccatggatagaaactggctcgctgccagaatgcttcatttttcgataactcacttaagattggccagcctcgcgcgagtgagtacatgtatccaaaactgtatcagtcgtcctccgttggcttccacatcggtggccagtagcataacttccacgttgtcactgatgcgaaaagctgccgcagtcgttcacagagctattgatagcgtcaagccacaaacttaaaagcaaatccacccgttgattcgaagcctcccgttgccaggcagcgtcttcttaccagtgctcgcaaatgataaaaacgaggtgcttctagatttgttcaactgtaactgacgggaagcaacacgcgaagcagaagcttcccaacacgtccgggtttcctctccttaagatattctctgttgtgtggtggcagttcactgcctcggaagtggcaggagcgagcctctctgtccagaaaacgaggcatgctgtaggttataatttagtagcttgtgcagccccgttcacagtatcgagagtggacatgaatgtggaaagcgtgacacaaacaacgaagttgccgtgagccggcggcaacagaaagaagtgttttgcccgtgcatcagctagttctatgaaggctagcgcaatttcgggtactaccattcccccctcgctggtatccaaacgggagggcctgaggttcaaacccaccagtttgttattggatggcttggttcaaaccaccatccttcctggcctttttccgcactgttcagttgcacaccacggaagtactcgtccagcaacagacagacagctaccgggtgcaccgggtgtctaaatcggcggtgtgccggcagcaaaaaccgtgaattagagaccgactccgtacccgaccggcccgtagttcgatgaccaagcttccgtccgcttgttcccagagcaaagaaaaactgtgagggtaagggggggcaagatggggttcccgtgcagcgtcgctccgcgcgcacgcttccccaggtttggggagctcggcaagagaaaagtggtaactggaactgcggctgaggggcgacttctgttgaactgctttccacagccgtgcacaggaggggaaacagtgcaggtgttcgaattatttactgtttcatccggcggccagattgccagctttcttcggctgagggggggacgagtccgagtacagtggtggaccggccgcccctcagaatctaccatcgaaggtgtgacggcatgtgctcttcaaaaaaagagtttttcttcccgtactcccacccagaagcgcttacgcactcttgccgcatccgcggaaaaattgctggctcttttttcgggttgttgtgcgttctgggttcctaaagccgtgctcactcatcaaagcgcgtccacgcacagacccgcgccacgtctgtcggtttttgaagcccaccacaaagaaagcgcagtgtgtttgtatagttttgagatagtgttgccccccaaaaagaggacaaatcgttcaacagagaagagcgaaggcgttcttccttcgaagacacgcgtccacccgcaacagaggtatcaaccgtcccgagcaaactgttgcgactgtgccttgaatgcaagtaagcgttttgcgtgattcggaaatgctcggtgccatatacctcctagagaggacgggcagtcacggagctgtaaagcctccaccctgcattccacggacagagcgttgcggcctgtctctgttcctggttgagtgtgtctaccggtcgtcgcggaacggccctcctgggttgttcccgtgttttttgaagttggtaatgccccgctgcgtttcatgcgtcgaagtgaaatacagtcggagaccaaaccatctcgatggaaatcgaataacgcagcaagctgctgtcggcgtccccaagccgttgctctgtggccgccgttttcaaccctcgattttcaactctaggttgtatcattcctcgacgaacccccgtgttcgtccaacaagttcttcaacattcgtgaaatcaactgcggaacgtgcgcggatttttcgtctccatcccccaccaacgagaccccttgtatctcctcgtattggacccgcgtctaggttccgggaagtcgttgcattcccctttcggcctgggtttcaagcaaagttaactcgactgagcccgcatctagcggactgagccttggacagttgcgcatttgcgtctgctcctttgtacattttacctgcactctgcctctggtccgcatctcgaaacgcaagttcctgccaaccccctccctttcgctttctgcccgtcgcatgcga

SEQ ID NO: 3257 - DNA, 1503 bp, Toxoplasma gondii
  source 1..1503: mol_type = genomic DNA
agtgtgagcggagcactagggatgtctgttttctaagcgtcttttgctgcgtgagcatccatgggtccggtacgccttcttctttttctccatgggctggtatggaagcttgatcagagcatcgacagaaatccgatttcgtgtttttgctacactttctcttctcactatcctgttcgagttcattggttggagtacgtggcatgcaactctgagtacctgagtggttgtccccaatgccactattgtggtccaggagaaaagcttggttgcagtgtgccctgctattgatgaggactagcggggaaagtctgtactcagtgctggcgccgccctggccagaacctcaatgcagaacccctagatccacaggtagacttttccttcagaaaagaagctgaccattctaaaacgctgcgtttcgacggcctgttactgtggcacagctttctgctctttgctagtaatgtaacttgtaagccattagacaaccagcgggcgagctggtgtcggggatcggcgagacttcactgccacacagtccacctatgcacgatctggcagcaatggaattaatcaccgactggatgtgactccttgtgcgtatccagaggaatgctctggtgacagtcgactgtgtgcaacaacgtgtgctgcatttagtgtttcacttttcacgctctctagaaaagcgggcaacctagactagtgcggtaccggcataacgtagggaacgaaacatctccactttcatagtcgcatacatgcagtggcatacgagatgcatcagttttgctaccacacgtttcgtgcgacggtcgtgctgcaaacgtggttccagcgaaaatgctcagagtgaggcactgctcggtctgtaactacttgcaaagagcatctgtatgatgcgttgtatgacgaagagtctgttttcgatagtttcacatgctctcggaactgttggtgtattgcttcacgtccgctatactccgtacaaagctgccaatcgacgaaaagaagtcccgagacagcgcatgcagcgacgggcaagtctcctcaacaaggtgcttgctttccacataaacttcgcctgtgcaagggcctgtagatacctttggtttgaggttttggacgtgtgtcgatttcgctgcacatgtcgacgttagatttctttcgatcttcaaacaaacggagagagtctcgcatgtgtagctgtcttgtttggcacacaccaagaaagcggcatcgactgttcgagccgacagtttttcttgcacagtcttttcccggagcggatcctgactgaattcttcatctacaaacactcgttggcaccgtttgttgtcgcgtgtctcagacgcaagaggcgcagacaaatgacaccaacgcatgcaggctttgttggagtgtcggcgcatggagtcaacttttggtcttgagctcggcaagagtcgtcttttttcacaatcctgacccccgctgctgtgctcagatcttttcgatcga

SEQ ID NO: 3258 - DNA, 4218 bp, Toxoplasma gondii
  source 1..4218: mol_type = genomic DNA
ccgcaactctcaactagaactaacgtacatttctgtacatgcgcacatgcatgtatatatatatatatatatatatatatgcatgcacgtactgtctcttgcatgtttaatgcatggagaggaaaggggacgcgggcgaggcgacggggatgattgcgcaactgtcttgcgtcgttgtttgtctgctttctacaatcactttaaaagagatgttgtattgtgcacgcggtgtgtggcaacttttcggttcttccactcgcatgaacgaaaatcccttcgtgaggtttgcctgcgtttggcgttggttttcttgcgctggctgccgtagggaaattacaacgtctgtgcatcgggtaaactgagaggctcttgtgtgtcatcagaaagggggtcaaatggcgacagcttatcgccgatcatggcatgagctaggcacagtcaagcgttgaatgaggatagtgaaggcaggggaaacaaaggaagcgagaaggtagacaggaaatattaaggggaagatgaaaggtgatcgttttctgtttccgcactcgcagacctgtttgttgctgcattttccttttttcggatattctcttaccatcgacggatacttcttggatgacagaaccgtaacgtagcatccgtcaagcaactctaattcacttgcgtgtagtacgtatgaacgaagttatctacatgaatcactgacaagcatgtacacttaccgtacaccgcctgcgcctcggattcagggataattgcgggacaagaaatggccatcgtgaattcttgactgctaaaaccgatgcaggagtgaaaccgcctcgtgtcattcacctcaaaagtacgtgcattgtgagccgcactgcttctcccgcattcagtgactacactcataggataacgcgatgccacgaaaacgttcctttctcgggattgacaccacgctcttttctaaggttcctgttctactgtcctctgtgtgcgtctacgggtgcgctgggcctcaccgatccacagcttgtcgctccaaaagaacatcgcataagcattcttcactcctgtcccttacaaagccgaaaagcgggcctgagtatctctgaaacgtccgataatttttggtaagataaacctttttgttacgtggaaatctgcactaggatattcgtcagacttctgcagctaatcgtcaattcagccacaactgcaccttcctgttccctctacaagtgtcgggccgttcccaagatgcagtagagtgcgcagaagccagcgagcgcactgccagttcgtttgtcttgtgtcagttgacgcagactcgcaaatgccatacaaaacacatcagagggcaccaagctcgcagttactctcgtgaaaataaatcgtacaaaagagttccctggggaggaacaaagtatcaacgggcttccgtctgctgtactcaatcgcgggagaaacgaaaactgtcctagttttgagaacagagcttcgcttcccgttttcgactacctgtcaggtagacacagccagaaaggactgtcgtgtgggtaaaacgaggcgcctccgcgatgcttctctgggggcgcgggaaaaaagcaagaaacgtaccgtgttgaaacgcttctacgcagctaatcctgccgtacaccggaaaatccgcgggggggggtctctactgaatgagagaggaggccaagacaaaaacgccaacggcaacaccagagacaaccgagggtctgaaccctgcactgtctacttctgcgtctttgccgacagcaattttgaaggtgcaagtcttttgtggtgtcgttgttttctcattttctagttgtacacacttgaggcaaatttgctgggtggcttctggcatcgacgtcaccttaaggacatagtccttcttttcgtcggggttctgagcaggcggtgtttgttcttgcggtttaacctccagagtcgcgtctttgagcactgtattcagttcaactttttctgtgcagtcagcaccagtgaacacatttccccgggcgagggtggggtccgcggtgggggtctctgtgccgcaatgcaaggtgagggtgccgggctctgtaactgcaatctttttctcgccctctccgttgcaagtgagatcctctgtagcgcacatcataagcatggacgcttccgccttgtaatgaagatacgacaaacgaacggcagagacacacatacagggacgcccacctgacaatgcacacgcactaccctgtgttgggggagactcgagttgccaaaatcttcggttgttgcacggaacggccacccaaacataccacctcacttttcctgaaacagaactgaatgcctgacctcgcgacacgctgcctgagacccaggtcatatcagctagatagacgcccgacgggctacagcatcggaagacagcagcccgaaaacaacggagctatcgatattcacacaacaacggaggctgcaagtagatctcgaactgctcttctctagtacatgcacatttacacaccgtgaaggattcacgtcttgtttgctgcattcagcctactttcagcgcgaggaacatatttttaaagacgctctcgatcacacgacgtcaccactcattcagaacacgttggtacgatgcagtggatctgtttctttcttgactagcgtttgtgtccaacctctctcgaaagctatgatagaaacacttgccttccacggcgcggccgactgtgcgtcccgcgatcgagatgacgacggggcagtcttgcttgtttgccgctctgcctgagcacgagaagcagacattctgcgccgtcgcggggagtgcaggcacgaagaacgcaaccgtcgtttcggatatgccttcgcctttgatgaccgtcaggtaagaacccgggactttgtcactcaacgcctcaggggcttgtgacgacaagcaggtcgttccgtcggcggaagccgcgtagaaccgaccctgctgcactgcacgggtcgggtcaagcggagaaccgtcagggcaagtgaaaaaaacttgctggccagcccgagtcactgaaagcgccacgcgtgtgtggttttcgacactgaggtctgcgccaggctctgccagcacgcatgtattgctcgtcgctggagttcccgagacacgtgcggcgatgcaaacagcggcgagggcggcgaggactccacgcttcatgaacgctctcgcccaagagtgaaccatcgtgtccacagtggttagtaacttggcaagggaagaaagaggctttcgctacggagacaaactcacaatgttctgcagctgcagacacaagtggaacgagctgaggccaaaattgcacacactgcgagtcccgggcgtagtactatcggaccagagcggtacagcttcgcccatcccgaaaagtatgccgtacttcgtttctacgtcgcaaaaggcttcaataattcaaaagaatagacaagaatcgctcgaagtctaacacgccatggggacactggacctcgttcctcgttctgtcttgtcggccgccgcctcgattgtctttagactgtcgcgttccgagctgcgcacctgacgaccggctcttaagagagactcgttgaaacggattgcaacgacgtcggcttatattcggcgacgaaactttttcgaaaaatctgcagacgagtaagtatctgtgcacaccgctggccagctaatgtgaggcaaccacaatcgtaaagcgtcaagaaacagcagttgctgcgattgctttcttttccgctctttgagcgtggctgggagaaccgcgagaagtcgagcatctttacctaacgaaagggttgctaaaagaggacgaaaacagagcggttgctcaggacctgaaacggctattaacttgttccttcgtctattctcgttcactatttctgttcccgaaaatcctctccggcccccagctgtgtttgcgtagacggcgaccgtgccagcaagcaacggctccgccaaggtgtatttccctctctctgtcctaggaaacgccttatcctcttttctgactgcttttcgtccccgaaagacaatcgctgctggccaagcgtcgcctgcgacacacggcgactgggatacttgttcatctgtcgtcagccctggttctgaacgcgtcgtctgctctacaagttggcgtttgccttccccccgttttctcacccgtttctctctcccagaaaacaaga

SEQ ID NO: 3259 - DNA, 2025 bp, Toxoplasma gondii
  source 1..2025: mol_type = genomic DNA
acgtgaaaagagaccactaaagtgaagagcatgataatcgtgccgcttgtatgccaatgcgggtgccgaatatatgctagacacaactatacttaatgggaggcctctgctttcctcgagtctgctctaccatgaggacaaacgagtttcagaggtctaagtatgcgtacaacctccaatcttttcagcgatcaagtaaacatgagacaattctcaccacttctggggttgcgacttgatacgcaatggcctcctttttgatatcccaaaaggccaccagagctttttgttgctgagcagcagcgatgtatcgtggaacagaaccaataccagcaaccgcggcaccaatgaaagtaggtcttcctgtttggatcccgctttgtactcccgctccctcgccggccccagtaagcctctgttgtatgacaccgcggatgctatcgacgacttgcagggactgtggctggatcaacagcaaacggtcgtacgtgggaagctggcagtggtcgccgcgttcttctgtataccggatatccatgttgccggaacatctcacgtcttcgcgtatcgcggccaccagacgggttatctagcccctctcggagctggtcatcgactcaggtacttcaagtgtattgttgagttggagagagcagcagcccaatccacaaacgctatttgcacattcagagtagcttttcagggtcgaccatgccctcaaacagcacggaggcgtcgcgtacgccgttcggcatcgacccactggtaacagggggcgtcaccacgtgaaacaaagaaaaaaggcaggacaatagacgaagtggagcctcaactgaggtcatccgcttccttttaccttcatttcgaacgccaggaaacagagcttcaacctactagagtctacgcgtcggcatggatcagtgtccgtgtgggcgcgccccggaatggacgaatctcaatcagtaatgcaagggggacgccatttttaaaaagcccagcaatggcgccgttaccaggagatctagcaacttccttcggctctggacgcagagctttaatttgtgagcatattgttggacttcacatctgtcaccctgcatatggtattgtgtgcccgcttccaaccaaacactgcatgctccagcgagcactgtaccactgtgtcctgctgtttggatacagttgcttcttactacgattttctctatcgttctccattatctatcatgttttgttcccaacatttcgttgtcctcaatcgtgactgccatgacacagtcatagtagggttctgttttaccttcatccagaccgtgttgctgtcgcgcacgcggcgcgtgcggcttctgctctgtgagtgccggctacgctggaactgtttgaagctcggttgcttcgtgtagggcgtgtagaatgtgtccaccaggaagctacatttgcgattgaaacaaaggagagaagtctgcatgtcatctactgtgtagccttctggtatggcacgtccgtcttagcgggtggatacgtgtttccacctttccacctggatcccaaatagatggtgcggtaatttcgcccccgggagatacgatggaagcagccgtaatggctgcgctgcaacagcgcccttccctacatgcggtgatcggcacgccgcggcctccttttactggtggtggccgcgcgctcttcttccacgccctgtcaacagtgggttagcagctccccagctcggccaccaagctcggctcacgaaacgcgccctgcatcggaccctcggtacgcgtgacggttttaaggcaggggatgcgcacgcttgcgctggatgctgctcctggccagcgcgtgctgatcgcgggagtggtggtgatgcggcagcgacagtgtgtgtgcctcggtgtgagaaaggtgggtagcccgttgtgtgagccgttacttgcattattttctttcctcccaggtcatcggctacatcttatagaattctttttcgcttctttcgcggcttgtttccattcttttccaaga

SEQ ID NO: 3260 - DNA, 2479 bp, Toxoplasma gondii
  source 1..2479: mol_type = genomic DNA
tctgacccacgtacaaagtgcggctttcattcagaggaagaccttttccctcagtctgctgaaccccgtgcacggcgtggcgtcgcgggtttcaacctgaggcgtcgccgcctgcaacctgtcacctaccggcgtagtccatgtacacctggccgctgaatctctcgagttctctctccttgattgcctcgatttcgaggttgtaggcgtcgccgtagcgctgcagaaaccgcgagcgtcgctcatcgtagctctcgccccagagaggacacgagggtcggtgtttttgcgcctctgcagctgcagccatcccggcggccctttcccgcgtggaagcctctgcgagcgggtctccttcggcgtgacttgcctcagacgaagcgaacagctgcgtcgccgcataagctgtcgagtagcgatctgaagacgcttcgcggccagctgtgccagaagctctccgagtgcactgagagggggaagacgagtccacgggttgtgtctgagtggcttggaggcctgtgccgccgtatttttctggacccacgttgctttccccggttctctcttctgtctcgctgcatccttcagtgtgtctccgcgccgccgccgcttcagctaaggcctgactgtctgtcgggacgaccaacgggatctcccctgactggtttgcgtcaccggacagctcgcgcgcaagagcagcgtctggtgagttgatctggggtacgggagagtgttcagtcgaaggcgtagtcgccggctccgagctcggtgcagaagcgcatgcgcatccttcggaactttcggcgacccttccaacttgcccgctgactgtcggcggtgcctcagccgtggctgcggttgcaagacacgaggcaaacagaagggagcagaaacgaagtgtgagtctatacgagacgcagtgatgcccgcgtgcctgcatggtcgaacgccggccagaagagtcgctctcttccatagtccagaatcgctgtgaatagagatgtgcagagggtgcaccgcgacgcttaggttaccgcagagacgctctgcgtgtacagggggcatgggcaagccacacggaaaaaaggctgttcaagcaacgacgtgcgctaaagcaaaaacagtttcgcggagaaaatgaacgggcagtctccgctgagagtgaagggtgtcaacagtcgggacacactgtaaggagggtccggtcgttgcctaaacaactcctccgtttcttggccgatggccagcgctcatgccacgatccagcagtagcacgctggattttccggcaatttgaatgcgaaaatctgaggaaagcaaatatatgggaaaaaagaaagcgagaacttcaaagaccgctctacgcgtccggaacggagctggacaggcaaacgctggcgtccacgttttcaagctccacagttgcacagcagtcccgtagtaagcgcaatatggacttgtggaggaggaaaaacacatgcgtgcctccaaaatgccgcgcttgagagctctcgtgatttaacaaagtggaagtgttgaagtgacaagtcagtcaacgaagcacagagtctgtcgacccgttctagggacaagaccacaaggcagtcgcatgcgcgaggacgcagatgcggcaggacattcgatcccgaaattcaagggctgagttgcggttgctgcgaaaacctgtacactacagcattcatcatggagctcttttcgttctgcgaaaagccaagaaactcttccgttgagaaacagagagaatcagaggtccaaaaaagggaggcatctgggatcgtgtcttggcgagtgccatgcaggctatacaaccatgcaggatccggggaaagtagcaagcgctcatggtaagccaagcacgtgatcctggtactaatttcggtgcccacgttgacgtaggcttgcatttcccaacctccaatgtgcttcacacctgtcagttttcctagctatcgctctggagctcactcaacgaatctggcaccaaattgacagcgcagacattccgttcctcatgttcaaacgacggacacttgagtccgcgacagcatacatgactagtttggagagtcatcgcttctggtcacatgcttctaatgaatagttttccgtgtgcaggctgagattctgtctgctgactctgcctgcacagtagcggaagctggtgaatctcagtggggaaccccgatttgcttgtggagggtcggcgcggagctgtggtcaaacgataactgacagcacggctcatcttggtgactagtcttcgtgttgttggggagagttcttcatttttggctgatattctgtatttggttcggaggcagctctgttgcgctaggggtagaacgcagggcagtccgggcaggtcaagttcttaccgccttgctctgtcgcgtagccgctatctgtactgtacacagcctgcggacctaacgggtaaacgctgttctcctcttagcaa

SEQ ID NO: 3261 - DNA, 2016 bp, Toxoplasma gondii
  source 1..2016: mol_type = genomic DNA
tccttgagttcggagagccaaacttcttgactccagatgtctgcatttgcactgcccctacagagtaggcactgggatccgagaaagtccaagcaagaatttctcatgtcagatatcgtttctttgtcgacgctcgccacccgtgggtgtatgcgaagaggcgatccagaattaaaaaaagcttccggttttgcatgcatgaaacagggatctatgattcaaagtgtgaggagcgagcccgatacattgaactatggcctggtattatcccctgacacacgcaaaacttactggacgcccttgacagctctaaagtcaatacatatatatacatgtatatatatatatatatacggataaacatataatgtatatatatatctatatatataggagtgccgactctctgcagagaagttccacgggttcaagactgtcttagacaggagagagaagtgcgaaatcccgtgcatgtagaaaaccagctgaaagcattgctggattaactgaagtgaggagaggcagttcaatcgaggagacgtttcgcggcatcgagaaggtgatttcagaagctgcaataaaggagaacccggtcagcgggactttttgaggatgcagcaacgcgcagatccgtactaccgtggaccaagagaaggggaatacaatttcctccaagtagattccgtaagcgcgaatgtacacctgtatgcatgaatggagcagagaaatgttgtatgaaacaaatgtcgaaaatcatcatccgttcttttgccatgaaatcaaccgaaggcacgtcggattcagcgaaccagaactggagagagtcctttggaagatccagacatttcaccactctgaataaaaacaccgggaaatcgggaggtctctcatgcccttcgtggcgcactttccacgacttacaagacagaggaaactgccatccgaaagaagaaaaagtttcggggacttccggcgttcgagcgcccgtgtcacacccgagtgtgctgtcccttcgccttcctttatggagtctatactgcaagcagagagtccccaacgaagccgacgaaagacatgtggtgaacagaacagagaaatttacacttctcgacagaaacagaggcaagaaaaaactttccaactgtccagccaacggacccgagcacccaccatggcggtcaaaccgctcgagtctctctgtcctttctcgcggttctcaaagtgtcaaggcgattgtccttctctcgttctctttcattcaccagcatatttggagaggaaacaaggaggacagtaaaataaagttgagaacctattctcacgctttcagctaacataaaatgtcggtgagtctccttggtttcgatgaacgagaaaagatgcacgcgtccattattgacaagacatgcacgctatcacggtccttggtgaagaaagacggccgctgtagatttaaagtttttccttccttcgttatttctctccttcagcgacgttcatggagccgaggagctggtctctactgtcgagacacctcggaacgctgtcgctgcaggggtctgcgtcgtcctgtctcgttttttctccggtacaatgtaggaaattgcagctcttttgttcgccaaatggaaggatgcttcggctgaagaagaaagactgtttttcgtgtgtctgttactcattgtcgccattgagtgacgctcttcttccccattcttttctgttttcatcgtggagtcacacaccgcagcgggtgccggatttgctgtgtctcctccgacttcttctgcgcctttgtctctctctttccccgtcctttcctcttctgaagccttttcagcttttgcggttttccacatatgcgcaaaggccatctttttcgctgtcagccgcgataccacgcgtcagaggtctctctactccgcgcctcattcttgttgacgtttcgtcctttccttctgccagtttcttcttcatcaacgtttccgtctaaacctccgtgaagttcaaaagcga

SEQ ID NO: 3262 - DNA, 2478 bp, Toxoplasma gondii
  source 1..2478: mol_type = genomic DNA
ggacaagaaattggcgtacctcctcgcataaacatctgcaagaaagggtccgcagtcgggttcggaagagggggcgccgaggcagcagcgctggtgttggtgcttgatgtccgagcagctgtacagaacacacaagggagatgctcgaaagcgaatttgccgctttattccattctgcaagaccaaccgcaaatgctaaaggcagctactcttaacattggatccaatcaagacagatgaggccggagaagcactcggcgtgtcgttcgtaccagacgaatcggaactgggttgcgaggcagaagaggatccgccagctggcgcattgttggatgaagccgcaactgcggctgcgctcttcaccaagtgaatgatgtgtccgtcttggacatcatgtgtagaaattaagtcggcgtccttaaggatccgtcctaacagtccacaaacgcacggaaaaaacagttcgagtcctggtcgtggtcagcacgccttaggcggaatacttcgtcgagcaatctccgaagccatttcacaatcagacgtgtccaaaataccgtcttcgatatcatttacggaaccctgtgcacacccctccctgtgcgggtctgaacctgccacctcggacccttgttctgggctattccaaaacagccgggtgttatgtgttcccttcgcacatgtgggagagttgagtgcatctcgtacggtttgtaatgcttaggaaatagtatatcgcaaatgtgaccatttctggcttatcctgcccgaaaaacactacgtagcgtaacggaacaacaccctctgctgctgactgaagcatagcttgttggcggatccggaacgacagtaggtatgtcatgactgagtcgtgggaagcattgcgaactcggttttctcaagtcaagcacagttctctaacctttgtagatgagacgttgagcctggaccggaatttcagtttgagtagcgcatttctccttgacctgcttgacagtccactcaggttccagttcgagaacaaactggctccccccggagaccttgaacgtcacttttgcgggcggcataatggaaaaaggacgaacgaaacgtctttcgtagtgatgggcagactacgggttaacagtgaccggattcagtcggggttcctcagagtcggccgcagaaaaccgtggaggcaagcactgaaggagtcccctattgtcaccggaaaaatgtggtgcggataacacagcaagttcttaaagaggtttgtttctggacaaatgccacagttgatttcaggcaaactgccccccgcaaaaccgcaggcaaaagcagtacgcaacagcgtccttcagaaccaccccaacttgggttccgggagtggagaaactcgctcaatttctaggactctgtggcagcgttttaagacaagaacatattctgcccacgcacgagtagatggctgagaaaagcatgtgtcaattcgaaacgaaacgcaattggcatcagtggactacgagaaaaaaaatcgcacggcgcctccaccgttttccgcaacttgttcggtctgggcgtagttccgcagctcacagttcgttgcggtctttcccaaactcccagacaggactctagagggaggacttgataaggttcccgcgcaaggacaacacagaggtcgacggttactcgtgattcacgcagaaactttgctgaaacagaatcttagctattatgtgcgtcggctgcccaacccaaagtcaacaaggtgcagggggaagaaacggggggggggagagcagctgatgccacgttgtttcacgtcttctggaccctcgaatataggtcccagtccgtctgtctcataagcgacgttagtttcggaggctgaaatgtcacgaaatgttgcccggaaaccttcctccattcagtgtatcttcggctttttgcggctgcgtcgtttttcgacttccgacaccgccagcacacttcactgtgagtgtccctgacacacgcttgtgcacgctggcggagactgggtggagattccatagactgtcacgaaatcgaggaggcttaatggaagacccgcctgtggtccgcgaaccttttgtagggagtctggtcagccaaaagagtgattgtctcactttggcaagcaccacccgagtcttcaaaaagtgccgtcgagccattagcactgattgccgggcacacgggagacagcggaaatacccgggcacaaaaagtgtctcgattcctggtggctaggcgtacgaacctctggtagacgacccgatggtaactgggtcagaaaaagtcaaaagaccgattcagcgtgtcactgtgtggcgtcctgaagggaagtagagcgctggccgtctggggtgtctctgtgtcctattcggggtatcgcctcgctgctgctgggacattaaagatttttggatttttttcgggagtcctcactctttgccgctacttttcctggcacca

SEQ ID NO: 3263 - DNA, 2277 bp, Toxoplasma gondii
  source 1..2277: mol_type = genomic DNA
ggggatttagtttagccacctgcaagtgaaaaatggtcatgtttgcggcatgcaggcgtgcggtgtgtgctttttcccccgggtgacaagacgagggcagaagcttttgttgagagccccaatgaacatcgacaggcagttttttttttctcagccgtgcgttgtgcaggggccattcgaacctgttcagatgccggttgtacctcgacacgcatgcgcttcgtttaaggcacatgcatttgtccacctttacacttggacgtttttctgtctaggtaaaaacggtgggaagcgtcaacggcacttgtttttctctttttttcaactggtctcacgttgttgggtcctttatacgtggaatggctctcggagtctcgtatttgcgatcctcacggctcacgcaacagagcgtcggctgcacgaagatcgtcggagctctcgcgctctcggatgagtctgcccacacacccgccagcgaaaaggaggagaaaccgcactgcgtctagtaactacaaaggtgctaaacacagctctcatcgcgcaacaaaaggacaactgtcacgaatcggcctgtgcaaaacagtaaacccaaccacttctcttctcggaggcatacttcatgaataggagatcccgacgactgccaacgcttaaaaactcgatgtgtgcccatcttcagccgcaaagtgtcctgcacagcgtatccgtttggatttaccgttaaagagtacccagtctgcatccacatgtgtgtatcgcaattatgtcgatatctgtaaatatagtcaaatggatttgtatgtgtatttgtgtatgtattgagtggccactgcgtgacgacagtgggtttcgctattttacttgttagcatgatggagactcaacacaaacaagttgtgaagcagattcccgagtgacaaattctgttgttttgaggcgtaccttcattgagacaaaacagcaacgcagatctttgatagcgaacaaccttgtggcgcaagttcgtgcctacataaataatcctttctctcctctctctctttatatatatatatatatatatgcttccctacgtagatgcactttttagatcacgtccacgtctaactacgtacgtctatgtcatcccctaggcaccatatgagggtccatgtgttgtcctggtggtgaagcgggcaacagctttcatgtaggtgttgttcggcatatgaaacaatgtaaatttgctcccaaccttttacaagaccatatgcagacttaactagttgagtagacatgtaaagattgatttatatgaagatggccgtctccccatcactgggagggttgtgagccagtctgaagcgagcattgagatgaccagtttctcaaggcccttcacggttcaaggcctcgaggatcacgggaagtggggagagaaagttgaattttctcctcgaaagattcgtctccaactttaatacgaatcccttcccttctataccagagtgcgtaaccgaaatgtggctagaaaacgaggagagccaacgctgagacaggcgctcgtggaattaatcaccggctgaggtgcctttgtttttccgggctccatggcgctcgcatgcagttttagcgtcgcgcgtttttcgcgcgttcttgctttttcattgaggacatccggcgacttctctgcgcccttgtctctctgttctcgccggtgttcacattgtcaagcaagaagtctaatgccactctgaacctatcttcgtttttgttttctcttcttcttgaagttcccctcttggttgtcgctctcttccccgcccctcatcttcgcgtcgctccttgacaacgagtggtgtgttctgcggcgcagaaaccggaactttattgtttttgagtcaagcgttaatcgggacgccaatttgacttttcttatttcttaccgggttgaaatctgccttccccgtcatctgcttgccgaaaatcagcaaaggagtcagctgtctgcccacaagggccgcgacttttccgtttttccagataattgacctcggccgtttttctgcagttgaaggaggagaacccaattcctttaaaccgcaacgccgactctcgccttcccggcagcaaaagtctgtttcgccgctgtttctcggcgaagtcggtttgtcgaggacagagacgccattttctctttcttttgcgtatccctccagtgtgcttctcacgcgcgaccgaagacccatctttcttcgcgactctctccacagcattcttcgaggagaacgaatctta

SEQ ID NO: 3264 - DNA, 2956 bp, Toxoplasma gondii
  source 1..2956: mol_type = genomic DNA
cgtcacatgcatatagagggtgactcttgtgcacgcttcgaggaagcacgccggtggcttacatcaagaacgaattcaactgtatccagacagtcccagagacggtcttcccgagttcgcaactcttccagtttgctcgagggcgtcactttctctcctttctgcagaaacttctgacacatgccgacaatgtagttcgtcacctgaaggaaaaacgccagcgagcacatacatgcgtttctacacacaactgtctacacttctgcatccacacagattcacttgcctgcacacccatgcatacagacgcttgcatatatatatatatatacatgtacatatatatacagctacttggaaatttagaatggaatgcacgcatcggtaggcacaggtgtttcatagcttctaatctgcagggtttcccagttaatccataacagagggagacatatctcggctccaaagcatgcaagcatttcgtccataaacatatatgtacataaatacatgtatcacgtatacgtagggggtacacttgcatttgtacgttgattaacagtttttcccagacagcagattgcccttcctcgaccacgacgagctcaccgcattgatgtcagtgtcaacaactggactttcttgtttggtcgtttcgttagctgccgaggaaggcagttcctttccactatctccctgtgggggagttgcggcggttgttgagagaaggcgacagagtgggaagcggagaccaatcgtagcctccacgcattcagacgcacgcaaacctgaaagcactcggtcagcagcgagcacctttctctctgaagccaacccgcgggcagaaaaaaagaattttcccgttttctcgacctgagatgtcgactgtgagtggcgtggcgaccacaccccctgggcggttccctttgctgggatggaggataagcgcgctgtagacagcatgcatctgcctttctcgatcaacggcaaaaatgcagactgagacggaaccctgcgaatgagctgctccatcttcacagtgcaggctgaagagagggtgaacaacataaaagaagggtggacggaacgaaaaacggaagcacggaacccggaacgacgcagcgaaccgggtcccgggatggcagggacgaagcggaaaacggcttcctagccgcagagcagagaacgcaagacagagaagcaggaaggattcactgtggagaaggaggaaaaggacgcaggcaacaactcaagaacagatgtggccgacagcaataggcatcttgggaacgaaaaagagttcttcctgcgattaatcgtcgtcgcagtctccctcagcgaatcgctgagtcggtatgcgaagagagaaaaaatttctttgaagaaaagaaaaaaaaccagatgcgacccagggtcgagcgctgcaaaaaagttgactccggcgactcagcggctaaagaaagttcgcgtcgatcccgggggcccctgttgcctcttccggttgttcgcagttgacaaggttgaatgggacgttgctggcaagaaagggaatctttgcagaactcaaacgggtacacgagcgtggtatttcgagatccacgtgcggtgggaggcggtctagtcgcagcagacaattgcagcactgtgcccttttgagaagagtcttgtctttgtgctgacccagccgagtatcagttgtacggctgcccatttattgtgtataacacgttttgacgggtgacattcagcgagcagcgaagtccataaagactggtaagcaacctttttccatattccgtgactctagttctttctcttgttctggaagtcgttcttcgtcctacgagcatcgtgcgcgacactctctttgctgcctcgaaattgcgtacacagcggtcccccgaggagggtatggtgagggggagacatacggcgaggcacgtgcaatgcgcgttttgggatgtgcaagtgcattgtaaactctctcgagagcgagaaaagcttgcttggccaggcaaacactgtatgctagagccacagtcactgcagatatcgcttctgacggataaacgcgggctataaaaatctcttccctcgcgctttcccccggtagagactgaactaaccatcgagagattgggcaggcggccggtttctacaaggagggtgtgcgcgtacggctccgttttctcatccattttgcgtcgacttgcatacccgcaatatgagaacagcttttcaaaagccctgggaaagcgaaacaaggcagatgcatccatcagtgcacgaaaaagaactcctttgcagctcacacttcaacctggattttcctgcagggagcattcggtcgtggtgttacgtccaatcggcctgtggcatgtggctgcttgcggaagtgtgtcgccctctccgtctgtcgagatttgctcgcatttttcctacaaatctctttcggtgactcgtgaaggttctcgtcgaagtcacgagtagccctttttggcagaaagggcgccgctttttccggtgaagcttctctcttttcgcaagcttcctgtctaactccctcaagaaagtatctgcgtaccaacgctacaactcaattcacgcgtttccggccaacacacgccaggcacgctttgttgtgtcgtgagtgcgtgcgtgttcgacacgaacaattcttacgggtgcaagtttcggttttggtgtcggtggttcctttctcttgggttctgtttcgttctgctggcattctgctcgtaccgccaagagaacggctggccacggtatcgttccccggttttacgccgttcatcttccgtgcgagtaccggagaagcgttttcccgccaggcctttttcctactaccgctccggaagaaccgcttgatacgatggataggtagctgtttgaaactgaagagactacgctttccgcctttgggaaaaaacaggggaaa

SEQ ID NO: 3265 - DNA, 4586 bp, Toxoplasma gondii
  source 1..4586: mol_type = genomic DNA
agaacatggacaaagaccaaggaacacagacagtcgaaaaacaccggaaaccggcaaaagccagagaagactggacatctctgtcgctgttcttgataaaggttttcttgtcggtcctcacctcatcaaccacctgcaactgtgtaggctggagaccctctgtgagctgagaagtcaaaaaaagacaagcacaacaagcatcggaggttcggtcatgagaaaattccaacgtgcgtgttcatgttatattgacagacttatgcagatcaagagacgctcacttttagtggacagacacgctcagcgaaccacatgcgcggcaaggcctcgatcacacgcgtggatcccgtgaactccttacgacagctaaatcggttttacgtcatacaccaataatgtttatttatagaggaaactactcaaaaaagcaaccgcttctagaatatataatgcagtgccaagttgtatgatggtttgactcaatgatcatgcaatattgtatcgttatatcccattggacaatttcgtaaactttaaaataaaaaactaagcaaatcgccaggtccatacacccttctgttgctgttaggattgacagctcagtgcatcgaaatgagttccacatcggtgacgtgcgttagaggtggtgtacctgaatttctgttcccagtcgaattaactgcgagagaaaataccgctccgtacgatcacttcgaagataggtaaagtcacaaccgatgcagacatactgtgtggtaggcaaacggatgcgttttcaagtgcgtagcctaggacaaccgatctggagtgtgaatggagaaggaaacggcagggaaaccccgagtaacttggagcaaacaacttgaccttcttcgcttccaaagggaaccgcgggttgcacgaaatacgcacgaaatacgcgtcacacacatcgactctttttttctcggaaagaaaacgtgtctgcgttttattcttctgcgtggcgcgctgaccttcttttcaattgcgagggtgaccggacccttcaaagtggtttgactcgcagaagaagcgagacgagagagagaacggaacaacatttctggcggctgttggcttgctgcagacactctgcgaaagagagacacacctccccactctagcggcggatttgcccctctaaagatttccaagcgctctgttccactgttcctccccttcgaccggacagcaggtgaaaacgaacaagcggaagactgagaagagatgaaagagtcacacggaaaggcgagtgcaaatgagagaggctgcaagggcggataaagggcagaaacaggtttttgcctcaagcggaaagtgcgtgcggcatctgaactgaaaagacacaggctccgcacagagagacacgccgtggaaaggagaacagcaacagacaggaagaacaccgggacgaaacaaacaagtgacagagctgaaaagcaggagaaacgggtatttctaccgcgcggggaaacggcggtgccactctgtgtcggccagcaaacctggcttatcccagaaagttcacttctcgacaaggatcgaggaagagagggacataaaggcgtctgaggaggggagcaacagacccccatgagcctcgagggaaaggaatgcaacctgcggaaaagatgctcactaaacggcgaagagaacacacacgcagccttggccgccttcccgatacactcttcgaacggggagtcttttgcccgtttcgtccgaaagaaaaagggaaactcacgactccaagaagacagaagtaagtatcgacatttctctattgaatcccatcgatgtccctgggttgagccagagagacgagacaaaagcggagacagggcgcttcgatgaaaaaagctagcttgcagaagaaaaaagggggattaccctgtgagaaaacgggggaaagtacaaaagaccatttataggataggtgtcgcccacgctatttcgaaagtgggccgttcggtttattatgtgtactttcacctcgcggctgtcggtgtcttgcacgccttgagtttcactacgcgccgcagcgccgctgctgtttttgcgttccttcggtttcttcaccaaacccaaccatctttagtttttaaagcatctttttccttcctctctttgcgcacttgttcagaccaccccgtctgtgtcgcgcaaaaccctcgtactcttttgccgccgtcggtggaagccgctgcccagcacgcaattccacgtgcgttcgcctttgccaccgccctgatgttagtgtctcgtgatcctaaacgactcacaatgacagagtctctgcattctgtaaaggtgggcgtcatgcatggactcctgtgttcgctcgtagtagaatcgagaaacagctcctcagacgcgggcacagtcagtgcagtggtgttgagagttgcggcttcaggtagggaagtggattgacacgtcttgccagatgcactagttacgccagcaccgcccttcctctcagaagctgcaacttttttcagcgaacttattggtctgcaactcttccgtagaattcaatggggagacaacgttctgttgtgaatggctgctccacaactgccagcgaaaacttccttaggatctcagtatgcagcaggatcaatcagaaaacgttcgcaaaactccacctgcttgtcttatggttgtgcgtctctcttgtgagaggaaccgcgctcagacaatgcctctgaaagaactctgccctctcgaatctttctggtatccgccagcagtctaccatcataactagggattgcgtggtgcccttgctgagaagttcatgccactcgctcttgtagttctgtcactcggataggttatcgaaactgcggtaagaaaacggtaactcggtttcaaggtgtgacggcttcgccgtaaagtctaaccgtgacagaggatttgcaggtgcctcgcacgggactttgagccacgcttcttctattttaggctgccagttccggcgccttcaaccctctgagctccacgacaacaaagcaagcaaatcacaaactgtcatccgttttgattactgtcatgcaggttcgcgcggagtcgtgtgctcgcatgtgtctgtgtaagctctatagaagaaatgtggttgcgagatcctaggtggtggaccctctgttcaaatgtgtaaccactgccgtttgcagtttttttcccgcgattttttgttttagaaccctagatcccttcactcaacgccctctggctccctgcatgcaatgaccgtcgatgaaattcagtctgcatggagaaaaacactgaataaccgatagccgtcaaggcacaggggaacgtagatcgcttgcccggggcagcatcacctcgctctaagaaggctccttcgtttccctcgtccatgtgcagtcacactgcttccttcttggtagtgagattctcaggaagtttgcctgacttcaggcgggcttgccgacaccagccaaccctcaggctcccgtgaaaggactcacaccgctcgagtgcgcaattctgtcaccacagaaaacacagcggtaatgcagcctgcttctgttgaggaatctcaacgtagctctaactgcgaacgccatccacgacgagttgtgccagatatgaatgctgttcgatccgtgtatgaaaggacacgagctctcaacccgttctatcgtcaaaccgaataaacagacattatagtacctaggatactgaatacgactccagttatgagttacaggcaaccgagttctttatgattgctgtacaccaccacctcactggaccgcttatgacgatttcatgcattcatgtgacttttgagagctcccccctcgatgctaggcaggagtggaaagcatttgaaaagaaagtagccaaccagacagctcgtcccgccgcttccgggtctgtcaggaaagcaagcaattctgaaggattggctttcccgggactcgttagtgtggctgctctacagcactctctgcgtgcgtcactctctgaagagttgcgtttggcgcgttgtcttctttgccaggctcgctgctttgtgtgatttcatcgaacgccgttcttcccgcggtaacaggaccggcagtgaaagtacctaacctctccccgagatgggaggctttactgagtttcaactctttcccgactttccccgctcttgcacgttttctctcgactagcagcaaagtgtctcgcgccggatgtggctgtgttggcggcgattagacgactcgcgtgttttccggtttagatctccgggaaactttgccagacgctgcacactctgccgggaaaagcgggcagaaacgaaacgcgggtgactgtgggagaaaaaccgtttccggatatagaccgcccctccgcaacatgcttgaacccctctgcgactgtgctatgacacagagaccggcgatgttcgcacgcttatatgtgaagggtcgaatggagaaggggtgccgcagccgtttgccgtttcgacgcaaggcgtcttatttttttcttccttttcgactttcttttctctttcccgcgtgaagtatcgctgtcaaggaaaa

SEQ ID NO: 3266 - DNA, 2901 bp, Toxoplasma gondii
  source 1..2901: mol_type = genomic DNA
agagaatctccaagatgtcggccttcgtcttgtctgaagttgcttgtccccacgactgcagcatcgggcttccaggaggtgctccacacgccaccgaggctccgtaagaaacggaagaagaagaaagagaaagagaagaagcagaagaggaagagagggaagagtaaaaggaagcaggaaaagctggtggaggagacgaagagggaagatgaggaagaggcttggcgtccatcacagggtgagaaaggcccctcgagagacttgcagaagaagagacgagagaagaggaagagcgggaggagagagaagaagcgattcgagaggcttcgagaacaagtggatagtcggtcttcattgaggtctctgagactcgagcagtctccttcgcgtcgtgttcttctccgtctcccctgtctctgtttcttgtctctttcgaaaacgataaagttccgcctccttgttgggttcccttgtgatcctctctgactttttgactcgcgaaacatccagactccgtgagagaaacctcgacgcgggcagtgcctccccgcgcaggagtttctgcagaagttggcgaacagtgagaggacggaagggcagaagacgacgacgaagaagggaggtggggaagaagcttggcgctagccacaggttgagaaaggctcctcgagagtcgtgaagaagaagatgatgctggcaaaagaagcgttccttggcaaggtcgagtagagtcggagcctgaaagggcgactccggcggaaccgccttctgctggctgttgggactttgaaggagctgccaaagaagcagccgaggaagaaaacgtcctcaacatgttgcagggaggcgggagaaggaaaggagaacgaaaagggagttaaaaggggaacgacggctgtgaggacacaatgggtcgcagacgggcagaaggattctgtcggaacaaacccagtgtagagagacttctcagagtgaacagcttcacctggttcgttccgtctgtctgtcgctttcgtcttgcatctactccattctgacgattccacggaagttctcagaggagtgcttgtctggacttttcgcgttccacgtcgggcgccttctcgcactcgatttgctccgtcctttcagtcgcttgctcgccacgggtcgctcagaggtgaaacgcgaagcttcagacaggaagacaaaagcagttgaatgcgaagggcgcttgcgccgagcaagcagcgaggccggggcggacgcgcgcaagccccgtgcctaaagtggcggagaacatggcaagacagtcgattttcacgaaaagaacacgatccgaaaaatgtgtgagacaaggaaaaaaagaagtacgaaggagtctattcctaaagcaaagcgcgttggaagcagccgggaaacagaccgtcacgtcgttgacctgccttgtccgagttaggtctcgcacactgcgagaaaaggtttctttccgccaagacaattcgctggacaggaccaaaagagcgctttttgagagtcaatcggaagcgccgcttcgtcacaaaacacattttctctccttgttgacaaaaagttccaccgtctgcgcgagcggcggagagtcaagtcacgcgagcagccgcgcagcggcgaacgagggatttcgtcgcggatcgaagaagctccaaggaaagtccatcggctttcagaacaggtgaattcgagagttttttcgcggaaatttcaaagccccgagaggcaactacacctctgtgggactaaggcatattgcccgcgcagaagacaagagtccggtcgctctcgcgcgttgctggctcggcgccagacgcgcgtgaagaggggggcacctgaagctacgaaattcatacctgaggttcggcgaagggaggaggaagcgcgaaaaaaaggagttccttgacagcagggaaggagagactcccagaacgttttaacgggagacgggcgagaagacactgctggcctcccttttcgcgttttccattaaaacaagaagccagactaaccacaatgcgagcaggtgaaaggtggatctctcagggtcacccgagacgggacctatttcatacaggtatttcaaaggcgcgtgtatcgccgggctctaagggaaacctgctcggttactccagttgagtcagactccactttcgagatacacacacggtcaagtccttcaggactgctctaagcattgtcgaggaaacttcagaattcgcatttttcgtctacagccccggcggtggatatgttcacgcagttgggaacgacttctagctcggtggaactattccgcccagacaacgcagtgcccgccaactggttcgccgtcctttcgggaatcgactgcgggcagcctctggaaattagaagtttccatgaaaatcgcgtgcaagacagcacgccgaagtcgcctgcctcgaaagaacaaatcgtagcttcttgaaatgcatggacagagcacagctcgaaacttcggaaaagcgaaaaagtgacggacgcaacacgagggcagaagcagttgtcctggtcacgaggagcagggttctggtagctcgttttgaacgcagagacgaagtgaatctgaaagaaaaggttggagagatttcttgccacgataaaactaagtccaggagttgacatcatatatgagtcgaagtcagccgtaagtcagctgtcccactgtaagggctcgcgtctacgagaatagagtcgtagattgcctcttcgctgtcctcctctctgttgttttcctgtcattctgttccagttgagtgccgtctattctgtgtctatgcgggttcacagccacaacggtctacctctcagaacgtccacccacaactgaaactcagttcgtcgcctatcatctcccggcctcgtgaa

SEQ ID NO: 3267 - DNA, 2750 bp, Toxoplasma gondii
  source 1..2750: mol_type = genomic DNA
ataacaaactacgtgtgtgagcctgaaggtgatcttagcagtcacgatcgtgaatggcgcccgtgtgctcggctctcggctggcggcggttgatacagagagatcgacacatctgggggactggatgagaaaggtgggggaaagagaaacgttcataccactgaggggagtctttcgtctatttctaagctgcataagatctactcccgctgggcactccgggtgtgatggaaaaaacaattgcttgccttgctgttggaaatgctctgcatgagagacacttccgaggcaaagtagagcccgcttctcttaagcgccacgtgcaagatgtctctctttcttatatgtagaggaataaaatctatgcaaacgaaggcttaatctttagtccttggggtcctgcggcactgtagcgtctcacggaaacactagtgctgcgtgatgaggcagtgatgccttgtctcaaactgtgtttcccttccttcgtttttctcgatgaaaaagcataacgtgaaatcctatattttgctggtgttgtagacagagagcagcagcatattattctcctgtgagacaagcagtaccatctcgtgaccgtgactcaggggcactcgtcagcgaacaaaaacaaacaaaccacagctactacgacgtgacagcgtaggtcttgccatcgatgttttggcacagaccccaaatgtgaactctcctattcacgaacacgtcaggacggatttctcctttttcatctggggcgttctgatgtcgaaatgttcattcgcagcaagaggttgattgtctttgtgactggcccgagggaagcggatctttgtcttaaggaccgataggtgctcgtgacttttgatatggagcagcgtcatcacctgggattcagtacctgcttaccgatgtcatgttctgtcagcaacgaatacagtttcatggtctagggaaatatcgcgacgacctgtttgacggcaacgtgactttatcacgtactgtctgctctcacgccatcatagaaatcaaaaacacattcgctgctttctggcgcacgacgtccagagaaactgttttctgtcgtcagtgtagtattttgcaatcagaatctagacgtcaaaagacgcatggaaacaccttgagcgaacctatctcaacttcctcagtaagtttgttacacggtttaaggggggttcgtttaggagtcatgcgaaaggttacatggcaacacgttggtgaacaaacttttatcggcgtagaatccgtgaggcgcgaaaccgttcggcgtgcttgccttttacagaaaagcgacgtgacagtgagtgaggtttttctttcatgcttcagttgtccattttctttgtcacctcgaaaattatagcggtgatctgttgcattgagatcggtcaaaactatgttggtgcctatccgatgatacactaggccttgaagaacacatgttgcgtgtttacttgggctttatttatggtcgtacagtctggaaccttgatgtcgccaattaaacccactcggagtttccttgccagtggctccgctccttttcgcgaactaaaaacatctactctccgaacgcgcaccaatccaaaagaatctgaacatgtttcatgagagtgaatggaactttattcgctcatgttcgcatcgtaacaagtcctatggaacgatgagggaatgaacagcaaatcaggcaaggccttcgaactgatcaatctagggcaggagtgggacaaagctctggttccccaccagcgcacgaattttcgcaaccccgagacacagcacagaggcataaacagtgccttgtcgttggctaaccatagagaaattcacggactgttttgtcgtccttgttttaagtctcagaatcggccgatgccccaagcatgatatgctcgctgggaccgtgcttccagaaaccagtaaagagtgcgcatcgcacgggctgtcatacattggagacgaaccatatttttcccctaactgtgtccttcaaaagagcctttgaggtacaagcgtcctctctaagttgtataatcagaaaacggtgggatgctgcggagtaatgtttcaccaattttcgcggttctctccccaccggccgttctgcctgtgcgcacattggcgcacatgcgaggcgagaattttcttaaaacaacagtgtcagttgtgctcggaaaaagcatatcggcttctcatacccacagaaggtttatggtttcggatacactggcagcgccgtgtgtccagtaacgagcaacagttaaccggatggtctaccagtcgcacgctttgggatggacaaacctttcagtgtctttgtgtgcactgaaaatactttaccgtgtatattacaacagtccttgtggcgatgctctgaaaacttctagctgattcatagtgcgtgaaccctcacaacaggattccaagcaaattgcagtatgtgtgtttttagtcgacgggaggcgcaggatagccggttacgatgagtggctttttgtcgacttctggtgcacgatgattgactgaccaagcgtttgcttgtccttctcgacgaaagagcagcataaataaaacagctgtgtatacgtgaaagtcagtttatcttgtccctccatgcaattgattcctacgcatgtaacggtaggacgcccttgccatatgccgagacactccgaaaaaattcttggttctgtctcttcagagagcggataaatcaattacaaccacga

SEQ ID NO: 3268 - DNA, 1478 bp, Toxoplasma gondii
  source 1..1478: mol_type = genomic DNA
tatgctggttcctcaaactgcagtgaaatgaggctgtttcgcgttttccgcttgtttgtttgctaaatgcagactcaggaagacttggacgacatcaacgtcttgccggagttcttgaactagattctctttcgcctctttcaagcgcgaagatgtttttcgaagaaaagtctcttatcgaagaatccagtgcgcgaaagtcgctattcgactgactttgctggacacgctgctccttcgcttggtttttgtggtcgatatgcaatagctaagacaaagggaaagcgaaacggccgtcaacctcaaaacgagccgtctgcgcgtcgagtttcacagtctttgtgtcctcagccaggagggagtacgtggcatctttcgcggggcaatcgattttctccttgtgtcaacaagctgcactggcatattcggtgtcgcgggagttttctctgttttacccgccatacttcgagggaacctttgttttcgttggagcctcatatcgaagatttttctcttatgtataaacgtggcctgattcaacgtattaattgcagggtatagtcgttctctttagcgagcttattgtgcgaatcgaacggcggaaaacaacgccgttggtagtcccgcggtttgatagggggtacacccagcacgtctctcaagccaaagcttctcagatatggccaagaaaagcacagtcccgttaaacacacaacccactctccggagcaaaagtgccacataaagtgctgaaagcccgattcagacgagatgcgactgtggatgtctgagtaatgtctagcgacgaaggaacttccacttttgctcgactaccggtgcagagtcctgcccacagtgggtttggctgaatgcgacgagatgaaaatgaactgggaatacgaaacaccggagcaacgaaagggtgacagtcctctgtttgtgcccggagaagcctctgacacgacagtccgtacattgacaggaactgattcacgcagaaaggaattacaggagccagatgacacatggtgtgaggcttaatgagattataaaattgtggtctcggagcacaattttaccagctgaagaaggagtggaccctttacaagcagggactgacgaagttgtcgccatccatgtctgacggctcactgccagtacccagtgacctacttctccaatattcttttaggctcgacatcgacggcgtcgctcaaactgaatctcaaaaagagttcgtttttgtgccatgcgacgttttcttccggagtcttgctccgccgtattcgtttggagcacaagaaacacagggacagagctcgacgagtcgtgccttgcagtttggagagtggcgggctcccgactccggcgtgaaggaagagacagatgacagacccactacttcgcgcctgtctctcatttttacatccttttttcacggcgaactcctgtgcatgggctgcattcatccccagaaa

SEQ ID NO: 3269 - DNA, 2035 bp, Toxoplasma gondii
  source 1..2035: mol_type = genomic DNA
tctaattattctcctcttttcctcagacgcggcttccgcaatgtctttgagcgctttctgggatgttcggtggaagcggaattgcatgtgggggcgattcttcgagtgtaaccttacttcgaaatctcgctggtttctcattagtacagctgaaacagagaggatgcacattaagcccgtggctggcctgctacatgccttgcctatgttaagtccttgccactctggcggtgaccactgtgcagtatttaataccgtttgcatctccctggcaagtgccgtcatcttgccgagttcctgacgaaaaacatatgcattttgtggtgatttcatccccgattttaatataccttctcaagcagtctttgttcagcctctgcctcaattttccatactcgtctgcctcctgtgatgaaggatgtagacgagcagttgctcgacagaatggcatcttctctcctacccggccgacggacgacactgacaacgggagagcctgttccactaatctagtcagaaaaggtcgaatgagaatcgctccccacttataaaaaagaagtaagaacaccgaccaggccttgtgtctgatgagaatgcacattttcgaagtcaaaacgtgcactggcaagagacgccagcatagaggaggccgcgaaagcgacctgaaagaaccgtatcattgcagtcctgcagtgctccactgtacttccgttttctaccccgggaactgtgcagcaacactctcaaaccatacctatccagtgttttgtcgggggaccgttgcatccggtgtacatacaggtgacctacctgtgacgcaccagacgctgccgtgtttgactgcttggtgaaacgtacagagacacgtaggctgactcagaggacgactcatccccacgctcactgggaccaggtgttcctttgcttcccagtgatgagggattcgtgtagaaatggaaagtctgagctgagagggatgcgtcacagcaacgatcgtgtctacaaagcactcacgtctgaaaacagctgccgaaaatgactgttgtcattggcaaaatcaggtgctgcggtgtaagatgagtcaactttttggtacaaatgagactggacttcagcttttttacgaaacacggcgttgttgtcatggttatctggatgttatcgatccaaaaaggaagtgcgcagaaactgtggatgctgagcagtgttgcggcgagcacctcgcccacgaccttagggtgcttataaaccataaagccaactgagtgaaattactaagggtccactttgttgtacttttgacttccggcataacgtatttggctacgggcgaacacagaaggggccgtcccggtcgcgatactcgctgattttcaagctcgaacacgaggaaacacgggaaagccagacatgcatcgttgggaaagggcatgcaactgcagcggcgggcatgcgtactcgccaacaaagggcgaggctcagtttgactgtgtgtgcacattgatatctacaatgcttgacgagcactttccaacgcacacactatcctttataatgctgcataactttcccgaataactggccgaggtactagaatccgctggtggagcaaaaggcgtcatcatattcgttgactctccatgtcaggtgtattgctgctgtggtgcgtatgcacatgctgtctgtcatgtttgagctcgtcgtcattagggagtgcaccacaagcactaattaagcctaaacaacatcggtcgtggttggcactcgtcagtggtctgctacccgcctgaatcaaagcagcggtttataggcagagggggatcgccgccatcttacgttccatgagttcgaaaaccttttcccgttgtcgttctttccacataacgtcattgtgaatttcctttagtcggggacattgcatttctctgttgttacgcgtaggctccccgaccgagtaacttatcgcacgaaccgaatgtgtcgaagtagagtggtacgttttcttttcctggtgtcgctcacttttattttcaca

SEQ ID NO: 3270 - DNA, 2365 bp, Toxoplasma gondii
  misc_difference 552..571: note = n is a, c, g, or t
  source 1..2365: mol_type = genomic DNA
cttttgaagcgactctcttagcaagaagaaagacttcttgcccttcctgtgacacagaacgaccctcgttgtcggtggctgtccagccgctactcctctgtagattttttatcaagatctgagaggtggtgtcactccttcctgatgttggcgtagtttcggtcgctgacgcgtccgtgtgaagttccagatctcctagaaaacgcaagtggggcggcctgtctcgagagcagactccctcggcactcgaacagaatgtgcaacacttcccgatgaatccgaaacttgggaacagcaccctaatggcagagacatttgatagtctaagcatttcttcattaggtttttgcacatttcgtcagtctgtgcgttgagtcccgcgaccaaagaatcataaacggcatcatgacgaagtacgtataactagctggcttggtgcggtactgaggtgtgagaacgtccttttcacaagaaaataggtttgacatcattgagcggctcatcgtgaaacttcgaaaaaaaatcagtgtttgtgtgttctaccaagaattnnnnnnnnnnnnnnnnnnnncacttcccgatgaatccgaaactgggaacagcaccttaatggcagagacatttgatagtctaagcattctttcattaggtttttgcacatttcgtcagtctgtgcgttgagtcccgcgaccaaagaatcataaacggcatcatgacgaagtacgtataactagctggcttggtgcggtactgaggtgtgagaacgtccttttcacaagaaaataggtttgacatcattgagcggctcatcgtgaaacttcgaaaaaaaatcagtgtttgtgtgttctaccaagaattcgacgacgcagcatgcctgcactcggtgccgtcagcagccagaggagccagtgaccctcttggactcgcaggaaaacgatcttgtttccgttctaaaatgatatggaaaaccactgcgcttcactcagaaggaaagctgtcgaaaagaaagcggtgctaccacccgtaggaaacgaagcaaccgtgctgatagattctttcgggggttgtgcagaaataaggttgtacccttcactggtttcgccgtgagcagaaaagtacgaactttcttgtctccccgctcctgttcccttgagacagcgatgaacggtaaagagcccttgacaggtgtgtgtgtgtgtgtgtgtgtattatgggtgaagcaacagacaagaagtagaaatttcctcatacctaattgttcacgagaacccgccttccaccggctactgaacaagcttcgacacgctgacacttattcgatgcagagcacgccaagtgaagaaatcttgaggtgaactttggagaaatgtggcttgcaaataatagttgcaggaggcacaggtgaaacttcatcgtcgcaaaacaatcttgacctggacacctacttgacatttttgaggagtgtcaattgtagaagtaaatgcgtgtgactcgtgcacagagacgaacacatacgacagattcatgcttaaggatccgccagtggtggctaacttacatcggtcaaaatgtacatcgctagaacggctgcactgtgaggaccaataacccagtgttctttcaggtcgagcaggaaagcacacttaagccaagaaagctttttgcctgctcgcctacacggtctgcgtaaagggcggggaagtttccgtactaactttagtgatgggagaaggtgatattcgtatcgttgagtgataggtgtgttgattttggggacgctcgcgtggggcttcttgcgcagaagacatgcagcccccagtagccagccctggagaccattgacttgggaacgcctatctatgcggcattttgagggggaggagccttgattagcgaaattccggctagaaccgaaggccctgtaagataagggaaagaacgtcgtcacaaaaaacgtatttccagtccgtttatcgtagccgctcgctttcttcctgcctttcttttgtcacatctgccagaggcacggataatctctctgcgacggtctgcgtgtcttccgccagccttgtgacattttccgacgcctctcctctttttctcaacttctccacaaaaatttgtatttctcattgaaccatccccttgcttttcttaccctgttccaacgaacttcagttcagtcgctctttgctgccattattcactgtcttgcgatataagctgatccttttttgggtcggttcttcgtagattccgcgcgtccctcccgtcgcttgcgtttcccccgcgagggaaaaactgccgtttaagcgcgaattcctcttcttttctgtgtattttttctcccaaccggcgacgacta

SEQ ID NO: 3271 - DNA, 2404 bp, Toxoplasma gondii
  source 1..2404: mol_type = genomic DNA
tgtacggaatacttacgtctgtccatatctctaccttgacgaaaaagtggatttcgaatgatctctttatacgaaaacgaatcttttggaagccaaaccggctgcccactgcgatcggtggcacttggagagttccgagaggtcacatatggctgtcggatgctactggcttccctctttcttcagaaacgtaagtaacaaagaaagagggtgtctcgctataccccattcgcgctgctacgaaccagttggaaacgtagatctgcaatcgggttgtactcactttccttcgctttgttgacgatggtgtcggcctcctcctctgcctcgaggagctgctgaatgagtgcattggagcccttcgctgccgccatggtgtgaagaagtgacgaaaaaggaaaagaaacaactcacgggccgaaagccaccgtaaaaggcgagagtcgaattgcctttttctactcgagacggaaaggcagtgtcagatggtcgcagacaactaagcctcgtgcccttgctttgctacacgtagagcggggatatgacgactcgggaaaccccggggcgaagtccctccctcaggagcccaggaaaaaggcgggagggatgacagccgggaggcaagtacgtacgagatggcagggaagagtttttcttcggcagtccggatcaaaggtgaactccccgctagcaagtagtgatcaaagcaacaagttcgcggtagacatcaagttgccgcccgcgacagggttcctctacctgtccatacaacgcgagaaatcgcaagaatgtagaagctgcaaacaatgtggaaaattggaagtgtaaaaagcggactggggggtacaagacgtctctcaggggaaaccagatctgagtcgtgagtccaactgtcaccgggggctgggttgaatggagtcggcgaggaggtgagaagccgaaaaacagcgaggtgttccgttatatcgagttcgaagatactgcagcgaaagctggacaaatgagcgtcagcgttgagaacgaaacagtccggcttgatacagatcgcagagtttttatagagcaaagcccctcaagagaaacgagccgtaagggggagaaaaaacgaagaaatggacgagcatctaaccgcagcacaccacaaaatggtcgtgtgtgtagtcaccgacgacaacgtgagaaactgcgggcttctgcgaatcgaaggaaggagattttccagacgaaaaaaagtcccggctcagccatccgtgtcgcgtgctgccttcgtggctccgaagaaacgaccctacgcgatcacggggaagggaactcacttggtagcaactgcaaagcatagctgcgtgcaagcttttcctctggaaacggagactgttttcggagtgttcctttagccctcgacaatcgcaggcttcgtcggcctccacagggaaaaaaggtactatccggaagaaccttctactgtggtcaggggggctccgaatataaaccgacgtgcaggcggcgacgtcgtggctgccacacaaacgcaagcagccctttttgatccgtgaaaaatcagatgcacatctggtctcttttcccccagtcgaaccatgagcggggcagttctcaccctttgaagaacgtgtttcgtcctgaagagcaagcggtcgtttcctcggcccgcgccaaccagactttgcacacgcttgtttatagcatggctttgtagccgcctctgcggaatacttcctctggcaggaaacagagcagcgagatccgttcaggttgaaacgcatgtccgcctcacaccactccccggatccaagaacaaggaggaagcactgagttcatgtttcgcagtatttcatctaagaccaatgtgctcgagttgcagaccggatcacctaatttcactactcgctttgtgttctaaagggagtcccaacgtctcaagagcggtcagaatttgtggttgtattcaagcccgtcaaaatagccagtgtcagaaccgtggtatcagcgtcatattacactttcacttgcagcgaaggatgcgttgggactaagggaattttccgtctacgctagagtagcgggcaaggcaaagtcgtagcgaaggctgcagcgaagaggcagaagatccagcttcgtcaaagtctacggcaccgagaaaaccaagtgatagaggggatgtttttccgagagttcttagtcaccttatcataccttgtttgccttctgcgaagtcccaggttgaagcgacatgccaagtggacgccttggcaagaagaggcacctgttggaatgcgttggacaacggtgtacatgaggtcttctacgattcactcagcaagtcccctcggacaaagaatgtgttagacaacacagcttaaacaattactttgacagtttgatggaa

SEQ ID NO: 3272 - DNA, 3592 bp, Toxoplasma gondii
  source 1..3592: mol_type = genomic DNA
tgcggtcctttcagcagaacgaatgggcgattttctggaataagtttttgaaaaggaacagtgttaactgaggagagattggacgcacaaggattcgaaccttgttcaacagaacttgaaggtatcgaactatatacccgataggttgttcaaggtttgatgtcgctgtctggagatcagacgcaattcaagcttcgttttttattcgcggttgcttctgctcgcgacttttcgtggcttcttttgacaggcgatggaggcgccgcctacggggcaaggcccgggggtcggggcggcgggcgctctgggcggagcggtggcgccgacgcgacgtcgatgcatcctctcttcagaggtcttcacggaaaaaagtgaactttgacagatttgagacagccaagaaagaggcgaaaggccagaggcgctgttcaggttttcttctgcgaccaggcgaagcagaaaagactttggggggcggtggaactgaccggagttctggtgcgtctgttcagaagggtttcgcggaagaaagtgctgataaatggcgcgataacttaagcatgacgggagaaaggaaggaatcatggggcgagcacggtggcgcggacattgccgctcggcggctgggccgttctaccagggaaagatcccgataccttattctgtttttctgtcgtgccgtgaaatgtgtacttctcgactgcttttcgtcttcagacaagaacaacagaaaacgctcgcgagtttcttctttgttcaggtttttcgtgcgaaaaggagaggaatctcttgtagacacggagttactgtcgtcgcgtgtatgaaaccgctctttcgcgctgcacgggtttgcgcgctgaagaacaggcaaaacgcctcttcagatttgcacacttttctggttttttaacaggaaaaactcataaaaaagaagctggtgatagaaacgagaaaatcactcgatggaacaccagtgatatctctaatttgctgctgtagcgtaaacacctcggatgcgaagccggcaactcgaccattctagacacgggccacggtagatttcgtaggactttcacttccataactccagttatagagtccttgaatcttgtgaattaataaatacacaagaagacggaagagcgaaaagaacgaaatgctttgggtagaaacgatgtaggttttattgaacagctggaggtggaggaatccccaggaatgtttcatagaacatggtacattcttgtttgactttgggatcttcacagttccttgctagatttcatgcgcgcgcgtcgaggcgcagcggttctcaccacaaaaagtgttggattttactatctacgacgtcaagactactccatacctgttatgttctaggcgtagtgacaggaccaattttattgcgcacctaaacggcgagagatactaagacgctgggccaggggagtgacggaacccaggcgaaagtactttttccagtgtgtacagaatccgatttatgtattccgtactgagtaacctcaggaaggagaccaccgaattgagtattattattttagtacggcttgcatagaggtgcggcttttgcatcaccagtcggcaattttatcggcgacatggtgtccctgtcggtgactgctgttactttttccgtagatggatgagtgtttttcctgcatttgtgaccgagtttcgttcccattaattccgtagcgagacttaaaagctcaatccaagtgttatttgtgcacggaatttgcgctttgcttcgccgatgtaatgtccggcagtcaacgggagtgtggagtcgaggtgtggatgtttgcgccgttctcatcgaagtgtacgaagtcttttgaccgtcacttctccacgttccctcggtgaagacttgcttcgattttagctcgatttctacagccgaaattcttctttccctagtcaccgtcagggcgaactcaccgcggatggctcgttccgcgaccaggatgctattcgaagaactaaacttctgaccagctaaaagagctggatttcaagaccctacccgtacgttgcttgcgtggaagctctccccaggaaaaggtactttgtagaaacctagctacttggggacttgggttcagaccgacgggaccgacaagagtctgatccgcatattccgcgaagcagggacgcgtcactgcacactgtgtgtgtctggcactcgggactcgttgagaatttccgcttcttctggatttgtgaagtggaaatgtggcgggtgcccaacgccagctcgctcgctgctgcaggcgtcacgaaccgctttcttgtctcacttttcggttgcacttcgtacctgcgtttttctgccctgtttgtcgagcaacgcactcgcgaggaaattcccagcgaactgttggcactgtctggaaagccgaagcacgcaaaagcgaagagccactttcgctcctcaccgcgtttccttagccttcaccttgatcctgtcgccctctcgcagtagaaccctccactttgtttgcctgtctctcgagcgcttccaccatccgagagtccttcctcctggccactagggagaacgccggggctgttggccgctcgtagcaccaaattggagagggaaacggcgtggtttgtcgctgtccatttccatttcgcgagcgcggagccgagcgaaaagtttcacctcgcttcttgctcgtgtgctgtctctggaggaagttctactgtgtcaccgacagaggaagcaaaagtcgatcgcctgcaggccacccgttgtgccacgcgtgcgttatcctttgcgtttctgttttctcttatggcgcgcgaaaacacggcgcgtctgcagagtttgtgtgcaagcatgtcactttcgtttacgttttatgttgagactcgcagccgtcccgccaccacttttgcgctcgtggacgccgattgtttctccacctaccccacaggggcagcagactgctgaacgcctcaagatcggcaaaagcagaaatccgtttcttgccgcagtcgctttggcgtcgagtctcagagagtggcctgcgtttttcgaattttctctgctctgaaaattccgctgaccgtcgcgagcgaggcagtcgagctgtgcaggacgcggccatgcttccggtgttctctgcttacacctttcactcgtttctccgttgtctcttcttttctgcatttcttttctgatttttcccaccttcacgaacccccttaaagtaaggactgtggcgaaaggtggcggtagacgcctccggaaacccgtgtttgcgctgggtgttggacaagtgcgcgcctgcgtagaaggcagaaggtctctctcttctttgaacttgtgtccccagaacgcttttttgagagcttggttccccagcttcctggctcttttcttacgactccccctcttcaccgcgtttcgtcgcttcgctcttcccgtctgcggccttcgccgtctgccccgccccgcggacacaaggacggtttttcgctgtcggtccatttccttagtggtctgtttgtcgtccctttcgacgaaaaggggtccgccgtctttcgtgtcggaccagaa

SEQ ID NO: 3273 - DNA, 3921 bp, Toxoplasma gondii
  source 1..3921: mol_type = genomic DNA
gaggtcagacaattccagggtgaaaagatgacaaggaaacgtcgatatacgacagaccgcagacacacggacttccggcctcgatcctcaggctgactatttgacagtctccgcaccgtgtgacgcatcctctctcgtggcgtgcatgcaagaatccacaagcatctcctctcacccagatgtcgtcttgaaatgcacctcaaacatatatatatatatatatatatatatatgcatgcagttgtgcacacaaaacgatgcatacgtggatgtattaaccacacacacagttatgcgtggatgcgcatactcttacatataaataaataaatatatatatatatatatatgtttgcttgcgtgtatttgtgtgggtatgcatgggcgtccagatatgcctgtctaggtggcatgtgtttttggtgagcactgaggctgcggaagcgtcctttcctttttccattttaaagtctcacctcgagtgtctcccatgagtggaagagaatcacggtgtgcagcgagttttgaaaagacatgggcatgaccccacagcaagaggacttatgtccctccgcagcgacgtgggcggttccttccgcagccactgctttcttctttttacagcaggactgttttccttcactggaaggtccctctccgcccgaccctccggcagcgcctttcttgtcgcagcaagactcctcttttccgtccgcctctctcgcagcagaagcgtcgtcggcagcgcgcttcttctgtcccttgcagcagtcctcgacatcttcatacctgtttctcggccgctgcttgtcatgcgtcttatctggcgtagcatcggaactggaaggttttgagctgtcacggtttcgctgagggtcgggcacctcgttgtcagaagagacgggagagttcgaggcggaggacagagcgccggggagagaagacacgcagtgaagcgcgcaaacaaggaagaacgtggacactcgcagaagagaggcctttgattgaggaccggtcggaagacctcgccgtctggaactggggattttgcggagggacagaaggtaggcttccgtctttctctgtcctccttcgcgtccagatctcggagaagtgctcagagagcaggaagcacctgactgagcgtgcgttgccatcttgactctcttggtctgccctctgtaggtctttctcgaacgcgttctctctccccacggagcgcacacacttgttaatcggaggttcgcttcagcctatgattcttgtgaagttttctttcctctctcgcggagagtcgccacaggagagacacgcggcgtgtgtctttgactcgcgggggggccctcggcagttgaaggcttaaaccctaaaagtccctaaaccctcgactcagaggcagcaagaacgcaggaagagttttgccacctgagtcagacaaggcagacgggaatttccttcgtgaattgccaaggtgtcgtgaaaggagacgcttcctgcatcgcctgtgcctcccgcggggaaacagaggcgcctgccttacacgtctcctgcaatccacagcgcagaacgcgagatcaaggtggacgcgtgcttgcacggaaaaggagagccccccgcgaacgggacagaattgccaggttgacatccacttttccgagaattcttccgaaactctcgcttccttccatcgaaaacaaccaccaactcaattctgtcaagggttgctgatccaccacacagaaaactcactcgcgagacgggtgagaaggcggtggggctgcgggctggggtggcagcgaagcacgtgtgttttctgtggctttcacagaagaaacccttctctctttgcaggggttatgtcggcgcaactcactgctttctttcacgtctttcgagagaatttcctgcccgagatgtgcggagaaaaaaggggaagtagcgactcattttactgacgcgttacagctgaaaaagctgcgggtaaaaaacctagcctgacctactctgcaaacaattttagttttagcggcagaaaatgccactgagagcccacaagaagcctgtttcccatatgcactcacacacagtgctctgttcgagatcttgtttgaaaaatactcacacggaagcgaacaaggcaccgggtttgccgttcggtgtttgcagacgcgcggcattttaccggtctcgactttgcaggaatcgtacttccctctcctcgtccgtgcttgttttttcgacgttcgttccgagctggagtgccttgcagcagcgacacgtagttttctcgagggtttgcggtggaagcgaaacacacgggccttcacagggttccacttcgctgttcagtccagtcgttctaggtttgtgctctgtactactcaagactggatctgtcggtgactagaaggcagaggctgtcgcagaagtacctcttctctggagatttgcgggtggagttgcaaaggggagaaaacgacactgcagagcgaatagatgaagaggagagttgacgagaaatggatttcttcagaccatcttgagtttcagcgttactcaaatggcggtttcacgccttctcacacggctcgtagaacccacaagaccggtgagcgtactcctttttcttgttcatcgccatagtacaacgagtaatcactttagagggaggagggactgaaggtcttagtacccgcagtaataccaatacgtgtcataggtgaaaagtatgctcgtgcagccagatcagatgtagaaatctctgctccctgaaccgtatactgtgtaaatcgcgtcgtcctgtttccgtcttcgaacacagaaagagctttcttttcagattcgcacacgttctggatgtggtgctcctaacgtcagtccgcacagtttgccttacaactggcttgccctctctagggttctaacaggttctttgttttcggaatagtttctcaactgcagtttccacccattcttttcactgcgagcatctcgacgcgggtgagaactctcgaaacgcctcgcatttcttgccccgcttctctactgaaacgtcagtacagcggcacagtcgtctactattgtactatcgagaagctggtctgcggtatactcagctgcttcgcctagatactcgcctgcatacgcttgatggtctgaaacagcattcaacacatctaagtggaattatgagcgtaggcctgggcacacaccgcaactgctgcgctctttccgcggagttctggtggcatcgacgctcgtctttgccgtttttgctcgcatttgtctcgtgtgttgcatccccaggtctgtggtcggcgatttctccacttccctctacacgccaagagaaatgaattccccacttgccgtacacacgacgctggaggtgtatatacaccacacatacaaccaggtcgtctgacgctctgtcgctgcttcggtggttcttcaaacgcgaaacgggcagctcggtctttggcgttttcattgaggaaaagtggaaagtgtggcttcactgacacgcaagactcaaatcgcggacggcgagacacttgcgaagcaggacgagacgggcagaaacgccgttccgcctgtgcatacgggtgtttgagtacggggtcatttcccctcagaagagacacacttttcggactcttgggctctctagctaccgagacgagagagtgacgccgttctacttcgcgcctcggttgagaggggcaagactggcctttttcgacgagcaccttcgcgcaggttcgtgttcagctgcagcagggacggatcgagcgcgggagtgagggcgacttctctcgtttccccccactgtttgtcgcgcggccgctgccgtcttcacttttttttcttccctctttcttctgccctgcaacccccaagtttctgtttcgttctcgcaga

SEQ ID NO: 3274 - DNA, 1913 bp, Toxoplasma gondii
  source 1..1913: mol_type = genomic DNA
ctttcctttgaaacgcaaaggcaactgcagagctgctttctctccacattgcctccaccggttcctctcttcttccagtccatgtggaaccacagagagcgcacgtgggttgggaaatgtttaggtgtaaacatgcgtgcactcgaggcgtcggctgtaggccagaggagacggcggactcacacatggaaggctgagaggggtagtttacgatgccataggtactagcgaatcgccggtctgggagggattcttttcggcgccgcaggatatgccggtaactgccattacggtacgaccggcataggtaggtacgcaaaggttttcacctgcgacacaaacgcaacctacacaaatgcttgtttcaatcgtagacggtttttcaactgagaggccctctcccgtgcgagctctctacagcgctttggcgagtggccgtgagacatgcgggctgatatctcttatgggctctcgcgggctgtgactacagggcatgtgctatccctgatcttccctttcttcattttgtacggaagatacggtaagacgctcctggagcgcatttgaacgctgcagcgacgcgtgtggttggtttaagaaaggtcattgaagctaagaaccgaagttttcgtgctggatttcggtgtagagcactgcaccacactgtaatgcttgagacagctgaaagtggtggatttcaacgtccggccagtattcatgtttgtttggaagctgttggcgtcaaaagggttggtttagttctgtggatgtgggttctttgggtgcagtggggtctgctcgacctccagctacttccacgtgaatatttagcaggacaatcatcctgggaggagttatctccgggacacgattattaaatggcgttttcagggctgccgttctctgtttaactctatctctcttgcacaaacacgtgacaaaaatctaacttggctgatcctcaagaaacgtctctgtcatgtggaggacctagctacatcactagtaagagtttagagatttgagtgctccacgggaacttggaaaaaacgaaccgttcttccttgactaaactgcaggaaaatgtagtttgttctccgccgtagggacacgcctatctacaagttcccacggggtttattttcacgaaccagggaatgcaagtctgtgcagtgaaagttgcctccgtgcgacagcaacggccgtgtgtaattctctggaaattcgctcttttgagagtataaaaccgccgtccttcagactccagtcccctcaaagtgtgtgcagggaaaggggtgaatgcacccaaggcgccggccgtaaccgaggcgcctctccaaaatgcccacttgaacagcgcgtttccagccgctaaaccacaagttaagtgagctttttcactgttggagtcatggattgccgccctgaggtcttgtgcttgttcactgcggccgcttccagcgtccaacattgcacactcccgattttacgcgccacccgtcgggtcctacgtggaatcggttgtccgacaggcgagcgtttttctggaccgcgtagccttggaaatgcgccatcgaaggatcgacgcaagtctcacacgtttcaagttcttctcgattgtttcaggaggcgaccaaagtcatcgaaaggagtcgactcgagatatacttgtcactcccatttgagcggctcccgagtgcccgcaagcgtcgtgcgctcctgtccctcctgttcaaccgcttcacgacgaatcagttcgctaacgaaaagtttattgactggcttttatctgtgatacaagtgtccttcgagtcgtcgattgacctgcaactcttctgacgtagcgccgcaactcacaaccgaaagccgcttctcctgactctgtcgccaactcgcagtcgcggctggcgcaa

SEQ ID NO: 3275 - DNA, 2591 bp, Toxoplasma gondii
  source 1..2591: mol_type = genomic DNA
gcctttctttttcgcgattctggcgggtgtacgcacacttgaatgtggagctttccgttttctcttcgcagttcttctcttcgatgctctagatgtgtcttctgtctttctccaggcgaagctgctgccgacgctcctggatccgagacgcacagagttatggagttggaggcgtcgaagttgctgaatgtgttcgcggagagaaatcaaaaaaaataaggactcaaagttgcagtgaaatcatcgaaaccgactggcgttgggagagaggggaaatgtgtcgcactcaaggactgaaagggtgcctttctctgtttcgatcgatggccgattcacgcatatatatacgggcacggttttcttgatgtggtggatttcttcctactggtgtacgcagcagtcgccttcttctggcaggggtctttcttcccagtcttttcgtctcctcttgttcaggtctctcccgctttgaaagttttcctttttctcaggccgttccattaatacatgtggtgtgtcagatttataataactacaaagtcgctgtggttactctcctgaagattgctttccttacatcgcatgcagacggacggctctagagtccgttcacttgcaggcaactcgccgaactcgatacttgccaccaggcgatcgattccctctagtagaaatgcccctccccttgatcctccaatctgatcagcggtctatgatggattttcctctgtcacaatgcaaccgtagtttacgcgttgctttattgggtgaaaaagagatgacagcctacgcagatctaaacgccttccgatcgcggtcgcagaaaaagtatgtccccgcatcttaggcggattcacctttcgctgattcatttgtcaacacaggagaaacgccctcaagaagagcacccagcggcttcgtgtaggcgagcgaatagactcacgtttcgcgagtagatatggagaaactaaaaaaccactttgccagccaaaggaactgtgatagggtggagtgctgcgcattgcgatgcacacaccccatgtccttcgcccctccatgcgtacacggcggccaacggttttcgttcctacgggaattccatcctacaactgtgcttcgctaaaagaatcgagccttttctcgtggtgtatctttgagttgattcgatgacccgcgaaatgctgcatcgccgcagaacgagatcgtagcagcgactaagcagttgtgtcccgtagcttcctccgtaaagagacctcgtgctacctttttcttgtgcagacagaacgggaatggcggtaattctagattgcgacctctgtaactggcatgttcagtgcttctcttgggactcgaacagtcccagaaggcatcagccagcaagagatttctcgcggcaagtctctgaaacagtcggcgggttggagtccctggacagcgagtccgcgtcttcagtgtgtggcgccgagtagctgtccgagactgacgcaacgtttaccttgcaagatgcaggttaagagggcaacggtaagggcgttccgcgggtgcatgtggcacccgaaatacggggattcaggcagcggttgaaaaccagctgaaagtagcagaatcgacgcccacgcctggcggagattcctggacgcgaaaactggacgtcagcgccgctggtctcggcctgtcccgacaaggagcagcggtagaacggttcccggaagaagaacctccaattagagagacgcaaagatgaagtccgctcacaaactcccccctctttcttcgtcgaggaaaaatgacgtttcagaagtagtctgccgaagcaggttctcggtgtaggcagaacccgcgtgtgcagtctgccccggtgagttccgaagtcctgcaagtctgtggctgtagtaaatcgccggtgccttccggttttttctgtcggatatgtgcgttgagattcgcagaatcttgcgcgtagcctccgaaagtgaaaggccccccgctttctcgaggaaattggggctttccctacaggaaatcatagacacggcgtcgcgcagctggctgttggagtatcagccaccggtcccgccctaggacgagctatggcgggtcgcgagcgttcgcttctccctggactcggcatgtgcctgccaacaggcgttttttccacgcggtcgagaggtttgttggccctgagaaggggggtttactcgtagctgcactcggatcgtggagagttcgtgcgaaggaccagattttatgccttgcggcagcgtacacccgcgtcccgtttagtctcttctttctcatctccgcgggcgagttccagagtgaccttcgccaacgtggaggaccacggccaccgttccgccgcgaattccgcttttccgtgcaggtcaaaacgcggtgtcgaaccccaagttgcgggtgtccgtgtctccggctggagtttgtgctttccgctggtgcctcgtgtgaggtccgcccgctggaatgctacaaaggccccaaccgtgtgtctctatacccccgcagcagcgtgaggtcgcgtgtgtatacaagttcgtcaacctggagctggtccgatagcagatatacatgta

SEQ ID NO: 3276 - DNA, 2185 bp, Toxoplasma gondii
  source 1..2185: mol_type = genomic DNA
cgctagcgttctggttagatatcgctcttttctgaatcacacgcgactcctcgccgtcggtaggaactaacagtggcggatttttcctgttccgttctggacgaccaaagacgtaagtgttgccgagcgacccggtttcaccttcttctgttcagctcggtttatctcagttgagctcatgctggctttggctgaagcacgagacttcgtgaacttcctgcagatcacaatgcacaaaatgaaacatatgataaggcccatgcatatatacacacgtacattgatgtacataatatacatgtgcatgagatacggatagatatgcttgcgtatacacaaataaacacaagtcttcgggtgccgacaggcctccgaaagacggtgcctagagtcgggaaggtcatctgttctgtttctaaagcgattcttcgaggtggatgtaaagtctgtacctcggattgtgtgcccccccctgttgaacctctcgcccatttgagaaaatacgtgataactgcaagtaaagaacattctgctttgccttcttctgcgtaccgactagtctctccatctcacatgcatgatcgcttctcgttctgcgtgtctgttagactccttttcgttgtgtcttgcaacatcttctctgccagactccctctctcattctgataacacctctttgcttctctctctgttgttctttctccttttcttctctctctcgagcttcgtcgaacctctctcttgttcttctcctttctctcgttttcgctctttccttcgttcgcttgatccctgcgttctcgggagtgaatccgaataacaagcgttgcatcggtctcctcgctgcggcaagtaaaccgcccggaagcggaagccagttcctcgcgtacttcttccgcgagttccttttggactttgtcttcgagtccccctgccccgtcctcctcacagggtcttcttctccccggtgcctctctcttctctctccgttgaggcgattttttcgacctcgtgtgtggcgactttgcacagctttctatgtccgacagcacagatcgactgggttttctgttttgccgaaatctgaccaactctttctgaggtcacaccttgtcgttgaaaggccttctttcctcgctcggcgccggccaaagacgacttaaagcttctcccgcaacgagagaaagagaagacactctgcccagtccttccgtgtcgactagcttgagcggccgttctttgcagaatttgagagacgtcacgcgcctcgcagtctgcgtccacggcttgtgttttcttttcttttccccctttttttctcttttttctccttttgtcagccgagtgtcgccgctgtttttaaaaaggaactccgcgcgcatgaccgtggaaggccctgcagcttcgctcgcgctcgagtgtcgtgcgacatggccgtctactttctcggtatacgtttctgaaaatcatgctcatctttctcctcttgagtttttaaattccacggttccacttcctctccgcctttttgctgggcatcttctcgtcgaatttcggcgttgacgcccgtgtgcgtgacaccagccatctgttgaggcgagattgcacgtttttcgctgtctctcgtcgtttctctttttcttctgagcctcgaaaaacgcctctcttcttctgccggaagccatccttcgtggttggcaaatcgcggtttttcgagaccgcgttgcgagttttttgcctccaccttttgtgtctttcctctcgtccctggcgtctcagaggagacccggttggttcgcttctcacaggctttgggtgactgttgcagcttttccgtaggatcccttctcgcttcgtctcttctctgtctccactctttcgcgagattcttctctctcgctgtccctcctcgacggcgcaggtcttctcctgtgtgtctctcgtttttcctttgctttccttctcgctgtcgtgctccacgtctgcgtgtcttctcccctcccatccacaccaaaaggctttctttcggcttcctctccgtttttgccagcctgtctgcctgcctttctctctcctttctttctctctcctttctttctctctcctttctttctcctttctttctctctcatttctttcttttctctcctttttcgcatctcgcttctttctcgcggcggcgcca

SEQ ID NO: 3277 - DNA, 2111 bp, Toxoplasma gondii
  source 1..2111: mol_type = genomic DNA
gtatttctgaggcgcttgcgacaccctgatatttaggtgtctgttttgttcccagtccgtgctactctttgcaacgtatcagggggagcctctctgttttttctgtccatcgcgataacattcgtttttgtgggatagagaagttcttgtggctttctgctgcgactgcgtagactggtcttgtgacctcgtgcagctgccttagtatttctccttgtcgctactctctcactataatccttggtaaatggctagagttcacgtcaccgtttttggagcacacccctcggaaggcggtgaggcctcagcgcctttgatgcatatcatttccgccgaagacagtacagaacggttcatcgggttactgcttagaacgtgctggtcgtcgtttctccgaaaccacgaagcgacgcccgctttctgttagcttccccgttgtgtagtcaaccctcggatgccggaaggtgactacgtcccacaatgaggccaggcgttcgatgcgcgtacagaacgcgagcctacgctgcaatcacgtgtaggcggtgacgacagggaattcgctggcttactgctctcggaagcatcggtctgacacaaaaggactcacgcgtcggaaggacctttctgttcaaccaaacgaagcacagccttgggaagtcacgaacagacaggaaagcatccgtgtgtggacgagattggtcatgctgctgtgttggggcctcttgaaagtaacgtttgtaaatttcacgcttctcgcaaacaaagggacgagatgagaggcccaaaacgttgcgtcttcttgcaccgaggaggtttcttgacaatctctggtcgctcggaggactaaggcaatgcagaacctgtggaaggtagtccgtaaagcgcagtgaagagtggaacggagaagttggtgctgaagacaaataccacgatgagtcaacacgtggtgaagccacacaagacacatcggcttttatatccggtctcggaagacggcttcacgatcgattcataaaaaggaagtaaggaaaagcacatttctgccatccaggacacctcgcatgtgggcccttggacgtaggtagatctccctctctcacagaaatgaggaagccatcgctgtcttttggtttttcttggaaagacagtgttgaatgaggaaaccagagagtgtcaactatctgcgactggtcgcgctgacacctttatttctgtcccaactttcagttgcatcctcagttctctaatgcgcttcggtttgttgcgtctgtagagtctccccttctacaacgaagacgcacaacaggttttctattcctccataggcgaaacaatttattaaacttattatcagtctctctcggaaagtgcttgtagccagcaagaaaaccaacagcagccccatcaagaggtacctgccagccccaggaggtgcggggcgccattacgttgaagctttccttggtctaaaagtcgcgaagtgtgcagaagttcacaagaaagcggtatcttctttttcgtctttgtctatcgcaatactcgacccacacgtccaggtaccgtacagtatgagtcaaaccgacagctactgacatttcgaccgaaaacgtggatccttcagcttcaaacgtttcttgcagtacctgagagacggagatattgcttccaaccactatttttcaagaactcagaagcggaggtaccagcaccatctccagaattgccgggttctcgcgtagttggccaaagtgtgccatataacggacacgggtgtgcttccaaacggttaaaatcagattgctgagctgttcaaggttttcgacattttccagacaggcggataccccatggaaacgtgttacctgccagaggctgtcccttgttttgagctattagcagcactgcttgcattagtctgtggaaatatcctgaatgcctctagaacacaacggaaccggtcttcggctgcgtttgcacagctgttcgcagacgatcgcttgcaccagtttcccagactctctgttgccttcatatcatgtttttcactttatttggctacacatcgacatttagaaaggtctttcgttgatcatccccttttggaacagaca

SEQ ID NO: 3278 - DNA, 2609 bp, Toxoplasma gondii
  source 1..2609: mol_type = genomic DNA
ccgcacctgcagccattgtgtttccctctactttactctgtaaacagggagaccaccgggaaaacaaggactacgtcgacaccgaaagatcccggtgggctcgggccaagacgggatacatgcacacgactcggataccgagaaaagaagcggggaagaaaacagaagaaaggacagaaccgtcagatgagaacgcagtgcactgtcttccacacaaaaggcgcaagccgtctgtccaccgaaaagctgactctgtacaatgcctggaagacgccaagctactgggaagacaccgtcaccagtgaacaaccagggaacatccagcctcgacagaatctgacagacgaaaggcgactgcgagtcaacacgagttgagatacccagagaccaaaccggactgtacacacgactgccaccgtttctgcgcagtactcgattgctgtatcaaccacactactgccacagattcgtctccaaaagcagctgtacgaacgattccaaccgtttcttccatctggcagacataacggcgtctcttgcccgaactccaggtaactcgtggtccgcctttgcacggttagggcaggcacaaaatgcattcgaaaaacaagcgtgtcaccaccggcggatgctagagctggagaccaaagaaagcaggagagcatctgacgtccgtccctttacgacgtgtgccgtcctatcacataggaaacgaagttgtcgtccgcggccgtcctactgggtaacacgcgtccgtcttgggagcaagcagccactgtgtacattcggacacgcaccacataccatttggacatctgtcccactgtcccaatctcgcgatccaggcagctccttttgtgccctaggcaagacggccgacagatgaacatacggggaactgcgaggatgagccggcaacgaacgggacggaaacggatggctggcaccttttcacgctaagaaggaaatcatgacaaccaattgacacgcagaatagaaaatcagttggtaacgcaccgggctaaaggtgccccatgggtctactggaacgccagttttctgttgtgaatgcgcggaggcgtcttgcgcactttcaacggtatagacacttgatggcaagattccgttttcacacgctcgtctgtattcgaccgcacaacagggggtgccacttttcccttcgcacctgaatgcaaacgaaaaactgcaaccggaacaatatcggagatactgtgcgggaacacgccattacttttagacgatgtaagcgattcaaaaaacccttgcttttcggcctgactacggggtcgccatcagagaagccggctgcaacacgacagagaagcgtcctgcctaatatgcctgattaaatcgataaggcgccacccagctcgccccaattaaacactgcagcccagaatgggcaaactgatcctcaggaaaacccacatcagtttcgctccgcctttttttccctccggtacggccaacgacgcgtagtgctccgcgcagaagctttcagaacgccagctaccccaccagggacgcacactgactattccgaaaacgtcatgcgcgctcgccatggcagccgtagagcctggaaaacgttgtacagtgatttcatctgtccgccacagagcgtcggccgtccctaggttcggcgttttgaccgactatagggcgatgtgaagcggtatataaagcgaccttgttctgagccgttctcaatctttcttccgtactgtgctggcgagcctcggaacaaggtacccgtcgctgtaagtctcgaacacgtcctgctgcatttgcgccaagttactggtttgatagagaaatctttaactagagaggacggtgggaggtgggtagtcaaccgcaccatgcaaacttaggtttgtggctttcccgtgcgtgtctcgtatgctcgctccgcccctttatctgctgttccgttgcagcagcagcgctgcaaatgtatgctctttatccaggggaaacacgccgttctgcctccccttccgagttttacgatggtttgagcgcgaggaatgcagggataccggaggaagcgacgagacgtaatttgttcctctggttcgtcgggctcgttttccttgtgcatgttcttgcaacaagacagtccagaagcggtgccacttttcgtcgctgactgttcgttcagcggctcccaccttaagttgcgagagcggtttcagtcgcctttcctcggagctttttaggaccctagctacggtgtgcgcgtggtcgatatctagtacattggtggtcgttttgtgtagcaatctgtgcaccccaagttggcttgcatgcggcacacctgtttttctccgctttttcctgcatcgcgtcacgctccatccacatatctgtctgtgtctttcgttctaccctcgggtttttgctgcctgccgcctcctgttcttcacactatctcgagccatttcctccggatatctccacctttcttcaccatccaccgccagttgccctaccatcgtgtggcgctcgccccctgttccgtccgcctttctgcctcatttctctcgggcccccatgacaacgtgttctcccacggccttctccta

SEQ ID NO: 3279 - DNA, 2041 bp, Toxoplasma gondii
  source 1..2041: mol_type = genomic DNA
atcatttttgtgacgagctgttcgacgtcttgggcctggagcgcagctctggcgttgccggggtcgcatttgtctcctccgttcctcttgtctccagcgctgccgccactgaagaggagcagcgcgggcgacctgaagtctctggagtcgtttctcgccttgagaccggcggcttttcgtacgtccttcatcagcgagaacttcgacacttggaaggtgagtgtcgggccgctcggcagctgcgcaactttcaggtagacgccggcctcggtttgagagacagcctgcagatgtgtgacgccgaggagcgaggaaacggcgacaaagtccttgagtttgttgctgcgcttctcgcgaagacgcgagctgcagtatggcgacatcagcatgcgcaggtcttggacgaggagcctcgcggcaggcgtcaagcgcccccgcttcaccacgaaggagcacggtgccgagggagaagaagacggctggcgagcgtcgctctcttcctcccctgcggcgccgcgcgctgcgcgccgcgaggacttcccaggccgacggcgtcgccccatgccgcgaagaaagagacaaaaggacgcgagaagacaagaaacacgaagagaagaacccaaaagcaagagcagtgaagaagacaagatatcgaagacaaaaatacgaaggctggagggaagagagaagagaatgaaggaggaaacgacaagacggggaaatatatatatatatatagagagagagagtcttttcttcttgcttgagtcttgaaggccgcgctgacagttgagatgaagagcaacgatgggcaaaaaagggagttgctgtggcgcgtcttgggccagtgcttggaagacaagagcgggaagtgcgacgaaggaggtaagaaaataaacgaacgagaaagaagaagagagacttctggacagattgcggagcaatcggagagttgcggtgcccgaccaagcgcgggagaggggcgaggaaagggggttttgaaggcctcgaccagctgaaccgacactcgcgcagaattgcagagaaaaagaaaacggtcagttccgtttgaattctctctcgagaaaagtcaatgtgaaacactcgaccctcgagcggggattctgtggggcagaggttcgcaaaccgaaccggagaggaggcattttggggaacctacgccctgggtcctacagtaggagccctccacccccaggctgtcgaagaggggcacaacgaattcagagtgaccaagaaaggaagagaagttcgaaaggttcccgcacaccgtcttggcttctccagtgagatgtgacttacactcgacgctgtcgtctgttcgcggctaggttcgcgaaaaaacgcgcggttgcatgcggaagccgccgaggtcaaagccccaagcgggcagacacacgaaacaagtcgcttcaagcgctgaaacgtggttttgtttcagtctttaaagtgtcattcgacgcgtttgattcgaaagagacggggggcgccaagcttctcctactgcctctccggtttccccagtgccgcgcgccgcgatgtgtgccggaggggcagcaggcggacggcgccagccgaacggagagacacaacgaaagcgtgactttttcctttgaaccgtcattcgcatctctgccagtcttggccgagggttcctcttcttcttactccttcgttctgcgtctttgcggctgagttctcgattctctaaatgcttcgttccagaagcaaccctcgcaatgaacgcgaatatttgggctcctcttcttgtaccttcttggccttcccactcttcatctttgatctaaggtcgagaaggactttgctcgcgtctctcgttcttctctgttttctaacatctgtgtagagccaggcatccacctgtgcatacagccacaaagctgtacgtgtctacgttgtatcgtcttgtcgaatgcacgatgaagagcggtcttccatctctttatcttctgcatcctccttttccttcgcgatttttttcttcgttgttcggtcctaagca

SEQ ID NO: 3280 - DNA, 2252 bp, Toxoplasma gondii
  source 1..2252: mol_type = genomic DNA
tgttctggtcgcagcaaagccttacaccaaactcgaacagactggaagggggagtaaaaaacgcacaagagataaagagtgagaagagagtcacaacaacgcaaatccgaaccaagaggccaaacaacgcatcgatggaagagatatcgaacctgatgatatgtcgacggaggcaacaacgccgctcaacttcgcctgatgtttgaaaagcgcttcaggcacgtcctctacacgtcgaattcgattcacctgggaaaggaaatgcaggagaagattgtacgaatgggtctgggaactgttgaggacgctgtacaccggcggagatatgcagaacgtgacaagcgaaatgtatatacgcgcggacacacacacgcagaagcagaggcaaatgtccggaggggtcgatgatccgtcttgtgattagcacacaaagagaggacaaccctgctgtttgctcccacccgtgtttcgcgttcttctctctttctccctttccctttcggtccttctctctcccatctcttgtctacgtctgcaacgtgatctctggctttacgacgggtctagcttctccctgccgtcactttgcatggcttacagcccactcgcattggcctattgcgttatcccgcctggctccatacgtcaaaaacggggcatcgtttctcctccgtatgtgacgttttggctccttcataagcaagacaaacctcgttacattttcctactcttcctcctgcaattactccctgttcgcctcagccttactcgataatcctgtatgctgcgtttcagtacccaaagcgacagacctgctgccacgtaaagggcagaagaaatccccctcttgtggttttctatccaatctcgaatgcgtagaaagacacggccgtggtcgtcagaagggaaacatgtgtcgtcaacatcttcctcttccatgttttgcagaatttgactgtcgaagaaggatggaagacaacgagtagtggtatatagttggcacgaagcaaaacaccgtctcagaactagttcacgtcaggcgccagcgcgggacatccccgtgcatgttgatgctgtggagggagttttccaggcgagtcattttcttctccgcggaagacagacggttccagagtgatttgacgtcaaccttccgctccacacatttctgcaaagaattggcgtttttacggccggcgttcaccagtcgtggcacaaacgcacacggcaaatttgcgagacctcgttaggtctcgacaagcacagtatcgcagcgtgggtcgtgtccatgattctgtcgttctgctagctgccctgattgccagggagggagagaagcgtcccgttccttaatgatttcttgctacatagctgcacacaaaatgtcctatttcaccctttagtttcacatatacacaccaaaaatgccatatcttcggccacatcgctctgatcgctttccgcatttcctgtagagacggcgtcgatgaatcgtgcgatgccggaggcaggagggtacggcgaggcgtgccccgtcgccaaggcaactcgcatcgaggggtttgcctgctgcattcgcagaatcggaagtagagaccaattggaaacatgcgcgtgccaagctgaagcagtaggcttctgattctaagcaccttttcacgcaatgttttcacacctatgtgtaccttcagtccactttccccctcgcaagtcaagcgagagtgaggctttggcagccctgagttctctgtgctcgtgaggaacagttgtgtgggcttgcaacggctcacctcccgccgcgacaggtacacatcaatacgacgactggtctttataggaaaatcaagcgaagtcagagttgaacttccatacatcacgcgcgtcaatcgtgtctggagtaaggctgtcgagacggtgaaatttttgttcagccggggaaagcaacgactcaaacgcagttcccgtaccgggccacgcggactcccagcctgtcgatgggcatgcgaatgtaacaaactcgtcattttttgcagcttcatgtcagacttacacaattccatgttattcgtggaaacgagatcatcgacgaggggcgccaagttgcttcacctgcgtgtacactatttcggatcttgagtgatttgacttgccaacctgaactcgccgagcacgcagataatactggtaaacttcgtcctcctgtacggcccaatctgtttttcctgaggagtttcgttttagagggtctacaa

SEQ ID NO: 3281 - DNA, 3810 bp, Toxoplasma gondii
  source 1..3810: mol_type = genomic DNA
agttcgagctacctattcatcaactctccagcaagtgtttgaactgtgtcctgcagcctttctatcagcttgtcgtcacagaggtcacgacctcgtaaaggatgggtgggtcgttgagcactcgtcgcgatctttggccggcctctgaacgcgtgctaaacacttaagcgatataaaacgaaggttggcttgttcggaccaaaacaagagtcggaaatgagggaagcggacatcgatagctttcagtcttcagcccctcattcgcggctaacagaaccaccatttttggtggctaccacgcaaagaacgaaaagacacgtttcctacgggtgtttagtacgatcccttctttgaagtataatgaggagcgtagtgcgtgctcttctttgtttgcgcctcaattaccggtcggtaactgagggtcttcttcggctgcgcctgaacagcctttttcggaaccggactcacagttttcttagagactgtacgtacagtcttcttcggctgatagctaacgcttttcttgggctcggagcgaatgagcttctttggcgcaggctggtcaacctttttggggcgtcgaacaactttagtggtgtaggaaggctgtacggttgtctttttgctggacggagagtagctgtagccaccgtacgtgcttttgccgagttcgcggccgtcggcagcctcatctgccgactcctcgggctcttgtgcctgtaattcctcgggctcttcggcctccagttcctcgacgagctcgtcttctgtatctggttcctcaccgaggcggcggtagtagcctccgccccagtatcctttcttgccagcgtagatcggagtggccaccttcttgggagcaacgacaacttttttgggcggtggtagctttacaggaatatagccaccacgattcttcttgcccccgagttcgcgatcatcggccgattcgtcggccgtctgtgattcctcgggctcttcggcctccagttcaacgacgagctcgtcttctgtatctggttcctcaccgaggcggcggtagtagcctccgccccagtatcctttcttgccagcgtagatcggagtggccaccttcttgggagcaacgacaacttttttgggcggtggtagctttacaggaatatagccaccacgattcttcttgcccccgagttcgcgatcatcggccgattcgtcggccgtctgtgattcctcgggctcttcggcctccagttcctcgacgagctcgtcttctgtatctggttcctcaccgaggcggcggtagtagcctccgccccagtatcctttcttgccagcgtagatcggagtggccaccttcttgggagcaacgacaacttttttgggcggtggtagctttacgggaatatagccaccacgattcttcttgcccccgagttcgcgatcatcggccgattcgtcggccgtctgtgattcctcgggctcttcggcctccagttcctcgacgagctcgtcttctgtatctggttcctcaccgaggcggcggtagtagcctccgccccagtatcctttcttgccagcgtagatcggagtggccaccttcttgggagcaacgacaacttttttgggcggtggtagctttacaggaatatagccaccacgattcttcttgcccccgagttcgcgatcatcggccgattcgtcggccgtctgtgattcctctgtgtcgagttcttcgtcggagcggatggcatcagtctcgtctgtatcgatgtcttggagcttgcgtggtaggtagtcaccttttttggatgatgcgtagacaattggctgggctgctttcttcggagtgggcaaataggtcactttggttactggtgtcttcttcactggcatagcaggaatatagccacccgattttttacctccgagctctcgatcgtcagcgccatcctctacatcgtccgggccaagagaagaaacgatctgttccgctaactcactgggaggctcttgtccgtcttgagctgccgctgccacaacaagcccggacagaaaaaggggagtcaagagcttcatgatataaatgtagtactgagaattacgacacgcacacacacagaagcctccctttgagaggacagtacaatccagattccacaaattacacaactgaaagatgtgattgcttgccgtccgtatttttggatcatccttgtcccgagtgtactagcggtggtaaccgcaagcccgaacgagcatccacgactcactgcccgtaagcgaaagcagccaatccgtttgtccactgtagttcaagacaaacatcagtgaggcaagaatttggctagtgctgactcgctaccaaagccgccttcgtcaagagacgacaacttccaaaatcagttcgagttcctcagggtgtcccagtaaatttttagttgcgccccaataagagtagtagcggtgtcgggtcttttccacaaaacgtatatagccagtgaggcccgtataagaagtatagctaatggtgtctcggcggttccatgcagacgccgaagaaaatcgaatgacgcgtcatttcgatgttcaatcgaactctgccacggttgaggatttccaacggcggaaatgatcaggaaccatgatcaagaaaccagatcgcacctaaataccatcacagactgttcatttggagtcaaacccaattatgattggtggtaagcaggcgttgtagcccgaggtagaagccgacttttcgtcattgatattgcagcgatctgttagtggtaagagaccgtgtgtttccgaaacagagctttcacaaaacaagtagttctatcgagaggagcgattcccctcttcgctttgttcgccagagtatacgagttttcacgccttctgcgactccctctggggagaaaccaatgatgtcagagttctcgattgtcgtctgcggcaacacttttggttcattacgctgcccatggttgtacacgtcatttaccagctagtggagaattgacgttttgtacacttcgtatgtcttgctggatcatgttcttgcataaaacttttttcatggtcaagtatactgaaaacgcgtgcaaccatgtctttataggtacgtgaggaaaaaaacttgttccaatcactccgttgtccacgggcaaagatcacgacctatgggtaaaggtaattttgttcgaagcaaatctacctaatgtggtaaaaagccctcaacctccgacagaccggaaaacaccgacgagacactccgatcgcccacagaacacacggtttagaccagcattttcagaagctaagtgttgagctttcacgactagggaagacaacctgttacagacatgtgctttgaagatgaagacagttcgaatggacgtaacctctgatgaaaataggcatgtgccgaccctaaaaaaccctcttcctgccttgcagtcaataacgtccctacaacaagtgtgggccgccacacgaaaatatcgccatatggactgatcaggtgtgaattttcccgaaacgcgcaagcctgaagcctcgatagctgtcttggcggctcttgtacacagcaggcatcctggatcagtgcgaaagggtaataagccaccatgacctaggcatggttccttcccgaagcttcttgggcaagctgcacgtcggacgagcgtagtcggcgtagtgtcactacacctcagaagggtcaccaccgacgctacgtcacacactgtcagtttgacttgtcattcattttttttcggtctctcagaagcaaaggcttgacaacatcgcaatacgcaaacggcacga

SEQ ID NO: 3282 - DNA, 1761 bp, Toxoplasma gondii
  source 1..1761: mol_type = genomic DNA
gtcgcagattttagctcgcaaggtaacaatcgagaaccacgaggaagttgcggatgcaatcggtttcttttccggtggttgtctgctgccccaatattgtcgctctctcacgtttcacgttatttcaagtcgtcttcatgttaggagactctgaaccttcatcacgctagaaggtgcagcatcgagatgtttcactaaacgtgctgcaggcaggagactgcatttgatgtttacgacttcggttcattctgttctgatttttcaacgctgtcggaaaaactttctcactcaacccctactgcacttttttagctgttacagttgatcctctactgcagaaatcagtgttaagttttatgatcttcacgagccaccagctacgcgccctcttaacctttttcccaacggccccctaacgcaaattgtcttgctgtgtaacttcaagaattttcaaaagccggctccatgcctttcataatggctttctacgctgtatttcctccaggctccgccactcgcccgtcctgatgctctattcgctggaagagttcagcctcaatttcactccttctttcgcgcgaaaaagacaaagctgtatggactaaggacgttaggtgttgcttgttgagggtgaagccgctctctttcaaactttgcgtggttttctgatacaggcaacttgacccgcacctctacactgagtggtactcggaatcagttggtggcgttagttctcgaaagacggcttccatcccccaacacacactggtacaaagaattgcatatgtgctcattacgaaactggcattactaaacacagccatcggtaaactccacgctcgtgtggaacagcgaaaaggcgcttttgagagccgtggaactcccagggccgccgtagatgacgcgaagccgtggatcgccgtctcgatctgtttgtgtctttgtgtctttcttcacaacgcaaatggaaacatccaaaaaagcaacctgtcttcatcgctgcttgcggccgcctttgttttggaacctctgctttcttgcatgtgtgaagcctgtctcgaggtgcggaactacattccaaccaaggctgctggcttttgggacaagagtcgctctttcttgtgtgccggataccgcagaattggacgagacgcgtagaagtgacggataaaaaaggactctgtgtttctcaaaaatcccaggtttttcggcgtaaactgcggtgcatgcgcgagtgtcgcgaggcgcctctctctcggcacgaagacaagccgttcgcctctccctctctgagctcgtttttcgcttcttttctcccggaggctcgcatcaaagacgtttccagtgtttgtctttcgtaccctcgtgcgttcccgtggttttccttggacgcggaactccattttgtcgtctttcccgttcgcggaatccagcctcttcgggaccgcgctacttttcgtcgtctgcgcgtgcaaggaagtcgacaacgcatccgccgttctagcctttcttcagcgtcgtctctcgcgtttttcatctggcgagagccgttctgcccggttctcagcaaagccttcgcgacacacagactccaggtcggcggcgactgtcgctttctctttgggttttctctccagtttccgcgcgcgctgaaactcggaaactccgggactctcttccactgaaaacaccaaaccgcaaacctctcaggcggaacatctgtcctctctctcttcggttctgcttcttccgtcacgatca

SEQ ID NO: 3283 - DNA, 4487 bp, Toxoplasma gondii
  source 1..4487: mol_type = genomic DNA
cgagctatgtctttagcactgagaggcttgtagcggaaaggcattgttgggtttggcatcagacctagcgacgatttcatcagcagcagcaggccatttctctcttctacttggctgcagagatcggcgtggctttccggatgaacgcggcactgagaacactcggaaagagtgtaacatgtgttcggatcgttcgctggccgcggcgtgaagaagcccgccttacagcccgcataggcacacgctcgtggaagggagttctttccagaagtcgcctgccctgcctccaggaaggcgaaatcccgggaaggagagaattcgcaaggcgacgaagaagaagaggcacccgaggaaggagattcctcagcggcagggacagattcagtcgacaaactgagaggtggagtcagtccggacgacagaggagagtcagccgaagatgagggcagagcagacaaagacggagacgacatagaagaaaacgagatggaagaaccttttgaaggaaaaagagagaggcggctcaaagagtcgtgcagcgacaggtggcctggctgccttgataaatggaaggcccgtgatagaagaaatgagactggggcagacctgccgttcgagaattcagtagacgagggatcaggctgaatgtcgtggtgcatattcagctcgtgagcagcactggactgctgagactcgtgcgataggagtgccacaccactgtcatcaggagcgacgtccttgaaggcatctcccgtcttcagtgaaaagccgctgcctctgccactttttcccaatcctccgagggtgtttcgtggttcgtacaagtcaatttgcgcctcctttgtcagagctgcattcactggttggcgagcgtctactggagcagcgagtgaccagctgctaagacaggtaggatttgctttgttgtggtgagcggagtccgagacataaacgatttctctgaaggagagggcggaaaagagccagagatgcacgatacaaagcgccatacagaggaagggtcgtctggagtttctaaaggaacatttgagactgaaacagggggaccacgaagcccggcggttcgcatcgagaaaacaaacggcaggagaaaaagcaaggcaagaaggattaacggagagcctggaagaagctgaagactgagatggagagatggaactgggaacagtcggcaacgagtgacaaagaagccgtgactgtggggtggttaagtccactggcttccagcgagcacaaggttgtgactgtagtttcccgtttgaacgagtcggcttttttctggaggggcacggcccctgtaaccccagaagtggggaaggaaggcaaagagacaccatagtcccgccgaaactaaagagaaaaagtcaggaagaaccgtctctccacgaaaaacggcgcatagggactagtatccatgttgttcatttccgaatgcatcgcatgaagacacgctagcttactcaaactgcgtttgacaagacaaacctcgatcactggaaaagacacagcttgggtggccggtaaaaaacagcaaggtaaaactgcctgcatgcaggcaaaaaaagaaattgcaaaaggacttggagcttactgtccaatcaaacgctctgtaaagccacgttcgcaggcttcggcgatgacctcttcatcgctcaccgaaccccgttgccgctgaaaaaatcctggcaacaccaaccccaacgcggctaggcagcagaggatatgattttcatcctgtcggaaagcttgcttgctaataggcctatccgtagggtgaagttactttgagagtgaaagaaatacaaaggataaagacagtaaaaatggtcattcagcattaaatggctttctgtgtcttccacagtctgcgagtagcagcaacgtggtgggtcttcagtgaaacacgggcgcatcttttcaccctagcgccatgtgttacagtttagcaaacgttacggtttcgtcaagaaagaaacccgtttggatgatgccatccagcaccagctctgggaccttgtttgaatagggtcatgtcgcctcggatcgagacgaaagtgttgctgctatgacgtgtcagccacagttgcttctgttgtgtgccagcaagtgtgaagatgccggaaacaaggagaggtgtaacgatgagggaggagtgcttgtctattgatgctttgaagccgtcgttgcacgtataatgtgggaagttctctgtgccgtgcacactcggggagtgaagtcgggttagcgggattacgcaagaggaaaagtatgtgtcttgctatgcttatcatcgtcgctgtctctgaacacaactggtgtagagaatcctagtttcgcttcgacggagtgcattcgagctgcgggaacgcaaacgtctctgtgggggttacaacccgactgactgatgctgcgttatttgggtgtgagagttgcatcaaaccaaaaagccggtgcgctccatagtgtgaagcaagaggcaggagcgttgcagactttcgcgacaggcaagtacgtcggaggagcacattgcaaggtgaattcattaacacgactacggagactccagagccagtgagtggaactgttttttgtggcactttgtcatatctgttcggtaatcttgctggatgtgaaactgcgtgtccgtgtgacagagcagcgatcgcaatcataaggttccgcaatcaagcgcagatgtgacttcacttctcgcgaggtcatgctcgagaagaaagtttcatgcagtgaaggtggttcattcccagtactttattctgtggggagcgacagaaggcacctgccaaccgtttcacttgccacctccgtggcacgtggccatcctagcacttctggcgtcacattcgttatcgacatcgctaatggttaccaactgccaggacagctatggtagacaacagaaacagaaattccgtaactgtttcagctgttgtgagtgaaagtaccagctccaccaaacaatagtgctcctggacagttatcaaccagcccgcagatttctatttgaccgtgaataacaccggaagaaggctgtataaaccgcacgtcgattcagacacgaaaagtcgaaaggaaattgctttacggaaagcctatgcttccctccgctacagcgttttctaatctcaaacggctttctttaaagtgaaaacgaagtcacatttggagaactgaagggctcatagtcctgtgggatgcatcgaaaaagtagcaaacgtatgagcagcactgacttgtgactaacctgtatgtaatacgcagtggcacttctacagtaattcgacttgcggtcgcgtatgtggccatgatggcccactttgctgtgactccacggcgaagttgtataggattaactccttgtctgatgggagcgcaaaggttttatcttattgttggcagtgagctcgaagatccagaatggtgaggacatcacagctttgtgagagagacgttcatacggctgcatgtggtcaacaacgatgttgggggcaccagtaacagaccgacggctgctgtatcctcgcttctctataatccgcatcatctggtacatgctataatctcgtcaaatggtttgtgcagactgatactctctgactttcgtagttgtgtcgaacgttacataagaagacttcacgctcgagcaacttccttagcattcatgagcgcgagtagtgaaccgaactgcagacaagcacaagttgcagcagatgctgcaatgcacacagtgaacgtccgagcacagctgttactaggacaagtcattttatacaccgacaacaccgaagaatcgacgcccaacttggcggcaacatctgtcgcgattgcctcagagacaggaagcggctagcaggctgtcaacgacgttcagatggcttggctagctgagaggaacacaggaaacctatgtgaaaatacgcagacatgacatgactccatggtaactgggtagcagaccaccgcagatcgtctgtttactcgggcgttactttgagcacactgtctcggccacttccaaaggcaacaaggaagagctccaccttccgcgtcactcttcatgcgagggtgcaggtagccggtgatcaacaatacgcgacggtagctgaatgatactagaaaggatgacactggaattcatgttacatttctttgtcgaactcaaaaatgatacacgaggcgaagttagagtgttgtggaagtatcaatgacagccaatctctttgtttctcaaatttagccaaagaacgacggagtctctcgatgatcgagggttacgatattcctactttgagacgctgtcccgtcttcatgctgtacaggccccagttatgcgcaaattcgcttcttcaaacatatggtccgcgatcttcttctgtttggcggtccggtgttattgcttgttggaacttacatatgaataaacgattgatcaacacttcggaaacgaa

SEQ ID NO: 3284 - DNA, 3924 bp, Toxoplasma gondii
  source 1..3924: mol_type = genomic DNA
ctgcagaaacagacaggaggaacaagaccgcaatgaaacacgattctctgaaagagacaaggaagaatcctggtcacacaaacgagcagcaggttagaagtgagacagcagggcgagtgagagggcgcggcagagacaggcgagtgttcgaagtaagcaagagaaagcgagaaatctgcagagaaagtccttcagaacgagttcagccgcgccgccgcttttctcaggaaaatcggcaacttacaaggagcgaaaggactttcttaacgcactgtcgttccacccgcaaaacgctccgatcaacaccatttccacgaacacagtcctgcgatacgaagccacttctctgcacatatatatgtgtatatataaatatattcgtataactaaatgcatatgcaaatacatatgcgaatatacccaagagtatgtagatccacagagaggcagagagagatgcgtgacatagagctcctgaaggcggcgacgagtgtgcaagaatggagctgctaggaaacaggaggtcgctttcgctttgggaggaaacgagttccgaaccaccggttctgattcttaagttgaagttccccttggtgaaagcgtggacgggatcgcccagcactcggatactaagagtgacaatcgcgcgcgcaaacccgtgaccttgcactttttcgtcatttctgagtgtgagaaccacgggaggttcctcaggaagatccagacacgcaagaaagcaggtaacaaagaagtgccatggcatttcttcagcgtcaggaaacgaagaaaccctctgcacccagtgaacgccaaaggttcccatcgcctgctactggcagatccaacggaatctacgagaaacacctccttgaacgcaaatctttctcggcgttttccactccagtcacgtaaggaaacaagccactcttcagcgaggtaaaaggtcgagagagacgagagggaaaaattgaggacggtatgctgtcgattgagactgcaggggtgacggaaccggtacgacggcacgcgagaacgcgaactgcaagtttctcccgttcggatccctcgttttcgtcacagaatttctgttcttaccaagaggaagtcagagagagaagccggcgtgtcagatttcatttgcctcttcgattcccggggacggcagagtcgcctgtggtcccgggagagacgagaaggacatttctgccgaattttcccccgcaatttctccacgagtccgtcccgataacccccgacgaagaaaaagaaaaatcgcgagctagagttcgggaaatctccgacacacaccgcagtccgcgatgccgaggccaggagaggccgagctgtccagaaacgcgggataaaaagtgctgcgagtccgagggtacgcgaccgattagggtttcaggggtgccgctcgcaactctcgatttctggatgcccgtcgttttcgggaaacgtgagagaaatagtggaaagcagacacattctttgactcaacaccgtcgcggcacttccctttacaccacagagatactggaaatcctcgcaggacttgcagggctcttcggagagacgttgagggaaatcgcaggtcgagagggtgtctctgagagggcggaaaaaaagggaaagtttgtgcaaacaaacgccaagggctcagcagctttattctcggagacaaaaggtaaagtctgggtgaaacataacagaaagtagctgagagacgcagctgctcgctcctacgttcgctaagagagcgcctgctctgtggaactccatccttcggttgaatttattagagagcttttctcggctgctgttggaggcgacttaaaaaagaacacaagaaaaggtgcagagaacaggaaaagaaaactgaaagaaccccaatcactccaccgtgcgtgtctgccgtgccatcgtggccgcctgccacattggcaacctgagagactccgccgagctgggtactacgtggaagagctgcctacagatatccctagaatctccactgaagtggggttaatctatttgactgtttgtgaaaactcggttcatatcacgaaacgctcagaaaagcaggggaaaagtcgaaaagtccaagtggaactacgcgcgcaccagttcgtcttctttactgcctcgtgagaagaggaagaaccgcataggggacgcatagcggagttttctcgccggaacagggcgtatctgcattcggatttctcgacattctgtttctggcacatatgtcaacgtccacagaggggagacttctgtagaacagctttcctctcggagttcagagacaacaaacgctcctagatcgaagaaatctggaagactgcgaggcctgcagagtgagtgttcagagcacacaagactccccctcgacgcacgtgaaagagacggttcttagatcgtcttttcgcttcttagacgaaataagatctgggaaacagtaggccgcaaggctggggcccactggaactccgtttagagaaagtgacctcaaatctagtatagcgcactgcccgcgtcgtcgaagagtctgaagaacctcccgttctactgacgtggaggcgtatagcaaattgcttcttgttgaagctttgcctgcagaacaagactcaccaacgacagaaacgaacaacgagcgagagagtgtcaattcccgtagtctagtggtcgcaggctgtgaaacccagcacggagacacaccctgaagcttcgcttgaggtgactctcatgcgatctgaaagacaagcggacgcgaggtttcgcgataggaaaagatctttctccgagatcaaaatggtgctgaatcaatcgaagaaggcgaagatttctcgctatcaagggatcaacagccgaacaaaagagttcagacactctccggtgccctggagccggggtccgcgccgcgaccctgccgccctcgttttcgcacatgcaaaggcatctcgtggtttttttctacccgcagtgtattgaaggatgcccttcgagtttctacccatgaaacgcgagagaaagaacagttgtttctctgtgttttccaggccgaggagaaaagcaaatttcgtctcttctccttccgtgatgtcaccacaatcgtcggcagtcttacctggatgtctgcacgtccaggttcgcactttattcttccctttaccgttttctctgtttgttttcccgagtttcgggttggttttgtgacgtcctttttccagcttcactcccccttcgtttccttcagcattctcccctcaatcgcacagaaaaggggggatgactcaacacgaagggggaaggttttcacctgttgctgcccattgttcctggaaatatcgggaaaagtctgtcggttcgccgtcatccgactctctttctttcctcctgttttttcctctactttatcttttctctttcccccgcctcttttgcctttctacctcacccacgtctacgggtctcgctcgtttccccacgttttgactttctttgtttctatttcaacttatctttcccggtctaaattcggggttcggaagtcattatcctggacacgaagtctcccctgttctagtgccatcaagttttgcgctgacaactggaagtctttttctgtcgcgggaagtttcgtctgttgccaaggtccaaagcttcatcgatgcctcagcacaacacatttccttacggaagcctccggataaactgtttacgaaagcgagcaactgcatgaaaatccccatatacacacatatacatatatatatatatatgcatggattcggcgcatgtcattcgtatgtgattgtgcgtcttctgcgtttctcacaaacacctcagtctcccgatggtagtagagaccgttgtctgcgatatctcggtttcgacagaaaggttcctcctcagaagcga

SEQ ID NO: 3285 - DNA, 2289 bp, Toxoplasma gondii
  source 1..2289: mol_type = genomic DNA
tgtgtcgcttggacttttcggagttccttttgattaagtaaaggagcacctggtctgcagatttcctccttgctctgcctacacttttctaaacatggggactctaaattgttccgctgccaacagagagatcagcatggcaaacgtgtgttgtaggtgtacacagaacgcgtgcgtgtcgaggcgagcgcactgaacccgcttctcttgtctcgtgtgcctttcccgttccctgggaaggattcagtcaaaacgtgtagagaagaatacgagttttccactctttcttcacagcaccaaacctctcctcgtttccgcgtcgaggccattgaaaagtaaaagtgctttctgccgtcgaagacaacttggtcgactctcgattcgaagtgacaaaaccccagccccttctatggatcactgcatatttcgttgctttctagtttcgcttattgttcgtggcgcggaagcttttcttggaagaccgagctatacatttcactttaaaacatatctatcacgcttataccctcttaaatttcaaacaacccgactgccctcgcatagcggatgcggatgttttcaaatctggcggtacctgtcgacgaaatgcaggccactcgccgtacgaggaggggagcagcgctattctgcacaaacgcaaacaagttattcgccacaatggttacaaaaacgttttagatgctcaggctacttctctaaggaaacgcagagtgcgtaccatgcttttgctagaacaaaagacgattttctgtgtcctggctgtccaggaacacttcctgcaacaacggagttcatctggctttcgtactttgttcctgcatgatcccctgactatcacccattgagaagcaattttcccgaatcttttctcaggttcgatggcatgtttaattgatcctgtgtgctttggtttaacatgatctccacgcgaaaggctaacaaacggatggtgtcggattccaggtcgaggaacgtaacttgcgtgtctatcgaactgcccactccagtgaaccaagtgccgttcctcacaaaatgccttacttcttctacaagtgaactgccagtgtaaccagggttgcaaaaggggaaagccaagcccagaacgcgaacactgcgcttttttcagtgggcagctgaatgacgtcagggttctcgagcaggttaaagtggaacatagatgcgaaagatggtcgagaaaattctcagcagcttcagttttgcccctttactagaagaaatgctggcggtgcttgttcagaataaaaccttggctttttacgtggaagagcactgcatgcacgggctccgttgaaggaggcacctatcgaaagcgcatcgcggtagagagtgcgattcagacgtccctggtctggctaagtattccgtgttttcccgtgggagagaagcctctcttgtttctgtgtctgcaaacttccccagggttttgtcaagaatggaaaagttcgagccctccccacctaggggggtggacctgtgctgttcctgaggaaaaactttttcttcccggcggcgtcgagttctctctgaatctttcgcaagacaaaattttaagtgtctttgcttcttgtggctcctccgtggtctctgaagaggcgagaaactccacatttgtatagacctgttttcgcccgtctcgtctcttggcgactttcgcgcggttgggtctgctttctgtggatctgtttcatgtagcagagacagtgaaaggttgttttttatcttttctgaactctttcaatttgtaatcgatgcgacagcaactgtctgcactgttccggttccgccttcctcctaccctgtcgacaggcacggttcgaagcccggccaaaccgggtttcacgggtagcgtttccccgtctgtttcactggaaactgcccttgcctctagtcagtcttgccgccgtatgttcttcgttctttgtgacgcgtttttcgacggagacgaggtcttccctccactatccggacagcaaatcttgtctcgtcttctaccctgatgttgcggagagcttcagatgcttgttgagcgacctttcttctgatttgtcccacggtgtccttgtccccattcgttttatctcttcccgttttaatcctgtcgtcttggtcctcttttttcttcggtccctgccgttctattcttcttttccccgcttcttctcttgtctcttcaattgttttctcgcttcgccgttcctcgcccggtgcgctgccgggagatcgggacgctcgagcttcagagcgtca

SEQ ID NO: 3286 - DNA, 1766 bp, Toxoplasma gondii
  source 1..1766: mol_type = genomic DNA
caactctcacttattgttttggagaagatatgacgccttgcaaaaaggaaagcgagtgcagttttcagagaccgagagggaggttcccctgccctcacatggctctcgacgtcttttctcttgtggatttctgctttctaaattcatcgttctttgagtcgtccgatcaacgcctttcttccccgtgtaatcacagcaagtctggtacacccgcgaatgttcgcgagaaccgtaaggagaggcggcgtttctgccgtcggttgaaaaactcctccattttctgcattcgttttcgacacagattgtggtgtagtgttcgatggatttgcctgccttttcaagtcagaccgcatgcgttaaccacaactgtttaaggaaatagattttttgttcccgtcgttccgaaaattaaacactcggtcgtggttaggttgcccgtcgtgtacacaaatcgaggaatgctggtcaaggatcatttcttaatgaaggagatgagattcgaattttaggaccagcaaatgtacattaagaaagtatggtgccgatactttttcaaaagatttctcgggtgaggttacactgcgtgcttggaatcgcgccacagttaacaacagatggactcaagctcgagagacagtttcctcttttaaaaacagctgctgaacaaggaagattgctaaaagaaagttgcggcatcctagacttccgaccgaacggatagaaagatcgtcggtacgcgatcgattaccatattgcgggtggaaatcgcctctggaagtattttgaactttgtgacggactgcagattttccgcctccttgaaagttttattttctgcttctttctcgaatccgaggtgatgtttccttcctcagggggcgcagagtctgcaagttacgtttcttttgtactacaccacagtgcggttccctgtgtctcttcactccgtttctgtttccttcagatcgactctgtctttcagcctcccgagacgagatatttgacgcacgaatgaatgcaagcgttgtcttgcgctagatgaactccattttatttcgcatacccagtattttttagtcgatgtctagtttcttgcatgcgcgaataatacgacgaaaaaaatgcatgcctagatgcctcccactgttgtgcgcggcgcatgcagttttgagaagcagcgcctcaccttttcagcaggaatttgcctctggagacgagacctgcaaatcgttagagaaagcggtgtccggggaagagaggcatttctatttttcgcaaactctcgaaactgtctcccaaattgctgactttcttctcccgtctcgtctggagcaaccgagagaaggcgcgactcttcgtctcctcgttgagtggaacttgagttttgcgggagtttctttcgacgactcgtttattccaaaacgacgccgtcgcctttttagtttatcttcgacttcaggtcggttttttctcgccgtttgtcgcagctcgtgtctgtttcttcgacgctttcttccccaagccttccgctggtaaaataaacctacctctcgtcacccctccacctccttgcttcccccactgttccctctcttttatcctttttttcttcttcttcctttctcctccttcgtcgtctttttctcctctttttgtttttttcaccttcggtctctcgcctttccagtccgtcgctgcagcatcgtgtcgtccggcgatatttcgcagagtttcacctttttgcgtccgtttttcgctctccgcga

SEQ ID NO: 3287 - DNA, 3544 bp, Toxoplasma gondii
  source 1..3544: mol_type = genomic DNA
attcatgctgctttggtttcgttgttcgacggcgcagtctttacatccgtgtcacgacgtcgcactcgctgaaaagcgaatcgaagaaaaagagcgagaggcgcgagagaactttcgattctagccttaaccgtccctgcacagcctctctcgcgacctctttctgtcttctcacaaagcagtttctaccctcactgcagatcgtcgacaaagtgccacccgcctcgtgatgttctcagaggatcgaagcctgctgaagaggcgttcgagtggcgtttctgtgtgtgtaggagagaagcacagtttcgtcttcacgtttccactcgttttcacagttccactccgtcccttcttgtgacgttttcttcaagagcgaccaggagaacacttgcgccgctgaagcggaggttcacactctcgcatctcagtgacagccgtgctgtgcaaaccagtcgacagcgacatcctcaagatggagtcgtggaaagagacttgacgaagaagacgtactcccgctcgaccgcaaatacacattttcagtcctctctctgtgcggtttcctctcggtacaagctttcgtcagagagacgcgtgcagcttacaaatgatcgtgtgtcagggacaacagcgggtacactctagatagaagaggcaagtgtatgcaaagactcgttctactgttactgcgtcagcaacgaagttattcatgtctcttcgccggtcacaaaggtgccagctgcgtatacgtggacggtgaaacacacaccgttgaggggatttgtggtgccgagtgtggaagctggaactcctgaactgggcaaagagcctcgactgcggttcgagttatagctcggtcaactcgtggcgtctgcagaactcttagtgatgcagctaggggaactgaagaattgcacagcgctgcactgtgagttggtgccgacgctcgtacacggcagattacgcgagtggctccggcagaaaagcgtctggacaggggttgcagacagtaacgaatcgtttcactcgatcccaggacacgggagagaatgcagagcagctggagtgactctgtatttactgcgctttcgacctcgcagcagcttcgccctgctgactttcgtgaaggccaacgacggcgacaacttgtcagcgtagtgtgatggacgttaagttggacagagaccatccggattctgaggagcagcgtgcagcaaaggtcacttagtttagggcgccgaatgcagaggtcacccagattggcactcgtataagacggatctacttcaatttacatcaccacagtcaagcgaaggtaggtccacctcgatttccgcaggaaaacaaagaagagaagacgtcagttctcgtcaatcgagtgctggtctttgctgcctcctgcgtgcgtctgagtttcgaaagtcttttcgttgcgctttctggaaattccttcttccacggagattgcaggggaactatgacaagtggaaaaaacacacctcttttcgtccgcgttcttcgcctttttttgccactctcccacaaaagacaagacgccagaagtgccaggtgactgcgaggcaggcgaagcagtgaggaaaaaaggacgaggagcggcagaatcgaggaggccgagagaccgcgacaaaaacggagacacgacatacgcagaagaggcaggacagggaacagaactcctggacgataaaccggggcagaggcaaggcaggacaaagcagaccgagagggaaaacatgctcgagatgtcaacaagcgtgcaacggcgactggagagcaactgaaggtagagtccctgttacacacagtgtcaactgcgatacggcatcctcgagtcgaattctcgttttattttgccaggcattaacaacgggaaaaacaggcagagaaaatacgccgcgaggacgcacgaggaagaccagcgggcagcgagacttctcctcggcgagttgaagaaagggaggagatttgggcgcagaccaatctgcacttgtttctcatcacaacctcccgaagttgtgccggcactctcgggcccctcacgctcgcgagacgcttttgctcgtttctcccctcttcaaattgcacccttttccactctgcaccattgacttttcgcttgaacgcgtgcggaacgcaagcagaaaaagaaaacaacgtgggcgtccagattgtggtctgccatttccagtctagcagtggcgaccccgtgagtctcgtgcaaggagtctccccccgccaggacggtgcagagagagagctgcttcggattcaggaagtgtgtacgcttttcattggctgcaattttctttctttgaacaagtaaaaacgtttgtggtccacttcactggagaagagagcgcgccgacctttaggaccttctcgtcgactgcttgtccgtgacatgcgctcggttgcacgacttctctgggcctcgaggcagcagctcgccatctccgggtctgcaagaacagacaagaacacagagaaatttccgccggtgcacgttctgtcttcaattccccttttttctttcattccacttttcccggtgtctctgctcctttccatccactggatgtcctgctctcgacttcgcccgccaccagtgtgcgactgcagagtggcagatgtctcaaccttctttcagagactttgaagccttgttgcatttttgggcgctggagttcaacggaacaaagtgagagccttgaaatccgtttcaagtcatcgcctctagtggactgaagcggcggtttctttcaagctcgaaagggcagttggagtctctcccgagcgccctactcgcctcctgtgtcccctcgccgcactagccgcggtgccactacgtccagggcgctgcgcctgtcccccgtgtgtgtgcttccgcggtcgcggttgggacccgtgaggctccaaaaggtactagggaaactccccgctttttagcgtctttctcgccacagctgtctcctgcgctgctcgctgctggcgcccgatccatcgctgagttttcagccgcgctcgaaagaaaccgagcagtgttttgttccgccttcctctccgcggagcctcttgtcgagttcaggcttcgggtgcgccttcactggaaggagaacaagaagactgacgaaccacgaaggaagaaaagagagagagcgagcccagaggcaggagcacgaaggaagagagaggtgaaggagaaggagcagagcttgcggaggtgaactggaagagcagagagactggaagacaaaccagacgagcgctcgcgatagaaagcttggtggtctcacgaaagcgagagtcggaaatcgagatcgcgagacagagggagagaaagaaaaatcgccgcagagagaggcatctactttcttgcgttcttcttactgctgtacttccgaaaagtctttctcgtctttccccgtcgtttcattcctcaccttcgggggtgcctgcgctcttcataggagcaagttgaacagaggctgtcctcggcccgacgcaccctgtccactgggaatcaaga

SEQ ID NO: 3288 - DNA, 3270 bp, Toxoplasma gondii
  source 1..3270: mol_type = genomic DNA
cggagacacgctagacaagggagcggactctttatcctaagccactcttgcacatgcagccgttggaacccctcagctggccaggccgccagttgagtgccggttgggcatcagacctgtctctcctcatgcagtgtgaacagcagaaaatcgtgtttttcgatacaaaagaaagtgtgtatctggagtgcatgctgcactcgcgcacgcgtccaaattctgctctcgaggttctcgtgatgaactagtggtgaggcgttgtacgtggaactggcgatgcaagcgttgtttctgaggtaggcgtagttatgagccttttctcgggagtagactctacgaattggcctccgggtttacgtctcggcttgggtttttccgtggatggcaagcatatccgtgtcttacgttagagcttcgccgcgcgtctacgcttactcgaacatttcgtctctgctaagaaaagacacgggatagatccgactgctaagtgatcctttgccttcaatcgaacggagggtagaacaacctacaatgctgctgaaagtggcagtttctcaggtgtcagagatgattactcccaggacgatggtactgatcagactagcatctgagtagttttctctcgctgttaatacgagtgataacagtaatccatatattttgcctagaacgaaaacagtctaggattgctcatccatccgtcacgtcaccaatccactccgccagcttccagccagagtgacgaagtgtactgcgttctgtttaacaaagcgagacgaaccgagggacacaaaagaacggtatattcacagactcttcgcccacaactttgtcgagtgtttcagcctgcgtgtgcccagcggcttcgaaaaaatggatgcatccgcctccacattttgaggtgaagaagtaaggagcagtagagctcgcgagctgtagaagttgtaccagacacgaaagaaaaacgaagttcccgtctgtgggtctgcgctggtcgcgtgtcgacccgagtggccagatccgtgcagtgtcctgacagctcaagtaaggaaatggcccgaacccgctttccttcaactgggcggcgcactcggcaaaagcgactgcacctcgtagatcagcctgtcacacctgaccgcagcggacatggggaaattggaaatgcttatgacaacgggcgtgcatgcatcccgcgttatgtccacctcggccgtcggctccgtttgcccctgcacagcctcatccccagcaggctcgcgccctttcatttcggctgttccattcaacaggctgcctgtggttctggggcgcactagacacctcggtatcgccgccgcgtcgaggtacggacaagcagaaatcataaagacgaggtttgcttcctcccgaagttctgtcatcatccggcgcaagactaccttgggcgcgtggcgcgaagcagacaagcaaatgggtctgcagacagagaaaacccagaaaatcaacacgagtggccagctcgcaattaaagtgaatctcttctcgttcacgccccgagacgacacaaaagctttctgcaactcattcccacctccagagatttcctaggatagtcagactctcgctttctacacatcactccctcccactcaagcaggactcaacagctccacactgaggctgcctcactgaaagtcagtgagtgcatgcaagccacagctgtccaaaacaatgaaagagaccttccgaccccccctcctcccaacccgacagacgcgtgttcaatatgcttctgtatggagtcaacgtcttacgaatccccgaacccttcgctctccaactcacctgtagttgtccggcagatgcctccagaagggaggctgaagcacttcgatgagggtctcttcttcctcctcgtcgcggtcatccgcctcgctttctcggtcagaagcagcgccctccgtctggaccctctcctgagaagcccagccgtggcggcggtttctctcggaccgcgccgtgggagtcccgcgcagcttccccgtgggagaggacagtgccatcgtcgcaactttcttgaaaactttgaagtttcgcgggacgcgaaacgaaggggagacgcgaagcagcttgccgtccatggtgtggagaagtagctcgaagttcatgttccctggctgagctgacaacggttttcccgcgcccggctggcctttccaagcttcgcctgacgcagttgtgaacgccgaggcggcggcgtcggtattcttgccggcaaagtgtggaatgccagtgcggagctgagagaccactatggagtcgaggatgttcaacagacactgatggacgacgtcagagcgcatgcacgcttccacaagaagacgacggtcttccgctactgcagctgccctggcccccgccgcctcagttgctgccgccatgcctcggttcggcactgctgctgcatcagcgagatcgctcgaactctcgaggaagggatcatgcaactggcgaagctgtgactggatcttgtcgaggaaaggaaatgcaaagttgtcagttgacgaagaagagggtcgacccgccaaaaggtaccgatggtcgtccatgttcaaaaggcccgccgttgaggaatgcctcttgtcccggaaaaggtacaagggacagtgcgtcagaacgatgcagcagttggtcgaatgcgccagcgacttactttttgctgctcgtcggtgaccagggctacttcgaccctcccgcggcgacgctgtactcgcctgttcggcagcatgtgcctcggcccctccctcccgctgccgccgaaccttcttcttcattcgagattctgacaatgactgaaaaagtgaatgcggggccgcttcagaggactgtctagcagcaaaaaatgccgtattctcctcagtattgcctcttgcggctgctgccgctgcatggtgcacggaccgcttttttttcggttgcatgttagggcagccttagagagtgacggcacggatataaatctacagtagcctactgcctttcgcgcataaaagtgtcaacaaccacaacataaagagtcaaggtatgcatttgcttgcttgaaaccttcagacactttccaggcagttttgcccaaggtgccgggttatcgggaaaagtcacaccgcagcggctggcgaaaactgcgtgtgccagccccactgtggcgcgaattgacgctgcacaggatgccagactctataaaaactgtaacatgttttttgcgccagaaaacacctacttctgtctcga

SEQ ID NO: 3289 - DNA, 2899 bp, Toxoplasma gondii
  source 1..2899: mol_type = genomic DNA
gtgaaatcggcatggtccaggcagcgaacgtcttgataatgaataagcgaaaaacagttatcatactaacgcagaaagtagctgtcgggacaggagcagaaggaacgccgtgctcctgatgggacgaatagagcagctgacgtcggatcaccgcgaacgtgagggcgggtggtaggtggacagtgaatgaaaaagggtgaggtgtcagcttgatggtgttgcaagtgcgtgtcagtgtgcatcaatgaatcatctctcacgaacagcattccgtgcaggcgaccctggcaatcgcatgtggaagcaaacaaaaacagtgccggggcggggactgtgttgggaatgctgcccaagaaaaccctcgatgaccaagggaagatgaccgcagccgtcgtacagtgttcctttttctgcgagcgccggcatatctttccagccggagtggagaagaacgtgcaactcaatccagactgaaacacagtcctagagtacaacggtatgagttggtagctcgtccatctgggaaccactgaatagcgcgttcagaagacctcgcgtagatcggttcttacgacaatctggcgcagtgcaactcccttgtgggtaggtgccgttgcatgcggcagcagaatcaaagtttactgccatgcttctgaagaaaccgcaatcacgagccctgtatagagaaggcattcgttgacattcggaggctctccggcggattgatggttagttcttttttattttaagccaacctaagaaacgacctaagctcttcccttccgcaggtatagtcacggagttagcggggacgggaaataagtaaccggcaagacccaggagacctgagtcatctgctgtgcaacaattgaaggctgcgctgagctctagtattcttaccggaccttcgctcccgagagttccctaggacaacgctttccatcagtggtaaaccaataacgctatgccaaatatggtccctaccaatcaaaggaaatgcattcaatggaaatcccgacgggttcactcccttcctctggtgactgattgcacagcgcctgcacttgccggagtcgttagggcacatgaccccctctaccagcaggtgagagtcgttataaatgaggtggttcctgtctcgaatttgtggactgtatgaatcgtgtatgaatccagttttagcagcttcttactactcctgcaaccaatggctcctactggccatatccccacccacaccagcatgagttgaagaatcgcaacgtacggtcttgctctgtcttactgctccatgctccaacggaactaacacttccaagtcaccctttccaaagaaggtacacaaacactggctttccacctcggtggcatagtgacttttttgggcctgcggtcatctcgaggtcactgcggagtgtggaggaatcagacacgagcgaagtgttttagtacactgcgccgaaacatccttgacgtggagtttttgttccgacgtacaacggcacatgctccagctttatctttcagaagcagctttccatcatctgggaccctttaacaggtggacagaatcgccgaacacggcattcccatgcaagttgcagtggttccttccattaatggcactggctagctcgcatcgaatagcaaaccggacgactgttgcgggagctggtggagttccaccgttcaccttccccgcactctatttctgtagactatgggaagactataaaggattttacgtctatattcgtgcggggaaatctgttcggaacgacatcgctcgtttgtcgggcacaaaatttgccaacaatgcggtttggctacctgcagcagctcgcgcgacaacactgccgcgcacttgcgtgccgcgttctctgcaacagtgatcgtggcttggcgattgaaatgacacctaaatccaatcgacacgccacgagtcaactggtgtcctctgtaaattcgcagtgggattgttttttggtacttaatatttgtggacgagtgcgtggtggggagcttgtcgctttcgtctttcgcgtaccacttactccaatatacacgcagcgataaatcgcgtaacggacctgtatgcataccgtttccggaagtctctgacctgggccttgcagcatcgtgcgagtctgttccgggcaactggggcaatcatcggaggtctcgcggtcgcagtaggtaaacgatactctcgtctgttaacaaacgtcatctttgcttcacctgccttcacaagtgtgtccaaggtctcttttcctccttgcactttccaggggtccacttttttttcagtaattcgcgacttcccttgctgggcggatgttcaggaagcgggtggcagcagtggggtgactccacgaggcgagacacgtttgtctgtgcaacactacaacacaagaattgtagcgagtctctgcatttggtgagttgttctcgaggtttcaccatcattggtgtgtacctttgttgcggagtgattgttgcaggttgatgaacattcttgtgtcacctaccgtgccagtggctgtaggtcatctgtcccgtattgtggagcatttcaggctcttatatgcctctctcttgtttcacacctccccgcggtgtgtcggcggttcgccgcagagccgcttcgaacaagcggattgtttctgtaagtgacttcgttaagccgtttatgggagtggctgtccggcacgcggacaaactcctgactgcagagggtgtttctcgttcgtcctctgctcacattgaccattctgagctgctcagcagtgcaaccactaacgccgcactagcaaaagcgccccaccaagagaaggtcggcctctcactcatacaggggacttccatcccctagcagtcgtgctcctctttatcaaaa

SEQ ID NO: 3290 - DNA, 2354 bp, Toxoplasma gondii
  source 1..2354: mol_type = genomic DNA
gactgaataccatcttcgacggcggtagcttgtccttcgaaacgggcggtcgttgctccgtacgtatcaacaacttctgaatccaggttttggtaacgtacttccgttctctctcgtctgcgatatgctagtggggacagaaacgtgtaggccggcttcggccaacgaattgcactaagcaagaagtggtacctaaatgacttctgacggactttccgttgtagcttgagacgcacaaccaacaaactcctcatatgtgcagtatcgcttcatgaagcacgcgtcgggacggctctaaacgcgtttgttcacagtgaaagatgcgaaagtcccggaagttcgtgcgatctttcttaaccgtgagaacgcgatggtgaatgaggctgtggaaagtcgagggcagcaagtgtggagagcggtctctcggaaagaggggttcgcgtccgacaaccacagctgtgaccgtcagggggaaacacatggaagtgtgaaggaacagaggtatccttcagtgcaacaacagccgtaagggtggactgagcctcgacccaggtcagtgcttttcgcacatctgtccattcttgtctgagacaggtagcgtttcctgacagagagagcacggctgcatgtgaacaagatttgtgctctcctggaactaccatcctgcttcacgtaggtctgctggaaagacatgtgggaaccgaatccgcagtaagacgcgtctcacgcaggcataataatgctaaattccagagagggcccggtaattcatattcgacataggcttcggacgagctgaagcgcactcaattcgtcgaatcaccgttttgtgtttcagtcaggaagggggctttctcgattctgcttttcaaagccccacagtgactgtgccgtctttcctcgagaacgctgttaagtgggtgcgtctgatgaaggcgagaaatgcacggaactcggccgttcagcccacaccattactcacccatgtgtttttcttagattctgtttatacgacagaacccatatcttaaatgcgttggccggatctcgtttgacgccttaaccagtgtctcggcgtgaccggatgcttttctcccagagctaccaacacaacggcacctcttctcagaaggaacgtttagccgttctcatgactcctgaaaaactgaatgcaggaagccgtaaacgaccagcgaattcctttcttgacactctccgtcgtgcggcgctgtacacaattctgcaccttccgccagccgacctcctttcccttgcccctcgcgacccgcagcacctcacggttagagaaagctgctttcctgagtcgcggagttccactgttgtaaggcctttctcctcaactctattcaacgcacacggaactcgtagcgcactgcgtggcctcgggccacttatcatcgactcgaatggtgaaaagtcgattgaaactagttagcctcagtctgggcgttttttcctgcatgcggggcttttcctggtacgctctattgtacggaggaggccgtgtaggggggtggagtggcagtgggaggtttttatcccctctcgctctgcagtccaaagggagaaatcgatcgagcaggttggcggctaacactccgtttcctctttctcggcggcacttgtgcgcacttttccatcgcctttttcgctgcattcagcgacttctcggtggccggactttctcctgtctcgctcgtgtcgctctgctcaacttttcttgtcgtcgccggccccgcacaacgggcagcagctgtgcaagagtcaccccgggagagtgtttctaaacttcagcctgaaaattcgacttcctgccctgtttaacttttcttcgtttcccccgcgttcccctcgcaatcccaggctggaggtacacctggttgcagcggtgtcagcaaagcggttttccactcgttcgtcgttcccgcttttcccgactttctctccacaaaaccctggctttttacgtcgcccgggcctcctcgacttccactcgaaattcccgtttcccggtgcgtctttgcgctggcttcggagcttctttgattctcggagaggtgactgaaacgcgtcttcggccgtctgttcaagaggcacactgtccttccgcactcgacagaggcgtcgcgagtcggccgccagcgaattgcaggctccagaaaagcggattcggccttggtcggtctttcttgcgggcacccagtcgccccgcctgagagactccttttaaagcctcccttgagacctgtctcaactcgaagcaccaccgcgagactccctcctcttcctctcgtttgttctttcctcgttttccccttttcacgctcccaaaa

SEQ ID NO: 3291 - DNA, 1081 bp, Toxoplasma gondii
  source 1..1081: mol_type = genomic DNA
tttttacggtttcagtgcatacttccgtaaaccctcctgcgccaaatgaacaacgatacacggtgacgaattgtcctgaaaacattttcttctcctcactgcctcgataccttgagcgcgccgagtcgcagccgaaataagaggactaaacaaatcagcctgcgtccttggactaccggaaaccacatgcaggtttgtttcccatgttggagcgtctgtctcatcaagcatgtccatttgcctggacctagcaaagttttagtcggactgtagttgagcacatgtgtgcagctcaaactgcctcggcggtgctgtatcattcatacggaatactgctacggctcttcacggactcgtggctcgtggcagagtctcctcactgatgggatcaaccgtgcaaagagatcacgagccgatttcatgacacaaataagcgttagcaaacaacaaccttaagcaggacatatgtttctataggaagtgaagataaccctgaccaacccgaagctctcactacaggacgagcagtctctgaaaactccagcgacagggtcgcgggaaatcaattataggcattcgtaaagctgtcaccgtctcagtggggctgagatcgagtcaatacaacaattccgaaatttttgagtgcgaatccattcgctggagaaaacggtccggatagcgatattcagctacaccagacccccgtatgctgcggtactcaacctcaaaatgatcgaaccatcgatcaaagtctgtcacacctaacaacccaaaactctgttccatggctcagtcagcatgccgaaagtcttagaaatcgtgttcctcgacactgatcctcgtcgagaaacaaaccgcgtgcacactcggtgtcttgaaacgattggtcgctgttgtgaccccgagtctggcacaaacctccttggaacgtggtggccagatggaaaatccgtttttcttccgccattatatcaccgagtctcgtctttctgttctggatgagccgtttgggacgagccatgggatatgtcgtgtttttcggagcgatttcaccgccagtatgatgatagccattctcgca

SEQ ID NO: 3292 - DNA, 4622 bp, Toxoplasma gondii
  source 1..4622: mol_type = genomic DNA
taactgagtctgaaggacttcttcgaggatgacgctggaacatttgaacagcggatgaagccagcaggtgagaagcccaaaagggcctctcggatctgccgtcgggtagccgagacgtgcctcgcccttctcgatctttccgccgcaacagcgacacttgctctgacctggtgaggcgccatacaggacaaaccagacagaggaacaacagagctgcgagcgaaaagacggggggaaacagagaaaacgcaccattcacggtaattgtgtacacaacccaccaccacccccccccccccacgtgcaggcggtaaacgtccagcagacgatgtagcgtttgttaaagcacaccgatgtatatatacacacatatctgcatttatacacccgcacatgtagcagtttgatgtttctggcccttaagctataagaggggctcagaaggtttgttgtgtctcagctagaactctgctttctgccgaaaatggagcagctctatcgttgactcagcaccgcacccgtgggggcattttggacaaggaggcggacatggcgaagctgctgagcttccttttttttcagtctgcgaaccgctgcatgcggcacccagtttttggattctgggtcgaaggcgcattcctccactgtcaaaggcggcagccgacgagcagcagagaaaagagcgtccagcgaggcgctctcgtccacacatctgcctccacttcccgagaacattctcgagggaagcaatacaatctcagcgaatcgggtgggcacaagatgcccacggcgaggaaagagaggtcacaacaaatcggaggcacagtaacgtcgaaaggatatacctgtttcaaggtacagccgatgcgacgatgcactgaacttattcagaatctttaacacaaccttgtaacatttacgtagaggaactcgagagctgttgactgtaaacttgcgtgttgagaaagcaacctcaagactacaaagtaaaaaacagcatcgacgtttgcacgtcaaacgcacatgagagaaacgaaaaatgttgagggaagttcacgggactacagccattcgggaagttttaaaattccaggatggatgcagcgctcgtcacctgtgagaggcgggcatgcgacgctgttgaaaagcaaaacaatacacaagagtagaccatattttcaccggactcctgtggtgaagattcattctgaatcaaagcgggtccattcatattttgactcggggtgacctaaatcacagaaataagatcaaatcgcagtactgtggacccgccgaaacacttgacgcgcggccgctaattcgtgaatcccgtgcatgcaatgggagagacacggcagaaaaaaaccagtccctgactttgcggggtaagggaaagctgaagaaatgagagacctcagagaagccgcgattttggcattcaccacagtgcgtacaaaatcttgacacatggacgtagggaagattggatacactgcggatgctgatctcgggcaaagttccggagccggctaggcggtcgtcaacatgttctgaaacacttgctgctgggaagcaaagacgcgaatataccttcagaagaaacgtatacacagtggacaaccactccgaaacgttcttgttgtgagttatcgcttcactaaatgttcttcattattttgcgtgcagcgatctaacctgcaagaggatggattggtacgctgaaacagatgaccagcttaactgggtctcaaccggctacacgaggcactgcaataatcggagcccttggaatagctttcacgacatgcatttcatgtgtgttccttgtcagcaatgtgtgttcccactacagtttactcaccgtttagcacaaaaggagtcctgttgcttccatcttttgtaacgcagcactttaatatcatcgtcggctgctccagggacttgtctggagaaagcaaatttatcagagagcgaacccacaaaaccggcgtgttgactgctcaataagttctgacgcacgagcacaagcggcaatgctttgcattgttgactgtaggcgggtagactaccacagatttggtgtccgagttggaaacggctagagaaatggaacgaatgaccaattctttgggtggcatctgaaatatctgggactggtagggcgtttagatgggagtctgaactcgaaacagagttaccactgtttttgttaattattaaggttcgttttgcagggttactgcaccgcataggatgagtcatgcctaatggttggaagggctctcacttttgtctaagggcccatcgacgcaaacagtcgtggtggtcagtctcgcaagagtactagaagcggtctgttcggggccctcccgttcaaaaccgcagtgagtagcaaggaacagccccagatccctcgtgagcgtgtccacgccggtgtcaaatgcaggagtcagattcggcaaggaagcaactcctgacttccacaagtcacacagtgatgctcaccaccgtgagaaagacagttcaactaacgcactggtcccccgggggtgactgcctcgaattctgtgcacctcttgacctccatgcacggccactgaacgccaaaagttggcagtagcgggcggaagcttcccctaatgtgaaatgtagtcaccgacgctgtcctctagcaaggtctagacacagcgttgcgagctaacacgagaaaagctggccttacgggaacaaacgtatttctgcctcgtccacaactcgcagctgaacagcttggccctgtcagcagcctgtgcaatacgactacaatgagggaatttcttcttttcactgaaagcaaaaacagggtttcaccatccgatcagatcttttgaacgggtagcgataacaacgcatacattcacatgaatgaagataccgtgtttccccccagtgacaggtagagcgacctgtgcgtacttctatcagcgcagttgaccccaattggcgccatggcaggctcgatcaactacgtgatagtttcgaagccatgagcacaaaaccagatgaggcaacgcgcagcttcatgataacgaggattaaaatgtgtagctcctagtgtttggcgagactcgtaccagacccacaagcttgtcaggcaagttttgtcaaagttgcggtgggcgaacgtacttcaaagcaccatccgaaacgcggaaacagatctcatgccctctacgttgtgtcaagtcgctttgtctgacacggtgacaaatagggaagttacattcgggctatcactaacgacaggggatgcagcgagctgataagtacgttacactgccacattccttatagcgagtaacccggttattttatcgcagcggtgactgttcatgacgctggtcaaaaaagggccggacgatccaagaggcatgtttaatgataattcgctgtagctgtcgctgcaacagcagacattaatgtcttctttttgtctagatatttatgattttggcaccgccgttgcggcgcaggcgtagctaatatcatcgctgtgcaaatgcttcatgctgtcaagttacacttccttccacaacgatagaggaggagccccattttccgtggtgccattccagaatttgtcgcgtctttttgcgagtgttcataaatcagcaatggatgcatccctatttccaactcctccctgctgaggtaagtgctaccgacaggtagaattgacgtaccggccacataccaagtaatcgcacgcggtatgcaggttttctcacggctttttcagaagggaactgctcccgatgctcagcgcgctttacctgttcaggatcatacgcgcaagcgggcatacagaagtggttgtacgccgagacaaatttcgtgtgtggtcccaaccacccccctataaactcttaacaacacaactgggtaacaacaaccacaataacaacaacgagtacccgcaacgaagacaaaaacctgttttctgcagtagttgtcgcgcagggtccgttttgtggccgtttaaagttgacggggccgagttgccaacgggttgaaaatggggctcccataattgcaccgaggcccgattacaccgtgccaacgcagactgcataccgaaagccgtggggggagctggtcttgtttgcggtggcgcctgggcaaatgctgaactccagggactctcagtgaatttccctctttcttgtgtactttccaattttttctgacatatccgagctcaatttccgaccctggcacgttccgaccttgcagagctacccacctgttgccgcgttctactcggttcctccttcctctggtgcacttgtgctaccgttgccacctcatcctctgtgaggattcgtggtgaggggatgacacacgcctgcatagtgaaaaaactatcacacacgcatttcaccacctctggaggagcctattcgcctttttttcacccgaagagaatcgcagccgctccgtagaatgttgtacggggggagagggagacgtgacagcgccgggaccgttctggatcactggaggatgcgccgtcagcaccgttgacgagaagcaccaatccggttttctacctgttcatttgtccgattcatcgaggaaaggga

SEQ ID NO: 3293 - DNA, 2632 bp, Toxoplasma gondii
  source 1..2632: mol_type = genomic DNA
tataacagatacaagtaacttggcaggcattactagacagcaatcacttagtctattctctgtcgggtacagttatatatatatatatatgtttatacatgtcgtgtgagttgctgggttccttttttgtgtccagttatctccccgtgcgagctgtggctgagaccagctgaggcatctctgcaccgcaggagagacgcgagtacttcttctgagtagagatcgattttctttttcttctgaatttggggtttactgttttcgcaaggctttgcaggggacctgcagagatcatgtggtttgggttcaccggtcgcgtaggcgcagctgtggtagaagtcgcccgcaacatgcagtcctaaggccgcaaactggtgcgcgagtctgtgttttcctctttcagttcttttctggtgtctgtttttccggctgggggtctattttcgcgagcggaaggctgcgcttttgtaacggacgcagcagctggacggctccagtgtgtggttgtcgaatggttgccgtgtgcaggaactacggaggaagcgaaatacgtgtttgacatcgacaagtttgaaatgattctccaagctttcgagtacgagtcggatccctctcaggaagggccgtccagtgggccgttttaccacagggcgcaggaagaaacagaagagaaagagcaccagcaccacacagaagccgcggcagaggagaacggctccaggaaaagaagacggctgtacatgccatccttctacaggtcaacagagaatgtgtttcgcagtgaccttttcaaaagcctggatttcgttctcagaaaccgaagaggaacgctcccgcaagtgcagagggccgccaagctggaggctcagaaccaacaagatgcgggaaaataaaaagtattagtcggttgcatgtggagaactcaggcattttcaaattgtctaaatgcagcaatgagtcgacgttggagattgaggggtgttgcactggaatcccgaaaacaagtcttgcgcgtttgcctcacggcaacgcgacagaaaagagaaccaacagccagagtgccctcgcacagacgcagggagaagcaccagacaagacatagatttgtacttgtacgcacgcgttatgaccttttcgtggagggtgtagcagccttctggctggtcctcttggcagctgaggcaaaccatattggatcggttctgccacaattttcatcgctactctctgaaccaccgagactgcgttgaccactgaggcacgtcgtgagagaaaccacatcagatacatgccagcccatcatctgcttcagcagtatgcgcctcacagggtcttactaatgctggcagcatgcgaatggtcgatatggccctgttttcggagttgccgctgaggaacgacatcaagtgtctcaggactacaaagtacatgctgcatcacaaatgatggacatgacgaccgaataatctggtgaatctcgatagtgtcgtatcatgtcactccaaccactcagttcctttaggttgtatctgttctttgtccaagccacaagtcttatgtccctgtgctcctgcattctgtgttccatatccatagtcctatactgacgtactcaagtgtgacggtgtggttacctccgtgttcattgtcccggaaccaccggttctagtttaaaatattgtcactcgtgtcttcaagggtgtccggtggaactgtaacgaacggacatacggcattgttgtaagagcccttccgacttggacccttccgtgcaggagacactacacagccgcttaggctgttgaacccgcacacagcttggatttcttccgttttgatttcaggcacggcgcaatacaccgttccgctctaccctactacacagagcagccaaactgtacaagactcatcgagtttctacaaagcaaatactgcagtgcggcatttaattcccttcccagaacttaacctcaagatgtaccaattatccctgttggtgcatctttcgtgacaccgttgtgcagcagaacacgggatgacatccgttatgacacgtctagcccagatccgttttcgagggtagtcatcctaacctacagcgtaatcgcctcctaactcagttgcttcggagttccgcgaccgggtgtgcccttttgcacaaaacagaccgattttcagtcgtggtacaatctaatcgggatcgaaatgcgtacacgagtcaccaaatcgacacccgtgtaccggcagccggagtttccttcgtgctcagctcgccagtgccgggtcgagcttgtacagtgaatcggtagtacttgcaacaggaaacgttcggaagacctgcagtcgacgccggtagaccactggagacctgatgacaagcttattctcttgctaaccatcttcacatttcgttcaccacaaaggtactgcttccgtgttgggcgtttccataagggagagattcgaaagctcccctatactcatcgaaagcggtctggcggagctggatgctgggtgcgcacagctggttccggcaggattgcggctctaagagtgcagagtatccctcatctcgaccttgctcccaaatgagtctacagttgtattttaatcgaaatagtcgacgcaaaga

SEQ ID NO: 3294 - DNA, 3964 bp, Toxoplasma gondii
  source 1..3964: mol_type = genomic DNA
ctttcttctgcagctgttatgggtctcgctccagccctgttggtatgagggttgtacaaaacgatgttccgatttttgtacaaaacaatctcatagttgttcgttaacgccgtgtctgtggagacaggtgttgaaagacggagtcccccggacgggcagcggatgccgcctcgactatcgtcactcaatgacagtatcgcgtcatcacagggaggcagcgagagaagtccgcattctcctggcaacgccagcagaattggttggtgcggaggcgagtcagcgtggaaatgtagcgacaggtcacagccaggcccccgttcttcccctcctccccctgcaattgttcctagctggcactggcgtgtttcagactctggaaggacttcgaaagaagacatcggttctgaaagacgagctccctcgcatgtttctggcactgccgctggcaggaacgaggcacattgctcatccacagggttcctagcccgctgcgagtaactgtccatggcagaggaaagatgtatgcggcgtccggtgtcaacagaattggagtgaatcacgcagcattcgttcgcatccttacaaaatcttgcaagaactggttcctgctctgcggtactgagtcaatttcagttcgtctgctcaaataaagcggcggagagctccgtcagaacgctcgtgtacgtcatgcgcacgaggtaaaagattgaggatgttgcagataaaggtgccggattgtcctgagggcaaaattgacctgcgaagaactgggtcgatactaaaaaaagctacagcccgagcacaacagacgagaatgcgtggtagacacaaggtctacattgaacggagaagaaacctgaaaaaggtatacagcagccggccaggctgtcatacccggaaatttttgcgtcttcagtttagagacaaaagcaaaaaaaagggatgtctgccccccttgcggccggcttgcgaaaagtaactgcggtaatgcggattttgcatgcctactacacagctttcgctggaaagactcgatccgataacgcgagtcatgcaactgtttgccataaattcttgtggaaaaggaggaaacatgagtcgaatgagttcgacaattaccctcattctgcttcacattagggtagttcggactgcaaactcacctcgccttcgtccgccatggattgacggcaactctctgggatcgatccgagccattctgactctctggaacttcctcttacacacattcgtgcgtttcgtgccgaagatttcccaagaaaatgagtggtagaaaggaacagccccgcgttccatgggggaatatttcgctctgacagtttatgtttttttagcggcaaacctgataacctgtcaatggcagtggtgactactgtcgcccgcccaccgtgcacgggctttcttaacgttcacaaaataaagcccagctccagcagtaaggtattgaccagaatgaaagcctaagcattggctgtctctgaatgctaatggggtaccatggcttgccagggtgttgcatgtacactgttaccccgtctgactgcctactatggcttcgctaattgtgccttagaatcgccgacccactaccaaaccaatcaattcctcgttaaggctcgcttccctaatgcatctttttccacggcagaaggttcactatgacgcagctctcgacctggaggatcttccttagagtttcaattcttatggaactccccaaatctcttggaaagaaggccgcctgcacagtcacagtgttgttgaaagctcccagcttggcttgccgcgcattcaagaacgcactgcagagtttccacaccattcttgattcttgcttcgagagtgaaacacatgttctaacagccggtgccatttccgtgaagcgacagccgcagttgatttcaatcattccaacggcagtcgcacccaacgttgtcgaacgctaggctcagccatccccgaggggaaacagaaatgctgccatcggacccgcatggaaccccttcgatctaccccatttcaaaagcattctgagctgcaaacagctgcaaatgaagtgtctgcttgggggttgaacggcgagagtgtgaaagggtctctagctttatatgatgcctgttgataaaaacgccccacggaggaacaaagcggtatgtatggggcatgaatgcagtcacatggagccagtgggcgtcagtcttagacttcgatgttgcaccaatgcacagaagacttccttgagagatctagtattatggctctcgattatcggacgtgtctactcgagctgtccgccagatccttctaaacctgctgacactgcatacctccagaggtctgccgtgttcgaagttacaagtaaggaatgcccatgctacctatgcatatcaatcctttatattcactttcctgatatgtgagaccgaagatggcttacaccccaaaagctgtccgtgtgaaggcgtcgcgacatgcattctcacgctgaaaccatggcgatatctctgctttttgcaatcgttcgtgccttcaccccgcgaaaacgacccttcacaaaacttccctgcagtctattacaaacagacaatggtacactgatgggtgcactttcagacacgaaaaactaatcaggagcttaacaatggtgtgcacgtcgtgtgagcacgaaaacaggcatcgcaccgtaccgacagatatgtgcgtctgtggtgcaggactgctttcagcacccgctcctgtacagacaccatgatattcactttcgtagtctcattcctaacttttgtcggtaaagaatacacggatcggtttcttgttggcccggcactcgctaagcagttgcaggaacacttctacgcttttgggcactagcaccactcacgaaacaatcctggggataacgactgagaatggaaggcagcccaaagaaaaaaggatctaaatgtatcatttttgatcgatctctgtttggcgatgcttgcagattaatcagcactcttaccaagttttcgaagccgtagggctgtgtcttacccacgcatgcacacacggccccttcatgaggatgattcaggaacatattcgtgtgaaataagtagggaaaatgctcgtgaacgaaccgccgaatttccacaaaaataatgcgcaatggagaaaaaaactgtccaaattttattctgcgttgctctacgctgcccatccgcagctttgcggtcacccactgcgaggagcatgcacgaacatcgcggctgaaatactgcaacagcaggagatcttgatcgcaggtgaataatatactccattcctgctacatcaataatactttctgttccgattgtgtgagttaagaaatgtgttgtcccgctggagtcgtaaactgtgcattctgaggacgtggactaccgtgtcaacaataggtctctgctccaattaattgatatctttctccttgtcttccaagaacgcctggcacacagaatctgcttgctttctgctatcttctgtgtttttccgtacatttgcttgccttctgtttgcgactctactttcgaagacacaatcttcgttgcgcagagaagtggtgcctttagagtcagtgaccttggctgtttacctcgtgtcagaactattctaaagcctggagaggacgaaaaatgtatgagacagttgacgcatctgcatagcagtgcaggctgaagcgtctcttttcatgaaggtgccccagtagctgttctgacgcccgccgccttcgacaccaaaaaaaaatcaagctgaggcgacagagaacatgaccgctggcggtttactcgcttttgcttgctcgcagctctgacgcagacgcaccacgaaacacggcatacgatgactcctacaacatgcgcatatccagtcccataattaatttttgtagaatgaacatctctttcggtgccagtgtcaatca

SEQ ID NO: 3295 - DNA, 1546 bp, Toxoplasma gondii
  source 1..1546: mol_type = genomic DNA
ccttagcgatggcttgccggatggcgtagatctgagcaacgtaccctcctccgctaacacgaacgcgaatgtcgacatcctgaaagcgttccttccccaagagaagaagaggctcgaatgccttcaccttcaaagcttcgggctgaaggtgctccagggggcatccgttcacacggagcagccccttgccttgagtgcagagcgcgacggcaaccgcattcttctgtaagaaacagcggacacccacggaaaacatctgcatgcaaatgcacggcgagactgcaaacttgcacacctgcgcaaaagacaagagcagctgcaggactgcaccacactaccaggcacgggcgaaattgtaccaggcatgcacaccaactggaaaatcagacagagcgtgcggacgcgtgtgtttgttgtcccttggagtctacggtacggtaccgtcagcaagacaggatgtctcaccttgcggccgaacgtctgcacgcgcttcttgggtctcttgccaatgtccgccattttgatcgtcggaaggactttcttcctcaccctgtggagcaagcacagaaagacaaaggcacgaagtgcaaaaaccgcaacgacgcacgtctttgtctccctttgtggccctcccatctactggagagggagtaggcgaaaacgagctccagccctgcgcatgcaggtatttcccaggccccgtgtgcctgaggaaatcggctgtttctgcagtcgcatcctgtttccaggcgtgtgggctggagaaaaaaccagtcggagagtcagggggtggacacaaaccctccttttacacaaacacattatcgaaccgacgggcagtttcacgacaaacgaatttcgacggctgtagactccactaaacattgccgcgcgttcgggcccccaaaaactctctgcgaaaaattacggaagcagtcgtgaagcgaagggtattacccgacgcagttcccacgaaatcgtcgaaaaaaccgcctggagaaactcccaaggttcctctgcagccttcgccagagaggcctggggaagcatgtacagtaagtgagtggggcgatgaaattctgactggagggagatacacgacggatggagttcatcacgtactgcctcgttgttcttccaaagcataccaaacgcagtgaatgtgcgggccacaccactgcagcacgactctccccagtatgcggtctctgtcgttttctttcctctgatgggcgacagagccaagtcgagacggcgtggtatttaagcgtgtaccaggaattcggtccctctctctgccgcgcttacccggaaaagaaggcgggtcgttttgtggagcacaaaaagccctaaacgcgtggcagtcaggaatgaagccagaggcagaaagtgagaaacccggcacagagccttctgtgccatccccaagtcgttcgcgcctcttccttccactcaacttctcgcttcttcccccctccgcccagcgtaggcagagagaccaccggctttcttcttcccctgtcgcgcagcagttcaccggcttata

SEQ ID NO: 3296 - DNA, 2277 bp, Toxoplasma gondii
  source 1..2277: mol_type = genomic DNA
gtagatacgtgtagcgggacgtctacgtggcgtacgtcttacagagaccgtcgtgtcgtggagcgaacacgagagcagagggggggagaaggaattttttccaagggaacgattggcggagatggaagactattctcaaggatgcagagatgcttctgcccccagttaggtgttggtcgtcttctcaaaatacttgtagaggcgtatgcaagcgcatttgcacgctacgcatacacgcttgcctgtagacacatccaggtgtcttggtggtattgtctttagatgccagaagaggtattctgaactgaggaccaggatggggaacgggtgtttcgggtgagacgttttctgaagagcccaaagacaggaaaaagtgcctgctgacatcctcatctcttccttctccccgtttagccaaaacgcggaccaacccgtgtgtcccctgcattgctggggaaaactctcccaaatatgtgcttgacttaaacaattccatgtgtgtttcgttgcgtaaaaatagtacttgtatacatgcatagtaaggcgccggtgaagttttcgccgccacagagtgccaaaacttacacacacgcgtcagacgcttcatttcttcgacgaaatcacaggcgctctgcgtgttgccccaccgaaagtctaccacaccttagatagccccaagctgccgggagtctctgccttcacaaagcatcgtcggtgcgattgcttttgaaaaacacatgccgtgtgaaacaaggaaccaagccgacagaacattccctacatgggttttccacttgcacatgcacctcgacttcacagctttctacctggacagcatcgacattagcactcacatgaaaacatcacgcgatggcattccagttctttgacggaaagaacgcgtgtgtccgcaaatgcgcggacgtgacaaatagcaacgtgcaattgaccggatgtacgtacagcccgagcacagtcttgacagaaacaattccaggcccaagtagaaagtgatttttaccgacagaatacgtgctctcttgtagtgaccagtagtccaatggtttcaactcgtcatttgtgccatcgtaaaggaactctgagctgtaccgcacgcgagaacacggcaaaagaaacaacggtcgtcagccaaagcgtggcttggcttcgacacactccagtcactatagggttgctgcctggccagtgagaaactcacccgctcacggttagactgcgagtgtctaggcggggacagcgcgattctgccacacgattgtggccagcgcgcttcgacggtgtagtcgtatgtcgtgtgcttctacgtgaggaaccacaaaaccactggtttggcgctcgggtacgtagtttcaacatctctctcaaggtgaggtaagcgcgggcctagtacaaaacgcccgtggtttcgaaaagccttctgcgtaatcatttgaggaaccccatttcttgaaatctagccctacgcaaaatgcgtgtggagacgatttcattgtattgatggtgtctgtgtgaaaggcactttgcaaggggaatgcctaccgtggccgctgcttgaagaaagtggcttctgctgtcctcccgattcaaaaccgaattacttctttgggtcgcgggaaacaattgcagttgtttacagaggatggatgtcggcagccggagcgatgtgcgaaagactcgatgaaagtgggcctgttccaagtgagtgggcgtttgcgtgtcggtctctgccgcgccggaacaaagcttttccatacagaacgctgcgagttctgtccagaacttgcttagaaacgaggtggcgtcaccgtagatgcctgttttaaacactttttctgaaggcgcaccaccaacgttttaccagaactcttatgtgcccgtcattccagccgagggcggcatgtgagcccgcggcacaatttatcggtcctctccattgttcatgtatggacttgggaacttttaagaagaacaataagaagaaacctctgtggctgggggcagtgacgaaccaacgaattttaaacaagggggttaatccgttagcgacccggttgtcgaacggcagatcggcgtcggcccgtagtgtcggtgaagcgcccgtcagccgttgcctttcactctttatcagctgtttttccgaatcttgtggagttttggttgcacttcgttccttaacacgtggtgagtagctagagattatatgctcgagaaggcgtatgatacagattaggtttcacatctgtcagaacgccgcaa

SEQ ID NO: 3297 - DNA, 2389 bp, Toxoplasma gondii
  source 1..2389: mol_type = genomic DNA
caatttgttgcctgtcacaactgcacactcctgtcttcacctcagcagctgcttggatggaagcagggatttcagcatccagtcagtatctatctttgtttaaaagctgcagtcagcaacagtgctgatttagtgtctgcgcttaaccatctgcagtgcgactggcgtcgaagccagacaacaccgaagccttctggaactttgatcatggcccgtaaatcctcagcggaaaaagcactgacaaaaggcggttcttcacaggtatcttactcacggatggtggtagataggacgtggactttcgaatggtctctgtgatcgactgtttgacttctatcaaacggtttaccttcttgccatctgacgtttttttcacgcgtagcaaaagtcagtgtactttcttctgtagtggagacttcactcaatctgtctcaacaatgtctgtcacaaatgctatgctgcgtcttcggtaatgcagcagacgcaagcatcgttctgtcttcgcgtgcatctgtatttttcagaacttcgtggttaaacaaggacgctggggcaacggtagtaacactgtcggctctgcagcatgtgtgggagagagaaagaccctctctgttggcaagcgtggcaacatgttagctgaccaccgagtgcctcagtgtttttctctattcccatgcatgtgtacggaagcacggaaaaagtggaactgtcggagtttcttataatacgctaatgcagaggatgataagcatatctcactcttgcagactaaacaaagaaggcggcttaggctccttccaaactccatgcgaggttcacagctcggaaaatcccctctgaacctcacactgcgcttggttctgaagaccattctgctaaaacgactaggcaacacacgagaaggccaagggttcagtttcaacagcggcagtgatgtggtttgagtcagtcagcttttgagccacgtgcttctagaagtgaaacgatgtttcgatgtttcctaacctgtcgtgccaccttgcccgacatttcacgacgctttttaggtcctgaaactgcggtgatatttgtaacgactgaaggcagagaggatgatgccctgctgacgaaaacaaacgcaaactcaccagagaaatagaggaatggggtcatgccatgggttctgacgaaaggctcggagcgaaagcagactggtcgaaaaagaatcgcacagccgaacttctgaggagacatgcggacggctcggtgtacgagaaactacagtttctgtctgtttctgcgatacgagaaaggaggaatgtttcgaagaaaagggatgtctagccgggaagcagacaacgttctccaaaagcttgtctgggaagagtagataatgtgtagactacgagctttgccttgtgtgacggcaaacgacctctcagaacgaggcatgagaggaacggtgccttttcagaaggggttctcttttggagacaggctttcagtggaaatccactcattgaggttgaattgacgtcggaagacatgagattagtggcagtgaaaggagatttctcagtcaaaacacccaacatgtacttggaataacatggatgcgcctccctagccgaggcgtcaccgtagaaggccttgaaaggacgagctcgcatgcagctgcacactttgaatgacagaataacgctttaaggaagaacgctacaaatgaactcagtttaaggtggtaagagtgttttcagtgcaacactgcaatgtgtgtgcgaatatcttaacatgaaacccctgtttttcggtgtgtggaatctcttttttcatgaaaggcacatgatcgttggcggttctctaccaggtccaatccgtctggcggctggaccttcggcgacttatcctgtcaaggagagcaattttttccgttctcttctttcgtttatctcatttcgttccagtgtgtgtcgtgatctgaggatcgtttctgtcgtggtcgtcgatcgcgagaagggaaaaaggcaaaccggaaaaacgagcacgtttctagcacaagcgtcggtttttttactttcactgtaaaaacgctgagatgtgtaaacgcgttctctttcatgagcgacaacactctttcgtcactttcctgccaggtcgccagagaccttcgtaaagaaccttccatgtaaatgccagccctccagagtttctgcttgacatccgggcccacatattcttgtcggtgtgagcgaaaagcccttccggatttctgccgattttcccatcaggctattcactgtcggtcttttctcttgaacagtttgcttcttttagaaatctgaaactagacagaaagggttgaactagaaaaacgaagaagctcttggtgacctcgatcaagaaaaagcca

SEQ ID NO: 3298 - DNA, 4740 bp, Toxoplasma gondii
  source 1..4740: mol_type = genomic DNA
gttgacttgcctgggctgtttggttttgtagtggagaggaatgtagacgtctttcacgtcgctgcatctgccgaagaactttctcaagtcatcttgagtagcgctacggtcgacgcccctcgcgaccaccgagtacctgcggtgtttgttctgctctccggaacccgatccgtacttgtctccccggaatcggcctctgaagtcgtctccgggctctccaggggacgagttcctcgcaccgcggaagttctcgtctcgcccatcccggtctctccgagtataaggcgaatcgtggtccatcggatagcgccggcggtggtagtagccgtctccgggggagtagcgcccaggagggcggtcgtcgagagaatcatctcggcggccgtcgtcgcgacgcctcctcggagaaggcgacctgtctgaagacatctctctgcctcgttctctccgacctagaaacttgccccggtcctcgcgatcgtaggaccgcattggcccgtctagcgaggacgatcggtcgtctcgacgggagccataccgcggcggcgagtactctctctcccttcgcatttttatctacgtctaatgcacaatcccttcaaacgagagaaaacagctcctggaaactggaaaaagcgagacggtcactgtcacagctgtgagaggccagaagaaaagggaacccgaatacccgcgggtgcctttgctgaaaaacctagcgagaaacttgtcgtttgccagacaccagcgccgacagaggaaagaagagccgaagcggagtgacgacgtccggagactagagaccgggagaggcttcggaaaaggtcggggcgctcggcagacgaagacgagttgtagggaaggtcgggagaaacagcgggaaacagaggacagagacaaggaggaggagccaaatggaacgaagagagcggtgcgaaacagcgactaaacagggaaagacacgcggcgacaagaatatcgaaccgagcaggaaatgacggggggacagagagaaggcgaggcagggtcacgaaacgacaacggactgcggctgacgggaaaagacagtcctggagatacacagtgaaagggtttaatcaaaagagaccatccaccggaaaactcagccagcgcggagaccgccggggtccttctttgaggagtggaggactggtaggtggcagagcggaagagacgagctgaaactaggcagaagaaaaggaacagtaaccaggtttcggttctgccctttcctcaggactttgctgcctcgtcgagtcgtggagcttggtactgagtgcgagaaaatgcacagctggcccctatgtcatttctccccccttttcttgtatgagacaaagtcgacctccactttctcgtcacctctctttccacgaacctccgacccccccctcccccccgatcaagcgtagttgtcgctatctgtttctcttggagtgcacgaacagtcgcaaacgctaactatgtagccttccgagtaattttcaaggctacgtggcattgcactccgtttcaagacttctcaaaatatttagcgagaaatagaaatgatgcactgccggcaatgtgcagtggcggagcaacttgtccgtcgaaggggattcgtcaatacgcactagatgtctacgattttgtctcgctggtttttgcgacaaccgcagtggtgcagatagccgtttgcctggcctgttcaagtattgaaggagttgcttaattctagacagcatattaacttcttttgctgcgacaatcttttaaccgacagcctcccgccaggaacacccacattgagacgaaggtacttcggctcgagacgaaacaagcagcctgcgactttaccagattcaccgagagacggcgcagttgggaaaaaacggtttttccaaaagggaagtgggggtgtcgggcggtgggcatgcatatgatcgtcgatttctgacttcttcggaggccaaagatttgctgagtgtgcttggagcagcagcggtgaaggtacacaagcagggacaggaggtacgagccgctggacagttcttttggttctgaaacgtttttgtcatttcagatccagcgacataagcatcaggcatcctgaagcgcgaatgcagttgctctactttggtcaagagcactctttgccctcagctgacagagctggcgacttgcgggacggaagcgtgctaactcaacggatacactgcatcctcacatgctggcttcccgttttctacgacagcattcactgttgctgctgtcgctaaagaatagtgattaacacccgcgagtgaaacttcactcgaccatccaccataaaaccggctgccagcgtcattgaagaccttttcggatggtcgtcagacggatacgggatgtgcacatcaggtcacttaacagtgtgtgcctgtgatggcgtgtttccccatcaagggtgcccccgcatatttcgattaaatctctccagcaaagaaacctgcaaacactaaagtctagaaatgcgggcgcgtcactttccgcatgaaccgcattgctgacgacgtcggctattgcgaggcagtgcataataaacaggcaagcatgatgaaatggaatctaagctctacatatctgaaacgactagtttgagtaactcaagtacatcaggaattgcgagtaagaggttccttcagtcgacaaccaacaagctcccgaaaatgcgcagaaaggaacatgcgtctcgacagttcagttttgtcaaactcacgtgccatcaggggcaggacacttgagagttccatagaagtcctgcaggcccacagtcaccaatcactcagtcgtagtggagatacggactgtcacgctagatttgtcttcgtgcagcagtggatttgctgagtgccctcacggcactgccaaccctgtttacacgagtaagtcatcggcggtcaggcaatggtaagcaaatgcattgtcacagtaggcgcctgcggtagtgacctcgtcgggtgaacattgattgttctcggtattgctccatgccttgagcttctgacttgtacggcccttgcagcctactcccagcatagtgtgctgcagtcattagacagcagtttgtttgttctgcgtctcgaatggtttgcacagacgagctctttgtccagccaccaataccgcgtgaccagcgaaatcgtgtgcacaacttcttgctgctttgtctgagatagcgacagatctcagtgactgggttgcactattcgcttgttgaaaactctgacaagcatgccgcatccagctggttgaacgtcaacagatgcggccacctgcacaaagcaccaacgtcgaccactttatgaagcgcaagccttcatctaatgttatggtggcctgcagctttggtagagtcctgcccgatgttggtctacacggaatgcatagatcgaattcttgttggccaaaaggctcccatagagatatatgtacaaagaaagttaccgtttctgcggatactagcatagccagaaacagtagggcatgtaagacgtccagctaaccaatcggtaggctgaaaatttataatcatcaaacgaatactcaaaaaatggctatccctcaattggtacggttccgaaacatgcaaaagttctccgttcctggataacgacttatgttttgccttcttgggaacgctgcagctactttctgtccttttgttcttgcaaggtgccctacggcaaaggctacgaagatgcacacctagatcggggacgtgtaggcttttcacgtgcatgcaccgggtgacgtctctccaagctgataaactgcaagcagaaaaagactgaaaaggtcaagaaaagggaaaacgttccaggacgtcacgacttccgagcaatcaggtcaagccgtccagtccaaaatctctttttcgtcacctgccgggtgagtttcgtagctagtcttccttggccctccacccgtccactgtgcgcaacggaacgctctcgagcaggctgtgcgctttgcatggtgtgcatgctggctacaattttctcgcctaaattgtcttggacgggtcggcagcagtgaaattgtgagtggtttacgttagtaagtaccattcggggggcgcccctatgacacagtgcctgaggtagtcacgattacgacgatatttcaaagagagtctcccttcccggctggcggacagagtcttcgatgagaaagggatctgtgctgccgttttatgtttgaagatctcctttgttgatggcaagggagtgttcagagttgaacacacgactccagtcgttggacatgtcaagtgaaacagaagcttctaggttctgtttcaccacgcccatatagcggcctcattctcctcaagagttgtcaaaagaaaacgaaacgccttcgttgttcaagcttcttagagtatcagcgacatgtttgtcgctattgtgggggctcgtgaatcgaggacggttgcggtgccacgtgaattgaactcgctgtgactttccggagtccccgaaaccagaagacgtcgctttccaggatctgcattttcctcgcgtgtcgtatatgctctgtgtccttttttcgagatcagcgtcggccccgtgaaatgacgcaaaactcgcagtgctccatagcaccgtagagcacttgccctcagatccctgttcgtgtcgacttggtctgcttacttgcatctccaaccctgagtgtcactgcccttttcgacaa

SEQ ID NO: 3299 - DNA, 1668 bp, Toxoplasma gondii
  source 1..1668: mol_type = genomic DNA
atatcagtgccacaacatcaccgaaggactgcgaaacggacgaccgtggcgggtgtagccagtcgttgtgatgataccttcctcgtgtctgagtgaggtcggacgactcagtgatgaggatagtccttgtctgcctcgtttcggatacacctcacgcagaaagacatgtaaacttattacaatcggataggttaaaggggatcctctgttgaacgtagcgggaacgtgcgagaaaccgcaacttggagtgcgtgtttttccactgtaggccggagaaccagtcgattgttcacgaatgcgcggttgtccccaaaaaagtttgataataaatttggtaaaagtctctttatactcactggaaagcaagtcagtcacgccattgttggtggtgcgtgcggtttgagggactctttaatgcgatctgttagtcttcttatcaagggatggtaggtggcatgcatttttagaatgaggagcgcgaacggtaagcgaatcgcatgttttccaatgttacacaggggtgccggtgagcagaaccaacggtgttcccgttaggcagtgttgtgctgacttctatacgtcactgttcccgagaacaatctaaaattgtggcactctcgttgaatgcgaggctttgatctcatgcttttgtcgcaccgtgcgactctgaagttccattaaccggacacagtgcggtaatagaaccaagagcatcacagcatgtgctttctctccgcaccacgttgtgcagagtttcttcgtgtacgcatatagagactctgatatatatatatatatatatacagctgacatatatatctgagaacgtgcagaagatgggataaatggagcagtatattgtgattggggtagtaaaacaaggagagcatctactgaaagtcatcactagaaactgacaataccgctggagaggtgtagtgttcaaaccgcgaaggtcacgacgcgatctgacaggccctctcgttgtttggttcgtggagaatttttctggctaacgaaaaaatgggtaccggcaaatcttgcaacgcagttcgagctgaacacatgaacattagaggcggggcgcttacacgtgctagaaaggataagactggttcgttcctgtggaggaacgtgcgttgcacagtaacacacagttaccgcttagcgtttagtgctgtatctggctctgcggcagaaatgaacaacgccgttctaagggggaacaacaaagtttccgacagccccttcatatcgtcttctttattgttgttgcatatgcgtctttgtaatgcaaatattcggcctacaatgtactgaaacatgttatgaggtcgaggaatcggcctcggttcgttggcctgcatgcacacagagtatccgtatatacggcgacggcccgcaggtgggcgcatggatacgaatatttcttcccgtttcctgtttgtcggccactgtggcggtgcctagtcggctgcggaagttcggagacagccgcacacagacgcgggatctgtggacgttagattttcccgtttcacgaaaaaggaacgtttgaacgcaggcttttgtgtggagcaggttatgcgggaggacgcactgtacttgcaaggccctcttgcagtctgtccctcaaaaacgcactgcgagggcggattccgtggttga

SEQ ID NO: 3300 - DNA, 4566 bp, Toxoplasma gondii
  source 1..4566: mol_type = genomic DNA
cgtctgcggtagagaatatggaaacgaggtccgacctcgcaggtctcgcggacgcctgatgacgcgtcatgttggacgcgcgaaccgccgagagcgaggcagacgacagaggacccgcaaagagcagtggtgaagaaacagggcgtctctcaggtctggcttcggcatgaccggtgtcgctcggaagccggccagaggctgcctcttccgtgcgaaagccttcttcttcgcggcccagacgtacagactcagctgctgcttctgactcgagaaactcatcgtctgatccgcgatacgccggcaggtgcatagcccagcactgtggggagggcggcggggaggagtgcggagacagagaggaggtggagacgcgcctcggctgcggcgcctctgtctcttcttcaccgcgagagtggggagagagtttcgcgtccttttcgggcaccagcgcccactccaactcctcctgagacaaccagttaggagacgaaactcccgacctggacgccttcccgtttgtcacgctcagacgccccacggacggcgccaagaagtctcctcgcttctcccccgtcgctgctgtctccggccggtccgcctggacaggcgaagcggcggacgacggcgacacagcttgcgcttcatgcatgttcgaggctcgtctcttttcagcagccagtgcggctcgaaggggacgaggagcttccgcgaggaacggcgcagtcgcaggacgccgcgccccaacgaccgcggtcggaggcgaggccggagaatctccgcctgtctccggcgtgtggagggtcggcagcggggagacaaactgcgaaggctcggagccgcgcggcgaggccgaggcagacgcgacagaagataactcggacggcggcgaactatccggagaaggcttgggccgagccgacgggggcaagggagcggaagccatttgaccttgagaaatactcctggaaaactcttgcacacccttctcccgtgatgacagcgaagtcgaagaagaggaggaagtcgaagaagaggaggaagtcgaagaagaggaagaaggggaagaagaggaggaagaggaagaaggggaacaagaggaggaagaggaggaagaggaagaagaggaagaatgtgtgttacggtctttcactgagtacagttgagctgaatcgcaggggagaggctcggaaacaaatcgagggttctcgtctgcacatcgcgagagaggagatcctggagtcgaggcagcatgcttcgccaacagtggctgcgaggcgagggcagaagcgagacaagtgagttcctgcgactgccgacgcgaggccttcgcacggcctggcttcgactgtgcagactgcgtccaagaagcgcgagaggaagaccgcaagcgaaaaactttcagtttctcgagagaaacagaagaaaggagagacgaagaagacttgcctaggttggcatgggcgtctgttgtgctgcctctccgcgttcgccggagcgtcgtggcgaaggggagaggcatcattaaacacccaagaagaacaggtccgagcgcgaccgcgaagcacagacggaaagaggcaggctagacgaaaccgcgaagagagaggagaagaattccaactcgccacccatcaaccctccgacagactgggctgcagggaaggagaggttggtgaagagagagagagaagaaggcggagaagcgggagatatcatctgtcagagaaaggaggaaggcgcggcgataaagaaaagaagaagttgttctcgagagcaaagggcgaggagcaagaaccgaggcagaaaggcctttcaggttgctgacggcgttgcgaggagaagaagacgagacaacaagtagaggacatgtacacactgtcgagacaccgcgagagcgtctgctgcgcatgtcgctggtgcggtttcccctgaaaaaatcgtctgtttggtccttgcagaatgcaccaacatgtacacaggagagccagtcggcttcttcaaagtgtgaagtggaaaggtgcgaacagtctgcaagcctgccgcggaacaatacgcagtcgtgtgaacggctgcgtcgagcggtcgggtgtctcccggtgtagacgctgcaaacggagaggagaaagcgatagaggagagaaatgcaagtctagcgtcctgagttggcagcgcctctgcgtcgtcaagactcgaggcagggttacatcgaagtccttcctcttctacacggcaggatttctctccgtatacacaccctcccgcctctgtgcaaaagtcgatctctcgcgtgctcagaatcccagtgcagtcactttagctcctcagttccctctgaaacgaaagagagtgtgaagagccgatagatgagaaaaagaacaaccgaaagatcttggttttcaacgagaaaacaagacacgagtcaagcgaaatccgcaaggccaccggaaccgaggaactgcatgcactgctgcctccggggaactagctgccctcttcttggagaagcgtccgtgagtcgagggtgcttgtcgatttatgttttattgaatgttacatcaaatgtgaaacagcaagctgcggttccaaattcagcgagttcgtttctgacacatttcagtgcttcaaatctgtcaagagttcctcgacagtcggatgtacagatacccagcaagtcggtaaaaagcgtagacgcaggattttcctgtgtttgtacatcattcagtaggcagatgcttgtctgacctcccaaaattggttccctggtgatgaggaaatgtctcctggagtgccgctcctctctactgggtcgcgcgctcaagttgtagagacagatgtagatgtaactgtaaataactcggaaggcatgactgtcttcccccttgtagaacggagtttcgcgtctccttagccttctttgaacggatgctctccacgttttagggaggaatttggcgttcccagttccacgctgtacgttgaggaggcaagcctggcactgtaggagcatatacaagtggatacgctaactgtgcaaacgatccgcggtcccgagctgcatcgacagagatgtcaacaacgagaaagctttggcaaagtcagctgctgtagagccacgtttactacctccaactgtgtaaaaacgtgcacatctcgcgcaaggaattagatccacacaaaataggggcgagcaaatgcgtctgtaccgctggagactatcacgcgctacgtccctccgggtattgtactcggaaggtccctagtatgctaagaaggtccgccttttctttgtgtctgtccgtaactgcgggacagacctactaggaaatcaaattcactcaaccatatgtccactctgtaaaaagcgacaaacaacagctagcgaggcgacaacgctgcgtggtgcctcccatataagcaaagggcactcgaatgggtggctctgaccctcgcaagatggaaaaacacgcgaaaggagttgtttactgagtggatcggcaccaatccgtttcttctttacgaatccttacgataataaaagtggaaattccccagccttctactggaaacacctgtgaacaggatgtacctaaaaggtacaaaagcggaagaaccatggcaaatcagaaactgccgtctcgatttccgcactctcgtatattctgcgccgcgcaacatgaaaattggaacagctctgctttagccgccaaggaaaataacaaactaaaaaaatctcctgcattcttgcttgtcgccgcaagccacgagtatcgtgacacgaggcggcgatacgaatccatttttgtgcttgcgataaagaatgtagcaaaacgggggtgatgcatataaacaccatgtggcattgtttcagtaataaagcactcgcactatggcttcggcatggtatctgaagtgcgtgcagcgaacggacctagcgccagacacctggtcgataccctggaacaagcatcgaaactcgttagtgatctccacaggaaacacaatgttgagaattgcgacctagacagggttgctctgtacatgttttcctttgctgatgcagctttacacggcgtaagaagtggacgatttgctcgaatatttcttttggatcgtcggttccgcttacgctgttccccagaacggggtcgctgtggtcacagaatcgttgactctgtgcgtcgcaaagaaatcctgctggccatggaatgtgcagagtgtcacaaatgatttttcgggatcggctggaagcaggtactgtaaaatcgatttgcgtttcttcttgagtggtctacggaccgtgttcgattagctccccctctacaaggtttgtggcgttcgtgtacggcttaacttctgttccgtgcctgtgtgtttctctgtgtcgagataccggcgctggagaatgtctcgtccatgcgttatgaagtttaatccaggagagtcgtgattttgggttatgtggtttcacgtttgagaggctagttgcggaagaagttgagtgtgactcaagggctcagggaagttttcaactcacttgtcgacttcagtccctatcagctgcggcaa

SEQ ID NO: 3301 - DNA, 1972 bp, Toxoplasma gondii
  source 1..1972: mol_type = genomic DNA
aaatgccgtaacctttatttggccttttctcagcagtgctacctgccatatatatattatgccatatatatatatatatatatttacacgtttaacgaaacggtgattctgaatcgttcaagcagtgttgggaaccccctgagaacaacactcttctctcaaacagcaagtccggtgacgttttgcttaaggtaggtgtataatttggtggccggctggtgttggtaaagtaacatcacgagggaaaccggctgttttctgttttttgtgcaccacttggtcagtttctacgggactgctcgtacgctaggttagcaatacgccgtagtcgagactttttatttcagcagtattcacgagttgttgttaatcgacgtgaccgtttgagcaaggtaagcgttaactcgatgctgaccgacggtagccagggaaacgtgcacgaagaggttgcgacctgatcgccatagtgcccagagggagagctgagcttcggtttgatttgacattgcacataggttatatgactggagcatgagcctctgacatgaaatactgggacacgcaaatcaggcgtaggtcagatttcgcggtgcgaaagctcgcacgtgttctgataccttcaaccgtgtggacgacaggagaagtcccgattccgcagacgaatggactgcacttgcaaagattagagcaagcgatcggaaaattttactctttctggtgttgtgcgaaacgtgaagtctcaatgtgacattatatttcgctgtatccaagataaccacggaagttgatgtcatagctgcagtttaaggatgcttcttgaagctgaagctcgctggtcctgcccgaaatgtatggatttgccgactcgaggtcgacgcgtgtccgtatgcgggagaatccgcagaacaagaccgcagcactcggcactgcaaaatcagtcaaccgataccactcgagaatcgctccgacctgatgaatttctcactagcgtgctctggcgatctgccgaatacgcttctggtatattccgaccaactatgtcgattggcgtttcgggcacgctggattggagttggcgtgcgtttgatagccacatttcaagtttagtggttcatattcgttttgctttgtggcagcgcgcttttttaacagcatctgtttccactgaggcacaagatgaagctcagccgctccagaatatcgcccgctcaaccaaccagtacattgtactggggtcatgtttgtgtagtggcgagtgtctgcgaagaatgagcctgttctgtggcctgctagagtgcgatttgtagctaccggactatcaaaaaaacaatagcgaggctcgcagcaaatgctgactactgagaagtgatatgttgctccgttccagttcagatacgctcagaagaactagggacgaggctttcttcgtctagtttgtggaatttgctagaaggatgtgggcatccaagaaggtaacattgttcattggaaagattcctgatggtggaacggtggtgaaagctcctgggacgtctagcccgaaacgtcgaacggaacggttgacacagttctttgttgtggtgtgaaagggtttcggaaaagctctggcggcgaaacgaagactaggaagaaagttgcagtgtttcggactttcagcgccagtacgatatccaagtatttctcaggattcgaaatgtgaaagtcacctcaccacttgttaacacgacaacgacgacagcggagcttctgttccagcgtagctgagacaacagtagctttggtcaaaagcctcttccatatatgcttccagagcataaacgcaaactgttcgcttgaaggatgtcctttacccgggaacctgtttggtgtttgttttcttcagcctttgatgtagtgcaccctgctgtgcgttgtggcaccgcataaacagcgttcgctttcgctcgttgatctttgagacgccgtgaaacca

SEQ ID NO: 3302 - DNA, 3580 bp, Toxoplasma gondii
  source 1..3580: mol_type = genomic DNA
cagatgtttctgttatctgaccgccgtagagtcgttccaactttggagataggaagagtgatctgtcgtgacgaagtttcaatgatggaaagtggtggggtttctatcgagtaggcacaactggcgagattgtcccacttgcgttcgtcttttgtctcgatgactctgtgattaatcactcgtggcaagggaggaaagaaccagacactacgcagctagcctgtacagtgtctgcggtggccatcatgaaacgaaggcagtaaacatcgttaaaaaccacaactctttttactgtggctccctcgcatcggcagctgaacactgctcttgtaacaatactacgaatcttttgtcgatcacgcaagcggatttacgactaagcggtgagcgagaagcttcgctacctcgggggaaacatgtgctgctcatacactccaggatggaaaattggagagaaactgcagcaaacgcgtcagtgtagagcgcagaaagctctcttagctcgaatgtgtgacgtccttatgacgaaccccacgagaaaacgcgagcatgttcttgagtggaaatcgtgatatccgtgaatgtgtgccgaccttgttcgccgcgaaccgctttgcacatctgttggaaacttccgcgcgaactgctccggcaatggcagcacgaattcggtgcttggcagcctcacgtgtcactctcgtatggccaagacgaaagcgacagaaagcttccaaatttcccagagtgaaaacccaccacggtgtgtggactcgtatgcagacaaggactggacaattgcggtctgtaggccgcactacaaggtgggcgttgccatccgacgtctcgattcacgtgatacgttcgcaaaatcttgattgtatcaagtgtggagcgcatcggtgactctacagaacgtagtccctgctgagaatctggagcagctcttgccctgttcgagatcacttgtgtcatgtgtatccgtttaggttttctgaccaggttccggtgtcccgtttctttcctgagttttcttttcacgtgaaggcaacggcagcaacacgcagattctcgaggactcgatccatcacagggtgactgtggtagtagcaattgatgcacttgagttgttctgctctagagcagtggcgactttcgctgcatttttagcgtctacgcacggccacaaagttccctgtttaggtgcttggattctgcttcgtatcgccgcagttttctgtagaaagtatccatccagagactgaacgtcataaatggacccgtgttttccgtacagacgagcacaaggaaggcgacataaaccaaagtgaacattttgatggtcatgcagctcgtgtacaactggtttctgctccgcgatacgtcaccactgcatatatttccgtgtcgtcagggtcaccgcctcgtgaaatgaacactttttcgcgcgaaagttatacaaccaagaaaggcagacgcgaaaacggcgtttgttatttgaagcttcgtttaaatcctcttgtttcacaggagatcacaactgaagggagagaggaaaacagtagctggcagctacgtcccttgatttggcagctgcgaacccaccaaaacagatggtgacccagagagcatttccgattgcaaatccacgccttgtgtagttcaaaaataatctcttactagcaaaataattcatccagcacaacgtacgcaaagggctgttccgggaattgaacccgggacctctcgcacccaaagcgagaatcataccactagactaaacagcctgggagtcactctcagtctcttgacagtgtcacttccctaggcgcctgctaagagaactcaatatgcgtcagggaacgttacttttccagtatttctacgtccctgtttaacagactcctttcctgcacctctgaaaacgagacaggcgcctgagtctccgtattttcgccagcaaacgcaccctctgtatcaatggagagggattgcaggtttttcggctgaagctccatagaacgctgggttccccacctctaaaaagctacggattttgatctcagccgattcgtgcggcgtcaaaactcttttcctacccgaggattcgcgggccagtcgcttgttcccacctctcgatctgtgattcccgcgaggtgtttccctccctaaagagttccctgttggcgcgaacctaagccctcgtgtgtggtaacaggaattcatccattacgcctgggatatgcaacaccgctcagaaaacacccaaaaaagctagactcttcctgtcgtacttgaaacagcgtacaaacaccctgtgtacagcaaataaagcatgctgcgtgggagagttgctgcacccatcatagcaggacgcgagtgaatcctcagaggaactcgctgaggcttttggattgcccggtcgccatgtccctgacagttccgaagcactaagaaccgagacagctttcttctcgacctcgtggaacactaggtgtttcagatcgcactctctcagggacacacggaagtgattttcagatggagctacctgtgccaacgcttctcacgcaactcaatttacagaacctccatacgtttttcttccgcataaagtaccccgcagaaaagttctgtatacttgacttgcatgtgtgcgtggcacttgatgcatttgtcgatccatcgtcacgagtgcgattctcgctctaaatccaaaatagaacgggtctcgacttccgtgttggcgcctccaccaaccctcgcgattcttgccgagtctgcagcggaaaagttcgcagcgaaccggggtaggaaaaacaggagagaaccggacggcgctggtgtaaaaacgatccgcttctgtgtgttttgaagccttatgtttacctgcgtgaatcctctcggagagtctacgtcccatttctgccagaattgaagacgcacttcgtcctcgctttctgtctcctcccagagtatcaaactttcgtttttcgagacactcagttcgccaaaacatcagtcctccgcctctgcatgtttctggagaactttttccggggattgccacggcagcagaaggtgttgtggcactgcatgcatggatacggctgtcctttggagttttccttcgccctggccgttttttccggtggcttttcgctgttttcgctcgagcttctcccttccaatgcgtcgcagagagaaactcggaagaactcgctcattctctcgtgtacgtcgccgtcgagcgcgcgcctctcgtgatttacccggcggccaccgtccataattgcaaaaatggagcggctgtgtttccgtctcctctgaaatccttttcattcccttgcacagagaagctctcttcttctgctgccatttctctgcaccttgattctcgacggcaaccaccagcagcaacgtgtaggggttgtccttttgtgtgcacacaagccttttcgccgcaggtttaccgcggctttcttctgggaggggaggtctctcttttccctctgctcgagtttttcttctaagaggttgaaggaggaagaaggtgcacaggcaagctccgaatcccgcaaaa

SEQ ID NO: 3303 - DNA, 1357 bp, Toxoplasma gondii
  source 1..1357: mol_type = genomic DNA
ttccgcggacatggcgattcgtgcaatccctttccggtgttcgactcgacaccccctctgtgggggaaacatactgtcaaggagcaccacacaccttgacgtttctacagaggcgttgttcgacttttattaagagacaccgaaaatagactgaatctttgcagtcgcttgcaactattcaggacgtgcgagttccgtcgaaacaaagtggaagagcctttctggcatttgaaggttgttctgaatataccagattcacacttttctgactaaaatgcgagatttacaattctgaggtctgcctagatgtctggcgtactcccaggttcagctcatgcaaaaggtatccccgttctttttgacaggtagcgcggcgtggaactacagaagtaggatatttcttttcagtctcagcagcgaaaccgatttcttctcgcactctaaatgctgaacagcaagactccgccctcgaccgtgccctgtgtttcgaacactgtctccgtttattcggttggagtttcacagttctggatcgcgcatcacactgaaagtagatgttgtatactcaaacctgatttggctttgaaacctggggatatggctaaacaccggaactcctcgcttgactttgtactgcggtcctcactgattaagggcgaatcgaaaaaaagcctcacatttgaaagtccctattcatttctgacacctggccaatctcaatcatgttcagtgatcgcctccccccctccttaactaggagtgaccattcactctcactgaggattcctaggatccttggcagcatgccctgcatcgagactgggtccttttggaaaccaagcagtgaaaaaatattttaacaggaaggggaagaagcatatacagtgggtgccctgttgacttgagatgcgcagttgttgcacagctcatcacccaggcacgacagccgaatttgccgctggtcgtcacagaaatgagaacttgcagagttgcaggtgtgtgcatcttgtttcttagaaacatgtttttctatcattgtccgtgtttcatgtgaaaaagcgtggtttcgtgtgtcgccgtagcgagttcacaaagatgtgcatgcgcatgcagtgactcgccgtcttctgcactaagaactaaccgggggttcacaaaatcttcattcctgcgtcacagcgcccttcgcctctgtcgtacattccttttcacacctaaagcgacgcattcctttggactgaaatcccccagcagatttttcgccagtcttatccggagcttcttgcgcacagtcgcctgttgcccgtccagagcacccggaggagcgcgttttgttctcgagttcctcaaggcaaaa

SEQ ID NO: 3304 - DNA, 4666 bp, Toxoplasma gondii
  source 1..4666: mol_type = genomic DNA
atgcccattttgtggaacgcttagtaatttgagtcgacccggtagacgcgccacctcgaagatgactccaccaatgaccatgacagttgcgatacggtctctgcagagaagggctggaaccgcttgaaccgagagtggctccaaggaaccctccgtgcgtttcaggaatgtttcgaatccagagaaagcaaaccaggactactaaatgaaacagcactccaccggcataaaccctttgaggtccaatcattctacggacgacgttttgggatctcaatggcggaatcagctacgaagggcgcagagtcgcaaccgcgcacctggtatgacaacccaaaaacgggcatggccacttgattttcacttgaacggaaaccactacagaatctgaaactggttatatttttggaacaggatggccagactgaccgtgtgagggtcggttcaaatattctgtccagatgcacaacaccaccgacactatggagtgaagaagtctcgcttcttgcgtatgtcaagaagtataaattcacagcgttctctcaggatggggcacaagggtgtgatcagccaaaaattgccttgtataaaaaagggggtttttctggagctatcgaagggcgagagaccctaacgtcatcccgcagttcgaacgcaaacgcaggcggacgaaagagcggctgcgaaacagatgatgtgaaggagcaccacgaaaacaaacacttgctgcggtcttttgctgcaacacggccttcttcaattactggattctgacgaacttgcagcagatcgttgttggtggtttcgattattttggccaacggaccgtttccgcaccgtgtgtagttgtcgtgcagaccagttgacgacctcgagcatgttcttagaagagaggaaactcactgacacttcactcgcctttaatttcatcgaagaaaacagagcctcaatcaagaagcggcgtcaccggggggtcactccctcagacaagtgcacgggcgacatatgtctcttcgcacacgctgaagtaaggctgtgtaaagaaaaaagcccgagaggcgactgactgggacgtgcgccttcctggtgtttccagaattctggaagctgcgttctgtaaaatcaaccactatttgacatttatattcttttctactagcgagcagcccggtctccgcagaccattgaatgttgctgggaagaaactcgaaaggtcgtccgcatcttccttggttgcagacgttcggctaacgaaatactgtctgcagccagtaacacgatgagatggtcatgaataatacagtgaattgtccagagaattatcaaaagagcatggttcccggaggatgtgaaagtctctccatgtctgtcacctgtggctgcgtgcatgcgggtgacatctctgacgagcgcatgctggtgtgcgtacagtcgctggtatgatcagtctttctaagttaccctgtcaccatttcccctgcatcctatccagctactggttcctcttgaagtaaaaacactacatactatctggctcttttgttccgcttgaccatggccctgcacggagagcagaagtgtgaatcaaaactcacacgcaactccatcgttacctctgtgtatagttcggccgggtgaaacgttcatacgcagtagttcgcagtagttttcggaacttattcctgttagcaaccagcccaaacacacgggacgagagcacatatcccattgctgtgacccggaatactttcgccaattggctgggcaagcgaggggtgaaggagagtgcttgaagtgagagaataattcccgcttcaaaccaggaacttgtaacgcctcagacgagcagcgtccgagacgtgtgcaatcgatgcttcgtggaccaatctgacagggaaccatgacatctagtctgcaggcaaacacggatgcgtggccgttcgctgaccttccacggtcagcaaaacaggcacgactcccttgcaccgttttcttgcacctgcgcctgatgtcccccaaccccccctcctccaatgaatggaccacgagacacaaacttggctgtattctgaagccgttttatttaggcttttgctgttccagtcgggctgtttccgcaacgcggcactggagggcctgcatggcttgccaacagaaaacgaccgatacaacctgtacacccaaatttaagacgaagtatggatccaacaacaacaaatatgagttgtggtgttttttttggttagtgaaatccacaacagaagtagaccgccgacaattctcgaggcaaacagcgactaaaacgtaagggcagtccataaaacggaaagagatagaccccccgaagcgtacagtgatcccctcaatgcttccagacttgggcatctcagcagcgagatgtggtatctctcgccatgttaccaggagaggtaggcatgggcccatgctgatttgcaagggaagaagccagtggtgaaaaagacgtgcaattccagcaaacgcgtctggcacggcgaaaactgtaactctcacgcaggtcacggagagctgggaaggagcattgaacagtctctctagaatcagcgctacagacagtgcgtgttgcaaagcgttgaggcgacgctttattttgatagaaatgcgaatctggactgcataatagccgcatgaggccaaaggcatatattgatgagaccgagtcggcggttcattttcatgaatgacagagaagggtttaccagaaaaccacacaacgcacgtgacagtgaacactattagggccccatatactgtggtatgcgtggctgatcacaaagtgtgttttctgccacacaccaaaaaaccgaaatgaagttggccctggtctggaatgctatgttcaccggcagaaagtgttgccagtagaagagccgaaatgaatcccatgttgttccaaatggctttggtcgatcagcgcgcgaaaccccctagtacaatggagctttttctatcggtaggcgtcgtatgacagcagcaattttcaatccttttatcgcgtccacggtttctacgggtcagcatttgtatactgggacatttttcctgtcgtaggtaacaactatcaaggatttggagctaggatcacttgtcaagtccagtccgtctactgcgaccgaggtgggtctcggagggaccccccccagttttggggctgcacgtacggccgttccagccggtagttgagaggccaattctgcgatccagtgttgattcagcgtgtccgtcagcgtatgcaactccgtttctgaaacatatttttctctctgacgaaggaaggaagaaactctagtcacatgccgagtaaggccggctcatgcattttctagtccctctgtagaagccttctacacgtccctcggcttcgctcagggtgcgtcacacactgtgttcctgttgacgccctcatggtgccccgttaataagtcaggaacaaccaacaggagatttgctgacgtagctgtccacagtcgcgagacctccacatgaggcacaccatgactcgcatctggcaccagcgaattagagaagcgccgaagaggaaaaacacttccgctcttcctttgtctcccgaaccctggctctactgtgggcaactcacgtttagtcaattgctgcacctgctgttgcgcgtgtcttcttgttagccaatacttacaccaaggtcaacgtaaaaccgcacgtggatggaagtttttcaacacgaggtgttgctcacttaatatagcgtcgtacatggtcacagcacccgcgttgagaacgcaaactgttaccgaccatattgtggactcttctcactctgaaaggtgacaacagaggccgaccaaacacatctgtaacgtggtaatagcgctgtgaagacgcccgtttgcggagtcttaaactgctgcgaagcatcaactgcaaatgacatggaagctctttgcagtaacctgaaattgtcaggacctccgtcggcttgtgcagcgggatacatcggtggaagatggagcgctataagcggatcaagcggttaggcgcgggagctcaaggctattgctacttggttcgggacaagaaaacaggtccgatatagaaaagcaaccttgatgccaggttgcattcctggagaaggatgcatttctcgttcagatgacgttagttgacggacagggagtcactgtgaccttttctctgagaccagagtcaatgtcagcccttagttttcccgcttagttttcccggcaccctagttgttgtcaggcagaagaggagttacgtcatccttttgtacctgtatgtggaaactagccgcgtttcggtatgctgaaagagggttggtggcgaagaacttccgcaagccattgaacgtagaagtggcgtttgcttacacgtttttcaaccacagttgagtgcatcggttccatgcggagaagcatcttcaagcgggagctcttgtttcaaacaaatgcctcctgagagcacccacccgttcaccaactgactgtcgaaatttctgtcgtctgcgaacgttaacctgtactagtcgcacctgggtgacacacaatccactgatgttcttgttagtgtaacatgtgccttatatgcgtttaagggaaactgtatgtgagcaaagacatcggtctctcca

SEQ ID NO: 3305 - DNA, 1011 bp, Toxoplasma gondii
  source 1..1011: mol_type = genomic DNA
gggcagtactgcaagctgaaaaacatccgttcagcccgtcgattcagctctgtgctgtcgatctagagagttgtttgtgtagacagacttgttgatcggtgtgacggtctgccatatgcccgcctccacactgtataagcggcaccaaactcggacgtcttcccacagagcacatggtaattgctgccatcgtggaattagctcactcactggttctagctctccgccccccaaaagtgaaatggatgtgagcgttcaagggcagcattcgagcttcaagatcccgtgccgctcgctcgtctgcgcaccgggtctccagtggctgtccaacgtgttcgagaccttccacctacttctattcgtgctcccttaggcgttacaagagtttccgtgttgctaccatgagacacttcacctcttcgcatcgcctggcatatgcagaagccacacactaatcatcactggctgcacgtggttccggcggccgccccatcaccgcaaccggcttccgtagaagactatcccgcaacaacggctaatcttcgagaatctgtttggcattaggaatgcactgtctcataaatctccttccacaatacaaaatatctgcctattttgggcgggcaaatgtggaaatcctaaaaaaatcaagaacggccgcgtggcatgtggggcagcacggatctggagcggggcacttgtagccccaaattgcaactctgtgtcccagggatccgaggcctcccttcaaaagaacttgtagaccaagtgacgcacaatcacacagtaccaattaaccttttttcagctcagaagtagtaggggaacaggaaatctcgcagttccagactctgcagaaaggccgttcgttgtagagccgctcccctctccactgtagtgtgtccgatccacagccaagtcgggtttcacgccccgttctccaggttcgttattgcgtctagaaaataatgagaagagttaagctgttcttccctgactaatatctcgtga

SEQ ID NO: 3306 - DNA, 2767 bp, Toxoplasma gondii
  source 1..2767: mol_type = genomic DNA
aaacggtgcacgatttggagagcggttgagtgtgtacgttcttgaatcacgttagctccttcgcgcagttggtggggcaattcgtatatgttcgctgcgcatgcacgacgcacccaaaaagcgttgtgtcgcatgcaacggctgtggcgcaacttacacagatcccccgaaaaggcagacgtcagcaaagagccccctacaaggacgccgcaatgcgtgaacggaggaactcgaggtcacccacgaccgacccggcagcaaaacagaagacgcattcaaacacagaaagcgatactttgtcagacatgtatgcatccatatatagaaaatatatatatatatatatatatacgaacaggtgcggcaccctgcagcacatgcatatatatatatatatatatatatagtataggaggtagtggatttgcgacccttcgacctactcgccagtttgtctgccatttcaaaggcggtgacggagacgttttggagatccgtcttcgcctcctccgaagaatgcgcttctcctgccgccgcaacgacttcaggtctgcaacctgggaggtaagcagccgagtacagaggatttccgagggtttgcggccctgcggagacgcggtcggaggcggatatcgagggacgcgacgagcgagcctcgctctgagagtagaagctctcgttttctccgggcttcgcgagcttctcgccggcgacgggggcgtccaagtacgcgctggcgaatccagccgagtcgggagcgctcacggcagcagccatggtggaggcagagaagaagaaacggagaagacgcggagaaacacggcggaaaatatggcaggcgcagaggcttgtgcggagcaaacgaccggaagcgatgcggggcgacctcccaggtgtacgtacaccggagacttcgtggcacaggggagtcgaagtatttcgcgcagcggtcagaattgtggtgttccactcgaaacgacggagagagagtttgcgtgcagagttgttactttctttcgaggcatccccaactcgtgggcttcgcgaaaatgacacttgtcctaggattgtggacggagtcaccgtttcgttgcaccaccgaaccgaagcgtgtgcaaaagaaacggagcaggggatttcctcccgctttcgccggccgtcgtcgcgcttctttctcgagctgacaagcgaggaacgaacgttgcgttcctctcgaaactccgcaaattcaaacccgaagttgcttcgggattctgtttggcgttactcagtgaattttcctcgcaaaggcgtcgacagacacgcgtccgctcgcacacgcctccctgtttctcgacgaaaactgacaagttttccaggtttgactcggattttcgccggatgaatcgcggcggcggactcgaaccacgcagcccggcgttggaattttccagtcaggttcgactgccggacgcaggcagtcaccgccgtgtgctgcgactgagtgactgagattcttcagggagcagggccgcagtcggaaacgaagagtggagaagcggactttccagtatgggcgtttgcttaaaggtcttgaaatggagagacgcagagcacccacgcgcagatcccggccccgcaggacgccaggttatcggagaatgcaggtgcagaggccccgcggtcatctgcacccttgagcgcccgtccactcgggcaagagaaagagcagcagcgcgagcgaggggagagaaaagccgagaggggggcgtcgaggggaagaatgcgagctgtctctggcaaagaaggaaggccagaccagcttcccgcgacatatggctgctagagagaagagccgaaggtaaagccacgcatttggggcgcaggtctgcgagcaaagcgaggtctggtggcatttgtttgtctttgtctcggcggaggtttgggggttttatagccttcattgtctggcttaaccttccttcttttcgacgaatgcgcgggagtcataaggaacgtgtgagaccgtgttcgttgcgaagtggaaggttagcgagtgaagaggggaaagagaggtcggtgttcctagaaaaaacgacggactgtgtgtctttcgatcctgaagctttcggtagttcgaaaacctatgagaggcgtcagaagagtcaaatctgtgtcgatggacgagctcaggaggcacgattcgcgccgttgacactcgggcggaacagcagacacaaaaaacgcgatggcttgttgctttttctgcagaaccgcagatccccttcgtctcacagcgtcggtgctcctgcagcgcaccggctctcgtcctctcttgcccctgtacaggaagagaagagttcgcacatgttcgtccaagttgcagccggagtagctccttcaggttctcttttcctctttcttcacaagttcctccacttgtctttgtcccttgccacatgctcccctcctggttgttcaagtcgaggggaacgcacatcgtctcaacgcatcaaagctacacatacgcatgtatgcgtgcttctctctagcattccacaaaaacgtatgtgtagtgttgttcagttggtgaatgtttgtgccggagagcgaggaagactgagtcgtgttggcccttctctcctcgttgggtttctcccacaggacgcttgttgaaccccagggtgttttttttttcgacggttgtctctctttactgatttccttcttttctccttttccctctcttcctcttctgctcttttgcttgaccaactgcttttcaaaa

SEQ ID NO: 3307 - DNA, 2430 bp, Toxoplasma gondii
  source 1..2430: mol_type = genomic DNA
aatatcgactgacagttggaagagaaacagtaacgtctccgcagtccagtctgattcctgccttttggtcacgcactggcagagagaggcaagcatccaccaccaccacaaatgatcgtgaatcgtgtaaacatacatatatatatatatatgaataaatatatatatatatatttgtacgtatgcatgcatgagtatcagcatgtatgtatgtatgtatgtatatctatggatgcgagtgtacgaatagatgcattgttctgtctggaaaagctgaacttacacatcgcacgcatttcttcgaatctgcgaccatcgtgtctctcgcgtttgtttgcagcttccgtcaaccgttcgcgcgagttgggcgactcataagggaggacgggaagactggagctgcttccttggaggagtgaagcatttgtcagtgcgctcaagctgcggccggagagacacatcgcggcgaagagactccgaaacgcatgcagttgctctcagacctagcagaagggtaggcaggagagatagcgagaaagagaaggaaggagggagagagaaaagaacgccaggaaagaaggacggaaaagctacgacgactaaaacgctggagaaaggaaacacccgcaaacagcgcgagagccaactggggaaacggaagcaggggagactgtcagcagaagagagagaggacaggtctagcgttctctgaaagaagatggtgcacagacgttttgcgagagtggacaaaggatgcgcttgcgcatctgcggtgggagaaaagcctcgacgcgacaccgggacggagacactgcagagtagaccgcggagagacagcaacgaagcggaagaggacgcaccgtcggcagcggcaagcaagatgaggcagacgagatgaaaaaagaggagagaaccgcatttcaacgctacaactttccagaggaagaagacgcgcaggtgagtcgaggaaaaagcagcggaaaaagcagcggggaggcgagaggcggagaaaagcagaggggtcccggagaggcggaacaacggtgctcgcagaacgaggcgacggaaattaaagacaaattcagagaggaacaacagtcggcgcgctctgcgctttctggtgagctggagagtgtgtgagtacggcgcagcgacgttgaaaagcagagtcggcagctattcagacgataaagacgattatccctggcgcagtctctgtcctaaggctggcagtggggttctagatgggggactttgaaaagcgaacaccaaaggaaagaggccgttttgctctagaaacgaatgaaaagtctggagactggaatctggacgcaaagtcaaagatcgcaaagatcgagacagcgtgagagaacacggttaaacttgactgcgtctgcgctgagagctgctctttcctgtgaggtcggcgcgatgggaatgctaggttggcgagggtgtgtttgagcctgggtggacgaatacttgcccgatagggacggtcgagaggactcccttttgcaaaaaaggtcgagacgtgatccgtttcgacgcctctgacgcccacagctgaacttttcacacttttagcgcgcgaacaactttcgcaggaacgtcggaaacggccgagctgcccacgggtcgggcccgtactgcgccggtctgcggtgactggcggggtttgaagaccaagcccaacagagaggcgcacagcgcgccgcgtggatttctgcgacgcggcaaagtcttcacggagaggagaagactttgtgccgcggtaatgcgcgccactcggcgagtgtacggaaattttcgaaaatcagcagaggttggcttttctgaggactgaggcacagacacaaccgcacccagcccgccttgtgtcccgcgcgccaggctcggtcgcattgagacctcgtgtttttcgcgttgggactttgcaggtgatttcctccggccagcaacgatttccatgcctttcgtccggttctgagaagcgtcgctttgcggaaacgtcgtttcttctccgtccggtgcacgcgaacaacgtggctggtcacgttctagatctaaaacatgcctcgtagcctcactaccaagcaggggaggcggggacggagaacaagattggaatcagtgcggagactgccaagggtttcgccgagaagctgccgtttgtatttgcgactttgatcccggtagtttcgatcctccaagagaagacagacagcgaatctggagcagttttcaatggctggggctgcccgcgccagcgttctttttcccaggaggcacgcggtttgctggccagtcgactaggcagtcgctctgccagcgccgaccacagggaactcgactttttgcagagttcgaccggcggaactcttactcgccaggaccgaactgactctgctcctctcaagcggagcatta

SEQ ID NO: 3308 - DNA, 1358 bp, Toxoplasma gondii
  source 1..1358: mol_type = genomic DNA
tttcttcgacccactctgaatcgctgcaaacgtcatgtagcagttcacggagatcgtcaggacgaggacgagcaggggcagcagcagctgccactcaagtgcgaccagcatgtcgtctgcccacgcgtagccttctccgacggagaaaacgttttcgcctttgtagcaaatcgcttcgttgcatgcgacgctgtcgcgcacacgggaaaacgtgaagaggccgacgccgagaagcgcgacggcgcagaccagccggaatgtcaaggcgaagtgcagcggcagggagctccgtggcgggcgactcttttggcgtctcccgtactccgcgagctctccagaaaccattcgccgagaaaatgaaacggtgtatcgcgtggagtcaccggcctgcggcttcagaggagaggctgtccggtcgacctcgaatgccgcaggtcccgtttgtcgtctggaagaccgagatccgttcgtcacgcgacttgctgcaggcaactgcggctcccaccgagtcgcaggtctctccaactcgtccacagggccccaactaacgctgatcggcgcatcgaaagcctccccagccatccctatctcgtcgctcccagtcgcagagagatctctagtcgaccccggcatctccaggtggacctcctcaccttcgccgtcgatgccactcagtaaccgccccccagaagtcgctccggacggcgcatgcgaccgcgcctcgtcctcccgggtcgacgcgggcgcaacctgtccagagatggaagtctgccgagaggcaactccctcaactgtgtcccgtcgctgcaaatgagacccggaagctcctcgctcgaaagatgacgtctggtttccaagagacatttccagcagtgaagaaactggcaggtctaaagaagcggctgggacatccgacgccgctctcgtgtaagaaccagctccgacataagacggattggcatctgaaaaagcttggatatctgaagacttatgggcatctgaaaaaacttggatatctgaagacggataggcatctgaagctgagccctcttcagcatccagtgtcacctcgcaggctcgggggtctgaggatggcgacgccgaaagcggtggctcctgcccccgctccggcaagaagtcggggatgatttcaatactcacggaggatgtgtcactcatcttggcgcagtctggaaaacagcagcttcgcaggaacgagggaagtgcagcgccagtgtcgaaccacgcacggaatctctaggattcaagtccgcgcaagtggggaaaccaactttggcacaccccccagaaaacgcgtgcgacgctgctggttgcgacgtcacccgcagtcccctgca

SEQ ID NO: 3309 - DNA, 2034 bp, Toxoplasma gondii
  source 1..2034: mol_type = genomic DNA
tcgactcgcaggttgtttgactgtcgaatgttcctcccgagcagccggggcgagctgtctcttcgtctgccggttaccgcgctccgaggaagcagacactcgcgacggatgccgcatccgtgtctcatcacttgacggagatgagaaggcgaggaagacctcgtctgcgcaaagtgcatgtccgccgagctgatgaaggtggcagctgtgggaaggagaagtgagaggaagtacggcactcggtgagacgtccgaactcgaggtgaacgccgccccatgcagcgacgcattttttgactcgagtggactaaaaggcgtacgacaccgcaagtgcagttgccacatacacggcccagcacccccatcccgctgttccttctttaactcgatgttgaacgccagcaaatgcacaagatgcttctgacgcttatctaaacggcagagattttgacaacttttccccgcggcctggaaagtggacaaatcgtgcgtaagtgtgagttacaaactctggccctactttgccatcgtccgagtattcctccactgatgctggtgacggagcgctcgcctcgtcacgagtgtgcaggggaaaagcaatgctccgtccgagaccagcaaacaggggcgctgtcgccccgcttgcatttttgtgttgtctcacgagcaagtggtgactggaagctttcgcatctcaactgagaaagtatgtgcgtcagggcgtcttttctgaagtgaactttccaggagaagtggaggaccggacttgcaggcaatagttccggcccgtgactattcaaacagggggatgagctacactttcgacatctgtctacggattcttttagactgcattcaacgctttagtaaactggaaggttgtgcgctcttcctcccgggccgacggttcgacctgtcgaaggcggattcgaaaagaaacatgggggaatgctaagtctttaattatggcagtcaccggcgtggtgcccgctgcaggtcgcccagtgactcacttgggagtccgcagcaaacgacagaaacttgtgtcggggctttcagtccagtttcctttccgatacgcgtgaacgcgtcaggtttttcgtttcgtgcgagtctgtgtgctcaggactgctttcccgacgccccgttaaagtcgtcggcaaagacgtaggtcacatggacggtcgttgccgagcgtcgaagtgactcgagaacgcgagaaaccatcctgccgatgaggacagaaaactgctggagaagccacgccttcttcgctggcgggtcgactctgagcagccaagccagtcgagaactcttccgtggaaaacctccaaacggagttcgctgcggaacgatgtgcttgtttctgcctcttcggaaacacacgcagagttccacttctttcgctgtgaagacgaaagtaccaagagcgacgtggcgcttcgaactaaaatatggccaggtttcccagctcaattaaaacgtcgctgaaggaaatagcaagaacctcctcaaaaaccacgcactctcggtgcatgcagacaaagagcttggcgtagcctcagaaaccggaaagctcccaacatccgtgacgtctccgcgcctctctcactggaaattagacttcgaggtgacatttgagtcgcgtttctcaaagccttcttcggcgtcatgttgctgttttcgcgaacagctgtccgccgtttcgagtcgtctcttctggaaccgagcaaagcgcatgcgtcagctgctcgtcgctcttttcccggtcccgtctgcctttcctcaacttctcgcaaatgtgcagttccgcaacgccgagaagaaatgagcaaagcgaactcgtcgggtctcctccgctctgccagtggacgttttcttctcgaggtcttcttctgtcttaggaagccggaccctgccaaggtgtcagcgcagcttcccaaaagcgtccgagcgcaaggagacaaggcggcactttttcttccgcgaaaaacgagagacacagaccctaaagaatccgaaacgcagcacaga

SEQ ID NO: 3310 - DNA, 3004 bp, Toxoplasma gondii
  source 1..3004: mol_type = genomic DNA
gtggagaggaaaaggtccaggctggtgaactccagcttgtctttctgaagcatgcagacagagtaggtcttgccctcttggatcacctggacgtaggtgcggcccccatccttgggctggggcatgcaaacctgaagtacaaggcaaaacatgttcacacggaatacgcatgcaacaacttgagaattattaatgatacgtatcgaaaaaaatcagaaaggaaaactcataaacgctgtttcggcttcgcgaaattccaccgtttgtttccttgtcttagtttggaagaccctctcgccttgcctccatcaattctgtgcctacagagtcacgagtcttctgatctcaaaggcttttgtggcgttcgaaaaatctcggctacggtctggttcggatgaaatttgaaaaaccacattcttgtagaggtgacgtgactccagctgaagcccgagaatcgcacagcgcttttgatacaccgcaagcccacagaaaaaattctggaatccgatcgcacctgacataagacccagatatcctgctgttttatcagcaacaggacttccttgagcacaagtatggacgggcaagtgaagtatcaccgtctgcccatgcagagatcaggtgtcgaaagcgttaacagtgcgggagatcgcgtgattttcgatactccgctaacacagtagaactcgcgtccggtaaacaaaaaccttcaagaactaaacccatgatccaactcgtcgcaaaatgcagatgaatgcggagtgcacggagaacagggcagctccactttctgagctgaggctcttcagtacttcaccgttgttgtacctgagacaagtgaagaacctcgccgccatcttcaggggagagagtgacggtctggccaggcttgacaacgacacctgaagagcagacaggaaagcatcagaagggtgtgatgagggcatgcttccaccggtcaagctgaagacagggcgcgaccggtgtctaggagcatcagctaaaggtaaaccggtgcctggttgcccacggaaaggtatgtccgtaaaatgtgcagtgactggacttttactcccgtgacaccgcgacgaaagcccggcacaagcgatctccggaaactacggcccttggccgcgttcgcctgtggcccattgacgcggtgccgcgttcgcctgggtcttgtgcggcgagcagggcggcaaaagccgcagagacttggaggatagtggtcagaaagacgggaaagggtaggagacaactcaaaagacagagtaagcagaaagggcgccgcgtttctctggcgaacctgccgcgtaaagcgccgccccacagcgaccccgccgactcgggtgctgccatcccgagacaacagataaggaaacgcgggcttttctccgccgtactcggccgtgactcaccgtagaacatcttggaggggagatatgggagagcagaggaaaggcggactcgatctcggaaaagcaaaagaagtacgcgaccttacaaagaaaatcggcgacgcaccagttttgagccgccgcaggaacactcggacgcccgcgcacggtggatgctcagcccaacatcggggtccaggggggccgagtcttttcacgcgctgacggcgccgagtgctcgaaaaggttgctggtccgcggatggactttccagccgcggcgccttcgtctcgtttgctgagagaccggactgtgagacaaacgcccgctgtctgagacgccggagcaatccgcgtttcgttgaagtttctcggccgccgcgccgagagaagtgccacacctgcggctgtgcaggaggacgcactttggcccggagcatcgcggatttccgagaatctcggcgcctccggttctctctgtcggggtagcatcgactcccacccaccaggagacggcgaaaagaactctttcccggtatcgtgcaaccagcgcagggccagcgaagctggctcccatcgcttgctgtttctgcagttggcggatacgcggattcagaaagacagtcaaaaacactggaacttcagagcaagaaagtgtccttgggacggaaaacgcacccttccacagcagctagaaaagaggcacaactactaggacggggacacgaaccccggtagacagcagatattaagccatctcggcccgcggttcttttttaacccctcccgacacgatagagagagacatggtttctccaataaaagcccttctcgtgcaccctttacttcaaccttcctcacttctttctgcacaaagatatctcgtattccaagcagaaggctcaaagggagcaactccccggtccacactcgcgttgctctcacccccctggcgtcgagcttcgcctgggcactaccgaaatcgcgactatccggttcgccttcgcattttccaaacgtcaacttgctacggatttctcttgtttccacctcccatttaattaatcgtctctgtttctgcatcgtcctcactccgtgtttcctcttccccgtttcgctccctggtttccgtgtcttctagcacacctctccagcgcgccctgtctcctgtgtgtctcctctccctgacgtcgaccgtacaaacacaccgttcgcttgcggaccccttcgcttctacctcttctcgcccccgttcctctcgtcttctctcccttctcagtctcgttccccttttcacccttcgtttttctttatccccctctcgcctggtgtctgcgccggccgcacggagcgccctttgtctcttgatcacccgttgatccttccgcgttccgtcttgcatgtgactcgaattctcttctctctccctttccgcctcgccgtgcattttccgctccctttatgagtcgcaactgtggttgccgtcgcgaatgcggttcctgtatcctggggtttctgccgacggcgagaaacagctacgcgaggcaggagggaggagacaaaacagaaactgttaatatcggttctccacgagcaagaacacagcca

SEQ ID NO: 3311 - DNA, 4374 bp, Toxoplasma gondii
  source 1..4374: mol_type = genomic DNA
atatgaatgtacatatgacagcgttccagcgtttgtggtttacctggcttcctgcactttgcagatgagttcttccgttgctggatttacatcgtcgaagaagttgccgctggttgcctcgacaaatttgccgttgatgaagaggcgggtttcgatgtcttctggtttgactgtcactgaagagacaacggaattccacggcacacgtacgtgtcacgacgagagagagggggagaaagcagtgaaaaacagtggttgacagagcgaagaaaatgtcgaaacgcaataagaacgtcatgtgccccatttgctgcgagctacgacgctgaatatggcttctgtcagcagcttgagacaaccaagttcgactggtgtccccctcctcaagtccggtggagtgctttgaaccaaagattgctaagaaaagctcacttccaccacggaaatggaggaattccacattgttctcagcgaaagacaaatgctgtcaacccacgaaggcgctaacctttcacgacgaagcgaggacgagaaacagagccagacagctctgggaacaggtgaaagtgtgtgtccattcggcgctttgtccgaagtggtccagttttaaacaatattaaacatgcaagaaaacagcagctgcacggtttcagaagtgcaaggaaaagaaagcgttggcttacttgtgttccggaaaaaggagtgaatttcagttctgaagagggtgctgcggcagcggaagcagtaccaagctggtccttgagcagcagggaccgcgaaaacgaagagaagggaggcggaaatgacgaaaaagatgaactcgctagcgtttgatttgcgcaccaagtcgcttcgccgatgtctgtcaaaggaagaaatgcgaaaaggaacgacggggtcaaaacggacgcttgacacacttgacacacaacagccgacagcctgctccgctcggcgtgtgcaagagaaactctcaaaagtaaaaagccaccgaagggattcagacaccgaaaccggaacagcatgcgcgtttctctgtgtccgtggcaatttcagggctttttgattgagacaaaaaacgaggtcctgcgattgtttccgcaacaggggccgacagaagtgaacagcgtgacagacagcgtgatgtgtcagtaaaatgcagatcgacttcagatttcttcgtggttgtcctcgtttcgctcattcacgctgaacagaattacccacggaaaggggggaacgaatgtatataaattccacggaaagggggaaacgaactgtttgcatttttggatgtcgaggtaaagaaacgtggttgcctatatgtctaccctggacagcaggttttccctgggaggcgggaatttttgtgggttatatgcgtgaaaattgtctataacacagctgttgagaacgatgaattattctggccgtccatttcgagttccttcgccagattctgctggacgattcacacactatgctttgttttcccagcggaaaacgcaaactccacagaaatatgaacgataatggctctttggggaactgtctttctcttcttcatttcctgggtcgcttgtgcaggctttgtctttccatatgtcgataattggaaacagaagcaacgctgcactgttcatcggtgtttgtcttgggacctttctcattcgatgattcagcaaagacgtcctcaaaagcctagatgccgctcatacacaggtcacgatggtcaagaaggagaaaaggaggcgacaatcgaaagtcgctctgcatggatacctagatcttgagagactacaccgacgtcaggtgcaactacaatgtatacttttggatgtccacaggacacaccgggtaacatcgcgtacctggaaattccaccgaacgacgtggacgaaatgctcacggaaaatagcacgatagcaggtcagtgttcaaggccggccatgctaagtttctgcagctcaagctcaaaccctgagggggaaggatcgggctccagcgcctacgagggcattgcccatcatttaaaatcaactcgtaggtgtttgtcaatttctgggccgtcgtcgtttttgtcggtgctgtgtgctcgctcgttggggtacgtatctgcgtacggtatcaatatcgactgaatcaatgcctgcggtaccgggaacaaggcacgcccgctgacccgtagtaagttaacatcgaaacgtatcaagtgtaaagctgaaccgtcatacagctcagtcatctatgttattggtagacaacccaagtggctgccaggacatatggagaggtctgctctacgttgtctacgcttttatggctgttgatctggccaaggaatcggcgtgagcgacttaactgatgaatcgcagcatgaacactacaggacggctcccgtccatcgtgaaacggattccccggcagcacgtgacattggagatttaccgagcgggtgaagagagcccgagcagtttttaaacaggagtgaactcccctttgcaccctgtagagaacgactcagccgagagcatgcagagagcgttgtcttctctaaaatgccatcaaccccgttttgtctgggttccgcgcagcgagagcggcaagctcgaaaatgcggccaccgagaggcatgggacgttccgcccttttgctaatgcctgtcgttctctttcgacaagtgtatatagagcagtaggttttaaggggagaaatcttttcggaaacacgagaatgcttatgcggcggtattcaagatgcgacgcagtcccgaacgagggcagctcgcatacctccttcgagagtctgtccgcccaactctccgaattgagcttttccttgtgtcgtcgccttcgcgtccgtgagaggacgtataaaacgatcgaaatgtgtttggaaatcctctcattgcgcgttactcgatctttcagattcaggggcaaacgtgggctaggttgaggcgggaacatatgggtgaaaaagtgagtgaattacctacgagagatcgggcagacacgtgtcttcacacatcctttttctcagtgttctatgctcgcgctctccgtttacgtgccgtggtttttaaaggcaactatagtctcagtgtgtatacctgcaggggctctcaaaccgtttaactttgagttgaagatgcaacaatataatatacagaaggcgggcggtgtcgtgtaccgatcactcattgtgtactgacagcaaagggaagaaacggattccgtttttccagacatatccgtcagcgatgcccgtctctgttcgctcgcaccggggttgacgatctgttcgccgtcttttctgtcccaccgcgggaaagtggtcgagagtcattctccagtggacaaaagcagcaagatcacctgttctcctggtgtctggtttcgaacagcgccctccccagcgacgcgggagaccgggtggaggagtatgttcaagcggctgttttaaaacggttgcttttatggttatggtggagagtctctaaaaaggctggtgcacggtgtgccgacaccgctggactggcatccatgggcgccaagggaaggctggattccgtgtggaagccgggcacagaagcgaagcgtggatgtcaatagccggcaagtgttggggtcgaaggttttgcgtgcacggaaagagagggcggacgaccgttgccaaaaaagtgacggaagcaccaccggtcaggtgggccttgctccgtcgtgttgggactgtctcggtctcccgtcgaacccggtggacgcagaaaaccgagtttttccctcagctttccagagttcttccgccttgctttcccgtacttgtttcaagctttaactgacgtttcagttgttcgtctgtgttctgcccttctgagatcccacaactcgcgactccgcaaagccgtcatcggcagagcagagttgcattgccgtgaggatcggcacacaaaggcccttcctcgcctagtttttcgaggcgccgcgcgacggacaggcggcccagctctgcagagagtttctggcagttgtttccggcacgcgttcctcgcccgcaacgaccacgtagggttcaaccggggaaatcgctgcggcggaacacccccctctcctcccgtggccgtaatcgacttgccccacgcgcgtcgtcgccgccgactgccgggagcacaagcatctgcgcaaaaagctttcgtgtcgaagaatctgcgtttttttcagaaaaccgaggcggcatcatttgtatagacggactgccgtctgaccgcacgtacaaccttggtatttgtgtcactgtttgtgtacaactcgcgtgcacggcgagtgcggctgtgctacggttgtcgactcttaccagaggctcaatcggttttta

SEQ ID NO: 3312 - DNA, 3157 bp, Toxoplasma gondii
  source 1..3157: mol_type = genomic DNA
tatctgaagcactgtcgaatgccctcgatatttctctgacgcgttctgtgtgagtgaaactcccgggctgatacccttgtcgcccctctgttcgttccttacactgtgagcgtctcccaaaaagagcggaagtagtgtcttctgaggaagctacacggtgtgtgcgctttcgtccgtcatttttctgttccgtcttttcctttacctctgctctgttttcttgctgcgtttgcgcctcctgttccgtgcttgtaatttgtctgcatgctttgagtgttctcccctgaatccacggcctgcctcgagaggcgttccgctcacctcttgctcttctttccagcgtgcgacagctgccatgctcgccgtcagcagcgcaggctgagcccattctgtcttgtgcaattccgcctcagggccttcttcgcagagttttagcatgtctcgtccaacgacttcagacgcttctgtgaagatggccttggccgctgccgactggcgggcggacgcaacgcccatgcctaaggacccgagatacgacacagaggctggatagtggacgcagagaaaacggctgagacagtgtggaaagagtgaagacaacaacgctacttcagctgcgaaaaagtgcataaaggtctacttttcagtacacgcatgtgccacagagaaagcgtcagtctgcagtgttcgcgctcgcctcgactcgtataaagttccaaactcgtaaggcaaggccctcggatctcgttttgccccccgcttttgagtcctcttgtgtgagcatctcggaggggcacgcaccaacagtctgggcgccttggcctgggaaaagggcgactgtttccgcacggaaagattcaaaggcgtcatctgcggctccacctgggtgcgatgctgtggctagacctcgaagcgaggacggggaagcaggggaccggtggataagcctgtctgactgcggagcgaaatgccccgaaatgtttctgccagaggtttgaccgttcccgggagagtcgctcgcttgcaaggccggagaaaagaaggaaacagacagacggggcgctgagacaaaggcggcaggagagtgtgaggcgttccgggtctggcgcgacgcacgcagggaacgggaggcggtagagccaaaactctgtgtttcaggagaggcgaaagagggagaccgtgaagaggagccagtgccatctccaaacaaagacggttttggcgagggaatgcgggataaaaaatgaccagacggaagaggaaccgccccagagaagggaacgagccagccagaacacagaacgagagtacaggaatactggaggaaagaacgcaacagggccgacgacgccgtcattttggcagctctgtacatgttgcggtcaccgaaacgtccccaataatctgggggagaagccaagtggagatggaagcagcgccgcgacgctacggacactgcgacaaaatggactgtacgctgtcttgtgtgatggcacgagccgcagcatacaaacgattgtattggacaaaatgcaccgaaaaggcacacacagatgaacggaaagaacgtgtgaacgattgtggaactcagaggaaattggctcgtggcaaggacgacaaacgatcaaaggctgtgttaacaggaagaccccttggcggtggcggcggtgcggacaggacaagagtatgcccgggatgctgttaatccagaaacaaaataaactggccaagggtcgttgctcatggcgacactgaagacgagcggacaaaatgccggtaactaacttcgacgtgccgtcaccagcagggatgcggacaagccccaagcatcaacggctagactggcaagtgttgccggcttcagggagacaaagaccagcgggacaaccttttgagaggacagagcgacaactggcatgatgcttcccggagtgtccgaacaaaactcaagaaaagtagttttggagtgtctgtgacccctcgatccaacggcggaatttgtcaggggctcacgccgcggtgtgtacatacacctcaagacaacaataacgggcagaacaaaggcgcattggctacctcgcgattgactgccatttatttcactaaagtcacagcatgtgttttcccgatcgccggcttcggtgaccgcacgttgtgaaaacgtgtgtagatgctgcggatacagcaaacccgaatcttccttatagcccctgaacgataccatgaactttcatttcagtgtattaaaacaacgtacacgggcacctttttgtaggggatcttcgtggcaagcgacttttctttacggagtgtcgagagggcaatcaccggggactgcagagagcgagacagagacacagtgaagtgccactctgggttgatttgtctccgtggagggagaagccaacccagccgttcgtccgttatgtcgaccggcctcctagattatggagatgagtgcaagtgtaaacttacatcgctcgttgagattcagagcaaaaacggaaaactacttcgttctcgagtgtgctgttcgctgctagacgtacagggtattcggaggtagccctgtctccgtcccagtgtctccagataggctgtggctgccttctgacgaaacacggggggtcacgccgaacgacgaccaccggggactgcatgcgcgtattgttgcctttttgtccgccgatttttcgatgggttcgcccagcaggatatcgttttcatggtcccggcgaaacaaatcaagtctttttttcagtttgtttaggccggcttcccgcgtgatacgcagacgtcgcctttcgagtccattcacccttcccctcccgttgttttccaggcagtcctccggtacacactgtgaattctcgtccctgacgcattttctgtgtttcatctctgaattcagcacagatggacttatccccagaaaccagagccagcatgtgttaaaatccagtgcgcccgtgttggaaaaggacactctgcaaactcccccaagtttacaggcacgcaaccgggcgccgtcggctgatgtttgtgggccataactgtttccgctccgtcagaacgacattttctccgtaaagggagtcttcgtggggctttctcgtggccgtgtctgtttcgtctccatcacgtttgccacttaaaa

SEQ ID NO: 3313 - DNA, 3650 bp, Toxoplasma gondii
  source 1..3650: mol_type = genomic DNA
gaaaaagacaaaattgccgcttacgcgagttggccatcgaaatgtcgctcgcttcgttcgggtccatccaaacgcggcggcggccgcatttgagaatggacgccgccaggcgcttctgcagttgaagagactgcaacgagaatccacatccacacagagccgaaaggacaattaaggcagacggaagagcggacaccgctcctgaacgaagacggcctccagaaagaggagagtacggcgaaagaaacggcagcgaaaaagagcgatcgggtcggggagacacagaaaatagaaaccgtaccattggagtctaacacagtccacgaaaaacgcttcccgaatgcagacgaggctatcacccaggtaacgcaacaggaaagaaaaggtcaagagcgcagtcaaagacgcctgcatatccgaatctgggcaaaaacgagacttccgatgcccgttccgtggtttacattccatttacgtagcgaaggggtgcagtcagcatcgcgcgaccccagctgcctccacatcggcagggatgtcagggaacagtgaaacagttcgacgaaacaactgatcgatttgattcttcctcctgttgatccccccgccagacttcacccacgacaaatgaatatagaacacccacccgcgcccgtctcgcgcgcgacacaaactggcccttcccctttcactccccatctcccgcctttgcacactcttatcaaaattgtgaatgccgtcaccggcgtttctccgacagtctcaacgaaaacggatactggccgagcggcggcgagctgcacatcggcctcagcgtctggaggggctgtatcgcgccatactctcgcgagaccccctggagcagaggcagagaggaggaactctctgcagaagcttagcaggactcccaaagaggagctaccctcccgcagaagaggcgacaaagaagtgaggaatccacgaaaaatccagcaacgcacaaaacgttattcgccgcacgcgggacgcgccatgcatgtccgtctccccatcgcgttgtttctcgatttccccatgccccacggcccttcactttctcccaagcgtcggaaaagacgttgagagatggggacgatgcgagagcagagaagacaggagacgaaaacgtagatcctggcagcactccccgtgcaaatgcgcggcgtacggaacccagtgtgggatgactgcgacagtggccacagccacgacaaagaactgttcgtttcctcgacagcgtgaaagactcaccatttttgacgaagacgaagcggaggacgcgcaacagagaagagaaaaagggtaagtggctgaggacctggaaatctctccaaacggaaccggcactgtctctccagcagggcgcggccagtagagtgtatgtagtccgccacactctacgtttcttgcgggcaaagcaggaagaagaatagcctcctttcccccctctctctggatccctcccctctatccctgtttcgagtataagccgagcctcgcaattttgccacgcgaactgccgccgcaagagtctcgtgtgcggcgcgccggtgcgccccaggaactggagctacgtccccttcgtcccagtggtttctcctaacgtctaaatccgcagtggctggtccaaaagtccgtttcagcctctctccacacctttacggcgagatgatcttggccatgttccgaggtcatgtccccctaaacagagaccgagcgcgagctgtgactttaaataccggcgcccctcgaaaatagaccgacacccacccagccgcgcgcgcatgcgtttctcaatgaggcacacacacaatgatgccacgagactgagaggcactcgagaggccataaaatggttcgggtattcatacgcacaaatgcgcagcctcgcagacaccatttttagcagcctaccgcaaacagacaagccggatagccttcatttcggcgaggctttttagacctgcaagcgagacgctcacctttcgacacctcgtctttctatcgccctcgaggtctgccgcccgggggttcagccaaggagaaaccagggctgccgtcgcagcgccagcggttgtgaggcgacggatacacggcgaactcgaagtcggttttttagggagcgagcctgatctccggcaaggcagcgtggacagccggtccagagagagctgtcgacaggcaagttgcggcagagcgtgaatggggcgcgctctccgcggtttccgctgcagtacgctgcagacgcaatttgcgaatcgacaatgtggtagagagacgaaaagctggcgactgcggtgacgtgtaccgtcggactttccagtgcggaacttctcggtttttgcacactacgtacaggttctctttctcgttggcattattgtttgtgtgggagttggcgaatgccggtgaatccatgcgctgcgttctcgcgtctcctcaacgggagaagcgcaacgtgaaactaccgggaatcgcagttcccgtcctctgcggatgccgccacttgttccagcaattcggcgacagaaggcgtcgagaggacggccacgcgccgcgcttggcttctgaaacgaagcagaagcacagacaatttcgttctgaaactctagcaaaacaggtaggcactggattgcgcacctaaaccgtgcttagcactggttcggggcttcactcgaaccgccggtttcgagctttcactcgggcagttcctcgtggttctctctgactgttgcttcaaagcgttggtctggctgccttctccgtgtccctgcacgacgccgtttctccgattttctactgaaatcggaaagaccgggaaaaaccgcgctctggagaccgcgagagacgagaacctggaagcgggtgtgaggcggcagaccgcgagggatattttttcacagtcttcgatgaccggcgacgtggaattttctggcgtgaaaatgatttgtggaagcggatacgcacatctgtttcaggtgtatgtacacgtggtctttctagccaggaactcacactcttagcacgcgaagtggggccacactcaccgcggaagagcgcataccagattttggcagtttgctttttccatttccccgattttccgtgtgcacctagcatttcgtcgctcggacgtgaatgccagcgcgccatacgaaatacaaaaagcaacggcgtcggaaagagggccaattcggaccccgaagggagggtagcccactctcttgccccgcaacccccctcgaccacgtagaaagggcaatttcattgtagtccagttgcacaatcgtttccgcattgtcagtgagtcttcttcccgcatccaggtggttgctaccgtggaaaggaggtttgtgccgccccccagagtcgcaggttccgtccgacgcactcgcgcgcagtccagcggacacgtacatttctgtttgcccgccgagttgccgaccccgacatcttctccgttcaatttttttcagaatggattttcccgttggcgcctccgtgctgttccgttcggattattccgacagtctcgcaggcctccgacgccgcctgtattcgagcactgttgtctcttttttgcgttcaggtcatcgccgcggtaatcgtttgattcggccacactgtggtcgtca

SEQ ID NO: 3314 - DNA, 2516 bp, Toxoplasma gondii
  source 1..2516: mol_type = genomic DNA
gcatgtgcaggtctccacacccgcaaaaagctgcgcccacaattaacagacaaatattacgtgtgtcttcaatgattcctcgcataataatcacgagtgcgtcgacgctagtgagttgcgtcgacttttgatcgcttccctccggttcgctagtgtgtctacgcaggtgagattgtgacaatcgcattcaaataaagatgtagtagaggccaacctgtttacatgcagcggagaggacggcctgcctgcggtgtgtgtgcactgcgagaggcatgggtggcgagtcgaaaccctttcggggaaggcggcctctgcatggggagaaagtcgttttccactcgtggattggaaacgaagcgtcttttcggctttcctgcagtccgcatctgaaattaaactggcagtgtgtagattgccgtcctgcgtatcgacgcgaatcacgatgcaacacaaaaaaaggtgagaggctcgccgtgacgagcacttgaatccccatgcaagtgtgcacacaaataaagcgtcttcgcatgtgcgtccgcctccatacccagagaagagagagttctctgctacatgcttgaaaccgccgtgtacacaagagtcgcatgtgcataacacaggcttacaggcatctgcatgtgccgacttgcgtttgcagatctcgcgacagacagcgtcggttttgtggggtctgaagcatgaaaaaaggcctttgctgaagagagccttgcgggggatttcgactctttcgcgacgaagactcgccacacattctcgtacctgcagataggacgaaggacccatgtgcctctcgcaactaatgtgtatctacagaggcaccgcagaagcagcagcatttcaaacaagtcatacgcagctggaggtgtgaatccacgagacgcagaaagagcctcggcagacgaggaaatgcactcgcacctccctgggggccttcgaccttcccgcctcgaagagaaccggaaaaaacggatctggtcaaggatcactgtggccggttcacacaggtttttcctgaacatcacgtcacgaaaacggggaacgcatgcaaatgaagcgctcctgtgcagagaggagaaacgcggtgcgcatgtcttgcgatcgagaactgcagaactcaaatcgagtacacacagacactgtaatggctaggctgctgcatgtgactccgttgatgatgcacgaactatcaggttcttcgtccttgccgttgaaacgaacccacagttcttccctgtgtcatttgaatcgcgtattcaatactgcattttcgatagttgcatcacccgacataaaatcctggcatttcgcagtctagtgaggtgatagtccacagcactcctggaggacgcggtggtctgtattccttgaacgaagttgcattcagtagcctagagacttaaatgtctcaaccaatatatatatatatacctacagggttgctgcagccgtttaagtgcaggtggaaggcatgtgaaactattgaagtagagcctgtgaaaaaggctttgagagactgggtcaacggtgaaattgagaggaggcgccaggacccgcagagcctttcagcggaagcctcacgacgcctcaaagtgctcacacccgggcgttgtgcttcgcgacccaccgcgctgagcacagcgccgtctccggattttctggaccgtcaagaagccgcgaaaaaactggatttgcttgggaaaaacagaggagcgacgtttgtccgcgaaacgccacggtgtcgcgtttcctttgagcaagggcgtcgccgccgcaccgcaaggcgacactcgcaactctggttttgcgctgtgcgtggtgtcttctcgctgtgcatgcaagtttccagctgttcacagagtagccgcgaggaaggttctgcgaaaactagcagacgcgaggaaactggcaaaaaaacgaccgcgaagagtacgctgcggaaacgtcttgcttttctgcctcgccttcgtcgcgtccgacacagaggctgtcttgtctccccaacgaccgggaaagaggtggagaggcgtttctttcctttgaatcctctccgtccattgcaggacttcctcactcggacggaaggcaatcacagcgcgtccggttcgccttccctcgtcgtcagcatcggttgcttgctgagtcatcggcacgcaggctggcatcccgcctcagagaaggaggtcctttgccgcggaagtcaaggagggaagagctctcgacgccagctgacagcagttctgttgtttcgcgcgtattcttcgtgttttgcgatgcccactgtcctccctttctcttccttctcccttcagtcgccgaccacaagccctccctgtctcccgcctccccttcctgaccctgtctctcttcctcggagtgtctcctcctctcttgatccacaggttgttccccggctctctcgcgcagcttcgaccttcctgcctcagtggctcttctacttccctcctgtctcttcgtgccgtcgcctctttccagca

SEQ ID NO: 3315 - DNA, 2656 bp, Toxoplasma gondii
  source 1..2656: mol_type = genomic DNA
agtgatccactcagagttgagaagctcttgtctccgaggcgaggctgcgtcttgttcagagggcagttgcccgccttcggttcggccgcctctcttcgtcccgcaggccatgtctccaccctgcctggttcgctcttgtgacccgctggcacgcgactggatctgaggtgtatgtacacccgagtttcccgcgcctgggtcccgcgcctgggcaaagagatccccggagcttctccagtcgcgcgaggtcttctcgtggtgtgtgcggagctgctgggcctctctctgcttcctctcggactcttcaacggcgatctcttgcggtaaggcagcctcccgcagatgcgagaaaaagatgtgacgcggcaagtccgaaataactagacctttgagaagcatctcctcctcgaggatgtggaggcagctcaagacgcatgcaggcagagacggcggagaggctcccgcggaagtcggcggcgacgcacaagaagcctctgtcgagggcggagagaggggagacagagcggatggagcggcggactcgcctgaagacggagaagcagcaggaaacgatgccgcactcgaggaggacgcagcagggtctttggcctcggaacgcggaggactgggctcgcctgtgaggagccagtggaacacaagtttttcttggagtggagacagacgacgaagcgtttcgagacccaagtgtggcgccgacgcaaagcccagcgcttgggcctgctcgtcaggtgtatgtacaccttgagccgcgagggcgtcgagggcgtcctggaacggccaggaggcaggcgcggcagatgctcgagacgcttcagcttcgtgttgagaaggagagtgcgaggaagaagacgaggaagaagacgaaaacgagtcgaggaaggaaggaacggcataggcgtgggaggacggaagaggattcgacaaaggcggggatgctgaggtagaacatggaaaagcagaggagccccgcaggaaggaagaacccgatacatctgggagggcaccggactgcgcagcttccgccgcggcagaagaagacgagaaacaccgtcctgggtctctcgaaacgactgctgcgcgaaaagccttgctcagtcccgcagtgttgcgtgcagtggcgcagccggaggaaacggccagaggcgacgacgaccgagagagcaaaaatgagaagacagagagagacgagcgaggcaacaaagacgatgcagcagccgaaggcagcgacgcaacagaagttcgtcgaaggacgcaggaacgaggagactccgggagagcgagatgggagacgcaccgtgcagagacgtggaggaacgacccgacagaagatacatgcggcctttcaccctggaaggacgtccacttgagagtggcgagggacccacagttttctttctgtgtcagttccgcactcggtgaagcctcaccctcccttcgcctctcggcgcgtctgcttctgactgtatggtctcttctcctgcgagttgcgaggacctccgtctctcgctgtcttcccctatctcccggtgttgtgcctgctgtctgagtcgagcctgagtgtctccatcccgggagcctcctgctctcgcctgaagcaaaagcagacgccagacctgctgttctcgcgttcaagacgcagacgctctgcactctctgccgccgccgcgccgccttctcttcggctgcgctggcgcccgccgttgatgacacatacaccgcagatccgccgcgattcgaagaagacgccggtgaagtctctctctgaggcgctcccggcacccttcgttctggccctgcaaaacggaacggctggcgtctcgccggccgcagagagaaaaagaactgcatcgtggcgcgctcgcagccatgcatgcaaaagacgagaaaaaggcggacgcatggggacgactgagacgcccgaaagctcagagaagaccggaaaaacaagaaggtgacagaaagggaagaccgaaagcctctcgcgtctttcttgagaagcgaaaacacagagaaactcaacagaatcgaagcccgtcgagacatacgctgtgcgtatatatacagcgaaaggcagcgacgaccagctccttgaagacgagaggaagtgcgatcgcggtgaaggaaaaacttgagaggaagtcaaagacgagattctcttgtttcattcgtttctcaaagatccccgaaaagatactaagaagaaactgtgtggggctcttcaaagcagcggacacagcgcgagacagcgagggcgaaacgttgcacagtggacatacagctggagaagtctgcttttctcgcgcgttcaaacgcgttttccaggaaaatgaacgagcattcacattttttagtcgcaggaacagacctttgacgtccttcttctgctgttgatcctctgtcctgttttctctctctctcttttcccttcgtttcctccctgggctctctatcctctctctttcctttctctgtctttttgctcgtttctctcttcgtgtctcgtctcgttgccgagaagaaagaggcgcttcagagttcgccttcttctccaagagagacctgaggtgtctgtcttttctctgcttcgcgtctcgacttttcaccctcttccacggtgtcgctcgacttaccgcaa

SEQ ID NO: 3316 - DNA, 2211 bp, Toxoplasma gondii
  source 1..2211: mol_type = genomic DNA
atgtaggtattcaatgtgaaaggaacagaagagtgaacgcgactcccgaaatagcggttgccatgaatcggtgagacgccactaccagtgcatagtgcgttaccacccgcaaatgatcctaggtgggtaaagacgtcagttaagggtccagcagtaactgaagaacgtacagaaggcctgaagttgctgggttcacgaaattgtctctccccgaaagctggcatcaggaaacaagaataactgcagttcattgcgtcctgcgggcactgcctacaccgcgagtgccgactccgaatactcgcacctaggcttccaaagcgagcacagctacagtcaggtggcttcacagacagccggcagccagtagtagcggttagattattgaagaagtcagaaggaactccaggctgagcggaatattcatgaggtcttaccaataccaacctagcaccgacaaactgtcccaagaaaagcggaaggaagagattgaacaaagaaagagttgggaagaggcgaagcctgcgaggatacttccaaccaaccatcttgcaagaagagtgttttggcagtcaactgaaactcctccaggttgccggagtggcttggacgatgtacagttaacactgctgaagcgggggcacccgccgacgccggtactctctacgcagagttagatgatagtatatactttattccatctgcattagagagtgatgacagaaactgtgtgccgcaaaagcagcgagtggagtacggacaacgatgctgccgacgcctttccctccctaaggggggtcgtcacaagggaacggactctacgcttgggaaagacggcagacaagcagaaaaacgcattttttgtcgttgcaagtgtcgaaatcgttcattattacacgcataacaagataaaacacacagatgacgcagaccagcaacaggggagacaacactcgtgagacccccccccgaccggatgagatcccgcactccctcaaagcgacggaacgaacccgcaagattcctaaaccatgtctgcattggatgctgtgacacgatatggcactctcaaaaatggtatgaatgatgtgcatacatatcattcacttcgcccaagctccctggcatgggcaaaaagcgtcggggctgccgcgttgtcttgcggcaacgagacccggtctatgacggacttcattgctcacgcatcgcgcgatcccgaatgtctttactcacgtacgcctacttgatacgctcccaataatttacagcaactgagaagcagtctcgtctcaatacagctgagaatccagtttgctgcgaaagtgaaatgaggagaccagtacaagcaagttttcacgcaactttcattccgcactggcagctgctttgcctgtgtgacaagtcgcacaacctgttgccaggacatttgccgatgacacacacaaacctgctcgctattgcttcgcatttctggtcgatgaaaaagtgctttgtaagacacaatgtttgagatacttttcgcagaaccaacggacctcgagagcgcaaagaaaaccggagaggtttgcacgcttcttggttttccacgtgtgctgagtcccctgcccgcgaaggttaccaggctcacaccgtcgtccaagggacacggccgaggtgcgatgcatgcaaaaaaatctggatggcagcagggcatcaaccaggaacagagcagaagaacccattcttgttttctgttcagggaaactcgattatttagaacttctgctgtcggtcagttctgggagtcccaggacgatctgtagggtaagggacaagtggcttgctccaggaatccccggtgatggcgtctcctaagacggggttccacaacaaccaacactgcatgccttcatattcattggtttccctccattacacaacacttttcttgtaggttgtggagtgggctactggtcagcggttgttggcggtggcggccatcctcatcgtccccaccagggagcagcacggccacttttttcggtgctgcggcgccaggtttattatcttcatccgggacaggaaatactggtccatagtcaaaggaacagtttcgaatcgacgcaatctgttgcgtactccgatgggccgctatatggtgcatggggatttggcacactctgcattgaccgccctgttgtccttcaccacttcagccgatctataacttcaaaa

SEQ ID NO: 3317 - DNA, 3240 bp, Toxoplasma gondii
  source 1..3240: mol_type = genomic DNA
gcgaggagctgcagggaggcatgagaaagctgaggaggaaaacaagcggggagaaaggactcgaaagcgtcgagaaaacggacaagagaaaggtgtacggagaacaagagatttgggagacgggagacacttggaaaacaacgcgcgcgagagattatgaaaacggagaagagaaagaacctgaccgacgacggagctgcaaaaaagagccaaaggtgccggaaaaccggggggaaggctgagaactgcacgaatgagtccgagacagacgagagtcgaaggcgggaggcgagacagccgggcaggccagggaaaaacgaaggaaagcgcaagcagagcaagacaaaacgagacaagaaactgtgaggatttgcgaacccccgccagtctcggtgcgagtgctttccgacaacaaaggccgcctccgcgcgttcttgtccgtgctcgtttttgaaggcgaagccgcgttccgtgtgaacgaagaacaaccaagaaaaagggaaaacgcaccgaaaagacaaacggtttgtactgaaggacgaggagctccttacatgcatgcgcagctcgctacagccgtttgtgcatgagatgtggacaaaaaagatacacgaatgcctattttacagttttcctcgacaagcaaggtgggcgcaaatgcgatgtggaagcggacaagcgggagagagaacggcttctctgcgaaaaaaccgttctcccctgacaactctgccgagcctggaaacgaaacgcagagcgagaagacaagaaactggagaaaaaaagagcaggtcctctgacgcctgctgtgtccagtgttttgataggaagacgccgaggagagaccgtggatgaccgaaaacgcccacacagagcaggaggaacaaaaggtgagaagcgaatcggctgcggacctctagaaaagacagaaaaacacacccagtggcgacgaagagaagttgaagagaagcgcgtgaggagtgaaaagcggcctttttttcaagacaagagtcgagctgcatgcacatatccactcgcgggtgacggcgaaacacagtggccgggatgacggcgtttcgcttgatataaaaggaaaaaaacgtctttttctttcctgcatttttgtgattcttatctcagtttttccgacgaaagcccgcggagaaatcgtgaaacaggaaaagcttcctcccgccttctgcatgtgtgcgccgggcaccacgcgggtggtgtgttgacaacccaaccggagaagaatcaagaaattcccccatttcgaaaatcgagctcttgtatttttattccacactttcgcctcttctcgcctttacgacctgaggatttcgactcttatttctgcattgccacagtcactcttgcctgtgaaatttcagactcttgtttgcgaagtctacgtcatagtttatctcgctttagaactcccaaacgttcttattctccatcattagacctttcgctttttttcgaacttcgagactgttttttcaactgctcatgcttatcacttctctgtaccaatctgtcttctgaaagtcacttgaatgcacaggcgcaattatgagattatcagtgcactgtttttaagcttaaattcgaacaggaaaaagttagtgtatcttttattcacacaaatgccggttcggaagtcatgttcccagcaactgacgcgaattggcgacacaggaaggcctcttttcagactcgctgaagaaatacgaacccacagtcccagaaaacgaaaaacttgtgggggatctatccgaatctcacgagtagagtattggaatttttaggtcgatatggaaacttgagagagtgacacacttttatatttgttttaataacatctcatgtgccttattgaaactggttcctgattgtctgattcgtaggactctgtacatgagtccagtaggagagacaggcaatcaaggtcctgacgactgctgtccgttttaccattcctctggcgcgctgaagacaactaaaagagatgagagccctcctggaactcgattatcgatataaaacagcgaatttgccgatttatttgctcgagtttgacacacgccagaagttcccctctcactcggacaacacaacactgaatggccacaaaggcgcataaaaagaccttgcattgcaatcgcatcacgtcaaaagaacatgcatttgagtcacacatcgtatgacaatactccgtgcttgataaaatcacctttgcatggagtagtggcgagcaaagaaaggacttcctatcgcaggtcaagtctcggaagaaggacgcagacgactacgaggctgaatcgaagacaaagtccggaggaaagagcagttcgagtcgctctctgaaaaaggaaaacgacgcctttcttgagctgttggtgtgcagttaatgctttcagcctttccctgacgattcactttattcaagatcttctgtgctcttcacaaccaccgtgtcaagagcgtcaagcgtcgtctgtgtgtgtgtctgtgtctagcgcatattcagaaagtccccttcaaaagagagacgcatcaggactgctttgtttttcgcgtacatgtcgcagtcctgcaggtacaaaggctgaactgtgtccatgctacttgcacagtcgtttctttcatgcgaccctcgcaacagaagcctgtctttcgtcttaccagcgcatatatccgcgcgcttacacagtggacaggcctgaactgcaacttcctacagaccctgcgccgacaaacatctactctgcgatgccgaaaacataatcaaaccgtcgatcctggcgcgtttctcgtcggtgtttgcttcttgcggcagcgagaaacgcgaaagagagatatgcatgcagccgtagatgtctgcggcacacagcgtagatatacaagtgctagcccaactttgcgcaaaaaacgaaaccaaattttcttgggattttatttctcgtttgttgatgagctccaagtattgacaccagcgaactcaatcctaaagcgcgccgtcgatcttctcagcaggcggtcttctgtttctctgggttcctctctcgggcatcccaagctggagggcggggggaggtactgctgtgtcgcaaaaacgactttcttgatgttcttcgtctctccgaaggaagagtctttcagctcttccgttgtctttcgtcacttcagtctcttctcgggtgtttccttctgttctcgcctttcctcgtccaa

SEQ ID NO: 3318 - DNA, 5006 bp, Toxoplasma gondii
  source 1..5006: mol_type = genomic DNA
tgtctaaccatgtagccctcttcccgacggccgctctaagaaatgcagagcctacgacaagcatacgcaaatgctcaagtgaattctgagcagatgggagcggaatcgaggcagagacggtcgtggcggaacgccccgcatcgggaaggtcttttttgcactcgaaaggcgtcgccttggaactgagcattcttgtgtctcgcgttcgccggagcggtgctgtaccgtcaaaatagcctacctttcaggagctggttctgattgaggctgctcaagatggcaatgtgttcctctgagagattgcggaaccgacggcgcgcagcgtcgtttgaaacctcgtcctcttcactgtccgccgttgggcgcagccgagcagcctctgccgccgcctcagccgcttccagagggccttccagaagacgcgaaagatggtcagaactggaattggtcgcagaggcgggggacgaggcgccgcggcacccgtcctcgtctcccggcggctcgtagagtgccatcgagacgaagaagagagcggaactgccttgaagaaaagacgcggtcggtagtttaactgcaccccgttcgatgagaatgggtggaacgggtcggcggaatctgtgcggcggccaggcagaaacgtgaacgtacgcctcgcgggaccaccggcgacgtaaggggggacggagagcgctaaaagagcggcgttgtcttggggaaaagtacgtggagagcggcggacatccggaggcttcctgccacacgggaagtgggcggatacaagcaaaaaagtcgcgaaacagcgcgggagagagacatggaacggacaggaacgctagaaagccggtcggcccgggcgctgtcaagtgaaaagcgatgagaaagcgcgggagaagccaaaagaaatggaaaacctgcgagcggaaccgccgagggacgcgaatcgagctctaccggactggatggcgagttgtacaaacggccgaaatcgcaacggtgacccgataaaggccgtgaaaatcgtgcacttgtcgcttacactacatgctgcggtgaagcgcggaaagagggaaacgtgaggagggaagagtgagcggcagcgacggacgacccgtggacgctcgccggagaaaagaagcgccgaaaagaaagatgcgcaaagtgaggatttcagctgaaattgtacgcgacgacgagaaacagagggtcagctttccacatgtatgacaaaaacaacgccacagctggagcaaaaatgtgtgtccggcaaagaagccccaagcgttcctcttccagagaaaggttggacgtggcagcacacgggagggtgcctcgcaacaccactgccctcagacacattttcgttcgcacgatgatgaatccagctattttgggggcccagacccggcaaaaattagcattaatccttgtagaaacgctcccgcaaaagcaagcctttcgccggacatgaaaacgacctacccctcagtgtgccgggacaggactcaacagacttgtctacattcttcaaggtcctcgtgaccagacttaaaccccgttacagagcagggacagtcaaggtatgcagatggaaagatgcgtacccaaatgcatgtttcagcaggcgtgtctacgagaaggcagacacataaaattcaaggatcatcgaataagggatggatctgtagtcactcatacgccagaaggcgttgcccacaccgggaaatctgctggttccgccggtatgcggggcaaggctatttcacgaaaagttctcagatccagcaatgtcctgcggcaaatacagaacccgaggtcttgggtaggtaaactagacaaaggcagtggtcgtccaccactgtgttgacctcgaaaggtgacagaccctgcggcgtcgttgtctggccgctgacacgcaaacgacacggtgatgacgggaagaatggcgtgctctcagaacactggcgggaaagggaacgtttagcaagacgatagagctgaggttggctccagtccctttcacatcggttatgctgtacgcgcaacatacgtagttctgttatcacccttattaacagcgagctcaggggagtttgttgctggcatgtctgaagactcgcagttcctgtcacgagggaggagacgacacctgaaagccgaaatgcaccgtggaaaacatgcttgggcatctgagttgacatgtccagcaatgctacgcgaagctggaaccttcagataactctgaaacggggaagaactaaggcgtagacagtcagagaaacgcagtgttacttaccatgatggatctagtgatacgagcaattcagggactgtagatgttcttcgatcgtcgcccaaatcgaaactggggggcattcacgtgtggtttctgtcccgcaatggtttttcacctaacatctgggattgtctgaccgccgctttcatggatctaatcgtcgcctctgcggcttgcgaacatgcttcgattcgttcgaacgaataattgcatgctgtcgaagcaggttcacttccgtactctttgtgactgggattcttccgctgtctttgtgtgatacgacggccggcggtgtcttagttgaaggcagtttccggtatgaagccatcgttgcgttttcgggtcggaggcccacaacacattgggtttcagggatcggatcctctccctcaattggaattgcacttaccatgagacctgtgtccatcgaattgcggtagaacgctggtacggaaccttatcacccattgacgagtaacaccgcgtaatcggcagtgggagcacgttgctacagcctagatgcagatatgtttttttccccaggggaaagccattttctcgacgctgaggaaaccgagacctgcgagcagcttgctcacatgtcagagtgcctgttgtccaagagtctttcatctgtaccacatcaattgtaactaaattactcgctcctagtaagcccacgcatgtccagaatacactccatttatctgtcttttccagttcgggaaagtggtctgcaaacaccacgcgagcagccaccgtgacaaactgaaacgtgctcatgttttagcaaaatcatctacagactggcgagtttgtggtgccccatcacccgtacccggacgcactcgggagagcgcattcacacagccactggaggaaaatagtccttcaaaaccatggcatcatcgtgccttagagaatcctcttgtcgagagccgtcgtgtcacatgtaccgacttcccgagtactcacaacagcggtgaaagcgccgcttccagaactggctttcatccgtgtagagcatctgagcttctgagtaaacacagtcacacgaagatccacttttcttcttcaaccgtgggggaggttcaacgcactctacggcgttttctactgaaataagcaaccacagacccaagcgaacagacacaaacatccaccgtgggactgatgaaaagcggttcctggtcgtcactgatgaggtgtatgtacacctcggaaagtgtccatgcttcttcggttttctctgtcaaagttagtgtgatcgagcctacgccgagggccatggcaaaacgcagaaaaggacagagcgtcaaaagatgctcgttctcgcgtgcagatctggcaggcaggcaagcagccctcaccaaagcgcgtcaacctcaaggctgctttgcgcgtcttttccagttcctggatttgagcttgtttcctatccaaacagatagcgtatctgtcaccgtaccagagcatgttgtgagacgaactcccaattccgtgaggcgaaggcagcaggtttttgcagccatccacgtgaatccgctgtatcgatatattagacgttatcgcccgccgttccggtgtccggtatcgcgatttcggcgttttcgcattttccccttgtgtctggaaggcccggcttttttctgtctttttggcatttaaagaccgctatgctgcggtgaggacacaatctgcttttcccctgtgtcttgcttgcccatgtctccgctcttcggctttttttcgcgcggtgcatgttctcccggcagagcggcaggcacttgggcgatgcatccaacggtgggcccgcgcacgagcacgacgcacaaactttggaatttgcaattctgcaaggaagtggagagccacccgaccgcaaaaccgcgggcgagctctgtgaaaaagacctctccattttggatctttttttatagcgctctcagccccgttgtcggccgcctttttctctgccagggacgacgttggggctgctgcgactttctcgcagcaacgctctgcgttttcgctgccgcccattcaaggatttgttagtcggctgaggcgcacaaacgaacggccccggcgacaagagcagcggaggaaaatctcgaagtaagcgagcgggcgcgactctggaaacgcctctgtgccaccccagggtgacaaagagaagtgggatttctggaagagggactcttctcccgggggacgcgggagaagatggccactggaatgaaaggaaaagacaaggaggataccattttttttgggaacaaggattgagtgactcctccattctcttccccacaaagcggggtcaatagcggaaacgccgatgacccggcaactgtgatgctctcccagaaacaactgcgtccaaccgattctccctaccgatgtcactgccgttgtatgtccctttcggcatcgatatgcccgccgagtctgtgcattccagcaattatgcacgtatgcgtctggttgtacgcgctttgcggacggacctcttctgtcggaaacgactggagaaaagatttcagtcctccgttgtcgcggatttttcctccgctgcgggtgtccactcgcttccttctctaaagtttgccttcgtttctaatcagcgcggacgaaaaagaatcaaagggtgttctatttggagtctgctgtcgcttcttttgccatctgttttttagaaagacgtcgaaaa

SEQ ID NO: 3319 - DNA, 2793 bp, Toxoplasma gondii
  source 1..2793: mol_type = genomic DNA
ttcgcagatttgcacagatttagcagagccagtatggagaggttggaccgctcgcgctcgtgctctttttctgtgcgtcggaatctcttgtgtccaatgagtctgtcgttttcaagaagcaaatggcgagaccaagaagaggttctctctcttcgataggagcctagaaccaggttggggggttgacggcctacgaggacatgagaacactcgcggcattttagaagttcttctttcatcgctcttggctcgccaagaggagaacagaatggctgacgttgagcaaaggaaatcgcaggtgttcctttctcctccagttgatacggaaccggcatgaaacgcccagctcgttagagaggtgtctccttgttgtctctgcgaatcacgtagatgctccttccaccatttgtgggcttcttagaggcagaaggcctcggtcgctagagtggacgaaacacgcaggctgtccgtgagcgacacgagaaggccagagaagagaatccatcgcatgtttctttatgcgggggagcaagtttagaggcgatttctgatgcaccgcatatagacccgtccaacgcagaaagaacccagttaggtgagcactcaccagttagcgtcggtggatggaactgtggagatctgaggttctaggctgacacaaggagctgcgacggggacccgagaagtgacacgacactaccagcggccaacgcgagaaaagggcggtggtacccacgagtaagatgctgaaaaggaaaaattggaactctgggagttttagtcgtttcagagcaacgggctatgcgggcgacaggaggaaatatcgcgcttgttacgttactacagcactcaacgcacttctctgattcctgaatcctctttttctaaatgcacccctgaatctagttcgtctgtagatgcgtagaaagttgctttcaggagtctatgtctccatgaaggcttccctttctcacaggaacttggcaaagcgaaatgaaagtcagtcctcaccacggttggagcagttgcacctacatttatgtttgcttttctccagcaaacgggttccgggccgtggcgctgttgaggccgagccagagctaagatgtgcaggcatcaccgatctttttttcagaagaacgtagcgacacatgagaacgaggcagctgcattgagtgctgagaaagctgttcatcgccgactgtatctcctctggaacggtagcgcctaccgtcccagttgaggtaactttcgaattcacgtcctccctgctgttttcattgtggtgcggacaactgagacagctctcgttggagacagccctcgtcgatgtttcattcttatttcttcgttctttctcgcaatctctgggtgcctagccgtgtgtcgcctaagagacgtttcatacacgccaagaaagctgtctacgaaggcaacaccgtgcctgtggtctccaaccttgttattttctttggtgatgatataagggagagaagcgcgagtcgctcgcgttccgtcgtgtactcaactgcggccaagtgacaggcggttgcgaactagaatggcgtccattcggcgttccctaaccccaacggagttcagtccttctatttctacaagagttttctagagaacccctcctccggttgaataatgggatagcaaagccttctagagacttggctgtggcatgcctccgtcagaaatctctctattctagagatcagcgacagtgtgaggctgtctgttcaggcagccctcacaaatctgtgtccagcggtactgtgaagaggcaagaacccattgtcgaaacggcgaaattccaagtttatacagctgtacaatcgtttgcgtctgggtatcatttctcttttttgttcgcttcgttttcctctggtgcaagggcgcttgcccgaaatccgtactctctaaatctgtctatgcagcgacgtcaacccgccaaacgcgcgaccggcaactcgcggaacgtgtgctcctgcccgggtgcttctgcaatgcttccttgctgcggttttacagcgcttctctctgccattttgagtcgagttgagagccacaactaaccctcaagctctagaatgtggttacctaaagagattttgtcgtctctccacctcgatcgtctaccaggaactgcctaggcaaatccgcggactccgcgttcttcgtttgttggtggaggtagccttcacatttttagatctgttttcccttagcctacctttttctcggatcttcttgaatcactagctgggctgggaacgaaatgttgttttcatgtcgtgttgagtccaagaccttcttacgggcctagccaggcttcccctggacccggatgcgcaggctggaaaccgaggagcacacccccgcgtttctctccgtctccgtctctctgaaattttcggctgaattcgattttcgctctcaaagcgactaactttgttgcagtccttggtgactgcaagtatgaggagcgttttccttccgcccaccctgttggctttttcgccgttctccggcctttcaacccggccttttccggatagcttctcgcagccttcctagctgtacgtgagtgccacttcttctcgcgtttcctccgggtcgtttgccaatctgtccaaaaacgccatcttgcttgccttcttccgtgctacaccattttcagcctttcctccccattgacctactattcgttttcccctcgcgttaccagatctcgtgatcccgcacgcagaatccaacctctcgcccgccccccccccgtctgca

SEQ ID NO: 3320 - DNA, 4829 bp, Toxoplasma gondii
  source 1..4829: mol_type = genomic DNA
caactttcttgcgggccagacttcaacagctgaagtgtcaacgagccggcgctgcatttagagggtcttgaaactcccagctggggattggctattcttctgtcaaccgaaatttgtaaaagtctagggtagcaccgctcgtcggcgtcagtcagttgctgatcagcgattcactcgtgtcattcctgagatgtgcgtgtacgctcctgccgtgatcctaacgatctttggaagggaagaaacaaaattacgaccgttaaggactgtcgctgctcgcagtcgtcactctgttgcttcgaaggcgccccctggaccctctgggttcttcaaaacacttacgtcacggcctgcgcagcattggttccccatcttctctgtgtgtttgatgcgttgtgagaagtgcggcgggcaatatgaaccaggcaaattggccgaagctccctctggatcaccgtccctgtccaaacgcgctgtcggggcccctgctctgtcggaagtgagaccgagctggagcctcctggaagttgtgcgtttctaaaaaactggaacgacgactgcacgcatttgcggtgcctgtaatgcagcgacccccagaagagaagatcgaaggaggaaggcagaaaagggtcgggaagattgggtcggccaagtggacgacgaagtgaaaaacaagagcctcgctacgacttgagtgggatgctccaagccgcagaccggtagctagagaccacgacggcagaaaaaatctgctcagagcctaaagacgctttgaaaacaaactgcacaccgtggaaagctacacacactgggtcacgcggcaaagggaggcggcgtggctggcaacagggcaggattcaggctggcgagttcccgggtcctacgcgggaggttcggagcacagaacacgaagtagagaccgacgcagagacgctgtcaggttcagagcaacagaacggcactacagagactggcttgctggcgatacatgtgtctctcccgctcgcgaggcagctgcgacgagtagagatgttggaaggaacgggacgggtttgacctagctggtcagctggccacgttcagcgcagacacacaccgaggagggaaagggagaaaaccacgggaaattgactgaaagagggaaggagggctgtgtttgaaaagcgagacgtttcagagagagccgaaatacaagaatccccagcctgagatccctccttcgcgggaggaagaacgcgttaacaagtgcttgacttcgagagacgaggcaaagtgcgacgaggaaaaactcaagaacgattcacatgctactccgttcaactcaattcatcgcaccaggaaaatgtttacggagacaaactgaagttccttcacaagctttctgcggtgatctcgcgaaagaagtttcaccctcggcaagacccggcgctctccaccgaggcagccacagaaaatgcgcggaccctgcgctctcaacaaccgttgcagtggcagccgagtatcgcagccaagtctgtggcgtggctcctcgcttgtgcagtttgagaacaaagtttcggtcgtgcacgaaagatgaatctcgtacacgtttgcaggaaaccagccgcatctgacacgatcgatttcgatggtgcaattgtttctcgcgggttcaacagtccccgcgggacgtcgatgatggcgctcgatggccgcgcacgtgaccgatgaggtccgggcaagaacgctacaccaggaacgggaaacttttaaaggattgcgccgacaaagacccaaagtgaaatcatgggacagacacctacacttgcagagagtctggcgaagagagggctgtgactggcgcgcacgcaagtcgatcgtggaagcacgtcgcaaaacatgctgccacacaggagtcatgccgcggtatgcagacctctgggcaattgtaagtgctctttgcccctgcagggtcacggcgcgcagcccacaacaagagaggcacaagcagcaggtgacttttgcacatctcggtcgttgctcgcatatggtagcaaaaattgcgtggcgagtcgaaacacgatgctgcacagtgtgtgggaaacgggcacgtaagtgcacttcttcccgctgatacgtacgatgtgagtccatcctgcctcctcgaagctaagcgtgtgcactgttttttcacgaacgcagggaaaaatgactgggaggggggacgcgggcgccgtcggaccctgatgtgctggaaccggaaatcttttgtggcgtccagtcgtgtcaggtcagggacacacgcccatcatcacgtattgatgcagtgggtgtctcgttaagaaaccaacggcgcaggtagcctggtaggcgttacgtagttggtagtgaccttaacagcaaagcttccgtcacatcgacatggtccgcgttcaacgccgaaaacatgcaggtcccagacgagcaacagtctcatcatagcaagccgcttacggttgttggcatggatcaggaccaagatccggcacagagtaatatcgctccgactcaccactcaagatctgacttagtaccgctaaaactggcggtgtataaacacccagagaatgcactgcaacggtgactttcagatgcgaggctctgtgcagatttctacagagttcgaatccagtaatccgaaacgatgttggtccatgaataaagagcatgccgacggcagagataacagtacgtcgcgccactcaaaagttcatttacgtgctgcggccaaagatttaacggctggtctacctacgggttggaacaaaaggcacatggcgtctcaatcgcagaagagatgtagtgccacgtgtgctagtggaggctggaaacgcctgctgtcacaattacgtttctgtgctgtccgaactactcaacatggaagctgacgattgcttttaatgttaactaactacagaccatgggagcgggtaatataagatgtaactccgttcatggaaatcaaaggaagggagatgcttctacaaacgtcccgcacatctcgggctgccagaagtggcctaccggaataacatgacaggccttcagcgacgacactttccgcaggaacgactgttcctgacggacctgctctgccaaaccaccccagagggtcccccacaatccacaacaacaccatgaactatcaatttccaacgctacagattggtccatatccagcacattctaggtgtggtccgttcctcggtgtgtgaagatggatcctccgccatggaaatagaagtcctttgtgtttgtttcccgctggcgaaatcatccacctataatggcagagctaaaatcaccaaattaagacgtgatcaaggtaccaccatatcgtatattttgttcaccgctacgcgacagcatatcagccccccatcaggcgaccgactctttcatgaaaggccacgagtgcgcacggaactcgaacaagatggttgcctttcgaaaaaaccatattctgagattcatcagctgattaattcagtatgttacgagcatgcgcgacacgttcgcttgggcggccctgtcgaaatcaaaattcctgtcgtcaacacagaccccccgccgctagagcagaccacaaggtgatcctcaaagcaaatagacgtctatccgttgcttctgcatgatccctttttctataggggctgtgtacgcaatacagacgatcaatttcgaacccccgggctgctaggggttgttgcttccgcgcctgtacggtgcctggattgtcctgcctgcaaagaccacgaaaacactcgatatgttggaaccttcaccactctgcctggctttcaaagcttctacaccttcgaaatgtggtttaggaaccttcacctatgacttttagtaaacatcagggcgggtacctaaaccccgacttgccgtagaggggcggttctctgcaatggtacaggaaaatcgggggcctgttgacgtttttcacgaaatttgtataccagtgtgaaccgtgcaagttttctgtgttgtgttgggcgaaaaaggcctctccacaccgaacttaacgcggtatgaagttcccgaatttgtgccgggacagctgctattctgtaaggactggaaattacccccgggtcgacggggtagtgaagacaggcagaaggccatgcgcaagtttcgggcaacacaccgggtgaaggagagcttagcacgattgccgccgttcgacacgacaggcaagagcggcgcgtcttgcatcgttttggtctcaaagagatttcaaggggaaagcgcttactctttacaagtcgcagttcgctttttccgtctggacctcctcgagttttcacgcaaaaaatccctttctgctctcgaagcgaggaggctccacaggggaggttttccctcttgcatgtgatcggactgtgggcgcagcgaagataggttctcctgctcctctttagtgttctggttgccctcacttttttccgtccgcgaacagactttgtcaactttgtaccaggttctctcgcagttctgcccttcgtggagacactcggggctgaaacctgcgcaaaaaagctacgcgtgtcaacacctgttcgacgtaccgccggacggcgactgcgcgcaaaggcaagcagggattctttgttggatcactccatttcttcataagtttgtatctcggtcttttcctgtcacctttttctcgccttcgcttgcgcccggagcaaagcgtcgcgcgtggacgttttctgtcgagactctcgcgcgcgctgcagccccgttgctgttcgtctgtcgtgacgccccgatctctcgcttctcccctccctcagtcccga

SEQ ID NO: 3321 - DNA, 1911 bp, Toxoplasma gondii
  source 1..1911: mol_type = genomic DNA
gagagagatacaagaaaacagtgtgccgaggaacagaactctacagaaaacagaaaagaaggcgcagaagagggagagaaggggggggagtgaaagagggtggagaaaacaggacgacagacggggaagaagaaaagaagaaaaaggaagaaaaaggtaacatgaaataagacgcaggagctgggcactcagatgtcgattggacagacgagacgtcgtcgccacgaagagaccggggaaggccagcagacaagagagaaagaatgacaagcgcccagggcaagaagtcgttttcagacttggaaaagaggaagagagttacgacacggcatttccctgattatcgcagacctgggtcgcgatccatcgagcagaaagaactgaaggctaaaaaactactttccttggcgcagattcttcaccagatctgacgagacactttccgttccccttcctgacaagtattttctcccaggaaaaacaattgccacaacatttggcaactcgctgtctgcttatcggtggtatagggtttacggcacttgttttccccgaaacgaactacgaggcgctgccaagcacggaagacgaggagttcagatgccagcgcaaactccggcaaacatgggtgttttctaagacggaggccgagtgacaaaagcaacaaccacacccacttctcagagcatctttccccgaaagctgttttgacacctgtctacgcagcccctcaccgttcgcgagtataaaggggaatgtgagaagcaagggccaaaaaagcaggaggtcaaacacgaagaagcgcggaggaacggcaatgtttcagaggcagtgtcgcctcctttcatgacaggagcgtcaactttttgttctcgcgaagtcgaggctgcaaggtcgcaaactgactcgatggttgagaaacgtgtgaaaagatctgctggaagtgtttgagcttccagaagaagcaaggtttgtggggaaggcattcgcgaccgcagtatttggtccttcgctgaaactcagacactcacgtgtcgttgttgttccttctttcgtgcccagacgccaacttttccgtctgccgtcgtctcacggcgatcagctgaaaatgacagagttcgtggacgggtctggcgagcggaagcgtttcctccgcatacgctcttccgttagtccattggaccttgcatttatacgttccctccgtagaaggcagctggattttccctgttaaaaacagaaactcaatctacgccgcctgtggaaagtcgtgtgtgtctgttagactcagtgtgctgttggccggccgcagcctgcccgcaaagattcgtgcgcgtcgaaaaagaccccccgaaattgcattgcgagtcttcgctagtgaacgggctgaggtcggaggcacaacagctgcagacagctgatttcccgaggtggaatttagtcgaatgggaggctgtcttctactccgggtccgtgtctcccaccgcacctgttactgtttcctaagttgaattcacagccgcctgtgccgggacgctgctctctggagccaccttgagacggccgaaaggttctttctgtacaggtacactatgagcttgtgttcagttgtagcagctcgcttcgtgttggtgggacaccgagcgctgcaacgcgttgctctcttggcaactactgtcacttccaacctcgcacccgacggtgaaagctagacgcagaagtcgtgttcgtttgctcggtcaaattgtgctgacatcactcagcctataccgcgtgcttcgcagggtctgtctctgaaaaagtaggataggatgtggagtgttcgttgattttcggggacagcagacgaaaggagccgtatttttgtgtcgcacacgctttcctcgttgggaccttttttctgcgtcaaaa

SEQ ID NO: 3322 - DNA, 1947 bp, Toxoplasma gondii
  source 1..1947: mol_type = genomic DNA
ttttctctgcacacctgatccgcgatccaaatctgcttaactcaaacattttagtactgtggacactgaatatatctgcagttatgagaaacagagaaccaagttctttatcactgctatgcaccaccccgctggaccgcttagcagctaaatgtgttgcatttgaatattgtgcaacattaaggttattccacatcactcgtgctaacagcgagagaaaactactactcatatgctaatcgagccactgcggctgacagaccgtcagtggagtgacgtgcactttggaacagctatttaccatgggctggaaactgcatataaccggtgtcaaaatcgtgtgtgtactcccgcttaatttattaggcatacaggaggtgcgacatgatgttgcgagaaccagaccttcacaagcctagagataccggaatcgaaaccagaatgaatatgcaacagtcaacgatgttaatcctaatgcgtgtggaaaattgccgaccaaccggcaaaaaaatatcgggatctcgcgccagcgttcttctggtcacagctctgagacacagtgtatgaaacgccgttcaggttcagggacagcttagtgttcagccaattttgtttcccccgtcctttttcaacagttctcatgtatcctctcgtgctcttgtattgtgtaaaatgtaaaccgaatagctgtgtgcctttgtgcccagatgggcaccatacagtgaatgaaaaaccggcctcgggatttattgcagattgaacgctcgagaagtatatcgtttccctgtggcgatttcacacggtagaaagttaaactgaccacattttagaactgagttggcaactgcaacactctgcagtgagcaggatctcagttgaaatggcagcaagcgaacgccttgccttcagtggcaaggaccgtgttttctgtcccggaatgttttcaagttgtcaccggatttataatgtttacgacttaaaaatgaagttcaattttgggtgaaggaaactatagatccagacatgtataatagtggctcctcaacgtgccgtcgaccgccagtgatcgacgctcaagtaggtgcaaattgcacacccactgccagggtgcaacacgtttcagtcatcatacgccgactttacactaacagcaacatgtattatcaggagaacaaacgttccacaactgcgtggggtccatattgcgggccagaacaatgtcttttttcatagaattctggtggattagaacgtgactgtgtgttgcactgcgctggaacgctgaggagagtctgtctacacagatcgtccttcccctgtcgacattagctaactctatcgtccagctgttttctgtccgtttggtttcgtaggacaaatcgagtccgcgtgatttgttgagaccggggagtaactcgtttggagatggtgttagaacgagacaaactccactcctgaacatgcatgactgcggtcgccattcctcaagcgagaaaagtgttacctcttgtgttgatctcgcaaattaatcatcgtcattctgttttccttagacaagatatgagagcagtgttctcgttatgctccttttccctaccgcgtgctccgcttttgcagttcatgcgtcgcagcaggcctttgtctcttaatgtgaccaaagcgaccactggacgcctcacaccttagctcgcttgttacagcaataggacacgtgctttcctttgaggtaatatcatattgctttcgctgatttctagcggcagaaggctgttatggggtgcaagtctgacttgtaacaacttggagatcgacgatatctccttccagatcacctccgtgtgcctgaagcagccgtgcaacatcttgcccttgcagtagtaattgtgcccctcccctgtcgagtttttcttcgcaactgcaacattcgacaaggctgcttcgtgatca

SEQ ID NO: 3323 - DNA, 1938 bp, Toxoplasma gondii
  source 1..1938: mol_type = genomic DNA
ctttcagaggcttcttcacccacggaatccgctacgctggaacccgcaactcccgaacctgcatgcacctcgcgggccctggcctcgagtgctctctcggtcaagtaaaccgcaaactccgtggcgccaggcatcatgtgggggaagggcgactcgcggtcgctgcatgcatcgacgttgaaaaaaactgcatgtggcaggcgagctccgtgcctgaactcccgcaccgcatcgcgtccgccaaagacgggaaggtccgaccaggaggcgtcgaagatgaacacgcgccggtctctcttgggaggctcctcgtgaagtgtctctgtggctgtcgagctttgtgcagattcagggcggtcgccttcgtgcctgtctctccttctgcttgcgttctcggcgagacagcgctggataaaggaatagcggccagtggaagaagcgatggtttcgctctcttctgaggagtgccctctggacgtggcgcatgcatgcgaccttcgcgtggcttccgcaatctgcgctcggaccactgaagagccgaaacgcaaaagaagagccgcgacctccgcgggactcagcaccactggacggacagtcgggaaacatagacgcgccatcgtcagagaaaaggagaaaattgcttcagaaaaatataaaaaagaggctaacagacttcgggggaagagacgcgacgggacggcagagttcgtaagaagggcgtgaagcgggtcaagagacacccgagctcgctggtccaggtgtatgtacacttggtcgtaggcgcgcggcgtaagctttcgacgccagacttgaagaaatgagaccgcagagaatccatgggagaagttgtcgtctgcgcggtccaggagaggtaaagcgaagaagactgcggaccgtaagacctggtgaggtgtatttgcatcggctcaagaaaaggcgagtgcagaaggcgtaggaaacacacgacacgaggaggagcagatgcgaaacaaaagagaagagaaaggagctccgcacatggcgatatctccacatctggacactctcttctcttgtataaagcttttaagacgtcgaggttaagtctcagcagcgcttgagtcttgtcggagacacgcagccacaagtgatcagatgtccgcagaaacatgctcatatatagcacaagtgagcttttacagagataaacacacgcgtacgtaaatatacgtgtacacatgcgtttgtgtttctcgtttctagtgcacggacagacacgtgcatgcaggctggctgtttagaaagccgtgaaactcgcgtcggcctagacaagcagttggcgaacttttgactgcaagtcgccctggaaaccggaaaccgctcctttcccagcacaggaaactcaacaatgatttagaatttagcacatctgcaggttacaaacacaccgaagtcacggagttgtgtttagcggtcctgacacactcatccggctgcatgcgatcagttgccacagcgcacgagacgactcgaagctcgcgcctttgccttcggtttccatcccggaaaagatttaattaacatgccatagggaaacgttctcacaaacacaacagagtactccttttcttggatgcggccgtcgttgcacacgaaaagccagcacagatcgcggctttcctggtctctacactcaacagtatctcaagcaccgcgtgggtctctgcgccggtccggggtgcggcgactttgtgaagcgcggcttttttttgaaaggcaactttcaacttgtttgagggagctcgtgttggcacataattgtttctctggacggcgtacatctgcggagaaaggaggcagaaagaccggaggtgcagaagggaccaaagcagagcagcaagcgcgaggagacaggggtgtcggctcccatgactctccggcgccgcttctcgttttaaa

SEQ ID NO: 3324 - DNA, 3242 bp, Toxoplasma gondii
  source 1..3242: mol_type = genomic DNA
cttctgattcagtcttttctccattttcttccctcaaaggcactttccggggccgaccccgtcctctctttggaaccgtaggattccatacacctggaacctctgctgcagtcggttcctccccctgtggtatctcatccactttcacttttcgaggccgaccccgtcctctctttggaaccgtaggattccatacacctggagcctctgctccagtcggttcctccccctgtgacatttcatccactttcacttttcgaggccgaccccgtcctctctttggaaccgtaggattccatacacctggagcctctgctccagtcggttcctccccctgtgacatttcatccactttcacttttcgaggccgaccccgtcctctctttggaaccgtaggattccatacacctggagcctctgctccagtcggttcctccccctgtgacatttcatccactttcacttttcgaggccgaccccgtcctctctttggaaccgtaggattccatacacctggagcctctgctccagtcggttcctccccctgtgacatttcatccactttcacttttcgaggccgaccccgtcctctctttggaaccgtaggattccatacacctggagcctctgctgctgtcggttcctccccctgcgacatttcatccactttcacttttcgaggccgaccccgtcctctctttggaaccgtaggattccatacacctggagcctctgctccagtcggttcctccccctgtggtatctcatccactttcacttttcgaggccgaccccgtcctctctttggaaccgtaggattccatacacctggagcctctgctccagtcggttcctccccctgtggtatctcatccactttcacttttcgaggccgaccccgtcctctctttggaaccgtaggattccatacacctggagcctctgctccagtcggttcctccccctgtggtatctcatccactttcacttttcgaggccgacctcgtcctctctttggaaccgtaggattccatacaacagagtcttttgtcggtgccttgcgcggtcttcctctcccgcgcttgatgggtgcaaaaggtgtcaataggcccatttccggttcggcgttttcgtctgccgtttcgttccacgatgcggtgtcgtcaccgccactatgcccgccttggatttcttctgctgttctctttcgtcgactgggttcgagagggccggttggcggctcgtctcgcccacggacggttgcggcgtccgtttggcctggtgacgaagatgcggtcggctcaacaccggccgcatcgaccttcgagtcgacttttctctggatcttgtggagcgtttcgcacgccggggtgccaccgctgtcgtccggtttcctgcgttgctcgtgggggacttctccgcaaaagcggggtaccgacggcgttttcggccgagcggcattcgacgaagaagcgggagaaacgcatgtttcatcgtctccctcgctgccaagtgcccgactgcgactggtgtcccgctcgcgccaagacctcgacgtcgcgtcactcgactctcctgtcgctccatgatgtggagagtcctccgagggaagagaatgcggcagtgccgggggaaacggtccgttggactccttgtcgcggcctcgcgctggcaacgccgaaattggtcgcgtgggatcggcgcctcgagtaaagcggcggaagaagttgaagctcgtttccatcgcgtgacatgaacggaagccgagtcggactcaacgaaactgtgttgtcggggacctcgcacacctcctttctaacccccttccccccttcaccactttcctcgcgcttctccggcttcccgccaggtcacttggcctctctgtctagagcagggaagggttttgggcagtcttcccgtttggcttcttcccctggctcaaaaaaatctcaagctgtgttcggggactcgcgtcgttgtcggtttcggggaaaggcgagaaaggagaacgtagaagacagccgggttcacacgctggtgtttctaagggaggcgccttcgacgggaagtgtcttttgaccggggacgcttttcgaaatggacattttttcaagtcgaggctccctaaatagagcgccaaaacccgcagttcgtacaggacgtgccgtctctcttttctgtgcctcagtcggcaaagccaatgaacacaggaaaaagcacagaggagctagatcgtgaggcatgtcacctctccacattgaagacagcagggataaacgggaaaaagcggaccgcgacaccgaaagacggccaacacgcgaaaacatcacacgtcgagggaaaagctcgatttttttgccgctgcgttttttctttctaagcagcgaacctgtagcgtcgaaaagcaggactagtggcattcacgttctggagaaccaacggggttcgtctcatcgtccccccaaacgagacattgaggtgttggctgaccccgcgttgtgcgtagccgaaaggcggtcaagagagacgggagactcgaactgcaacgggaggccgtcgcggaggaacggtctctcagtgcagcgctaaaaggaaggaaaactggaacagggatgtctacggggaagcaaatggtggcataaaagaatatagtgacggcgacggctggggggttcttcgagaactgggagccttcaatgcgtgcactcgaagacacgacgcggaccgtttattctctgtgggaaggaaaaaacagaactgtggttctttgctcgctcgctttgaatcctagatgcttcctagtatattttttacatgtggacggcatgcatctccatctgacatccgggatgaggacactcgcacatcagcagaaacaacgaaataacctgatgaacactgcggtccagaaagcctccaaaagacgcgattctgaagaaccaaggaaagtcggtgatgcgttgaagtgggattatacagtcatggtagatgcactacgaatggtgcttctgtggccaggaaacacagaaaagaaccgccgctaatcacagccatggtcgtcaactaacaatttaggtcacatccttcgtagtcatggtaacggccgtctctcgcgtctgatcgctttcagcctcttgtacgtttctttgccttcttaagaacacattagtcgtcactggaacccggctgtgagctgctctcagcggacgtgcaacttcggttccccttcttgcaaaaga

SEQ ID NO: 3325 - DNA, 1376 bp, Toxoplasma gondii
  source 1..1376: mol_type = genomic DNA
gagagacagtcggaaacgcgtagtctgaaacctcccaacggtttctgcaatcaaccttcatcccacaaaattgagactctaatttaaccctgtacaacacacggattcaccactcgtttcatcgctgattcggtacgacttaactgctttactcattttcaagaaacatgaatttgaattctcaagcggtgacggtgattgtcgccccagctctggtttctagcacgaacaacagatcctagatccggttgacaaacacattgaagaaaggttaaaccgacaggccatctcggagcccatgcgtttcacggcgaaaatgattaacggaggcagttgcccagttttctcctggccatttggaatcctagatctccacagaacggaaaggtctggggaggaggagtcgcccttcgaggactgcacattaacagtcttcgacgtcgatcgaatatgcgaatttcaggtgcccttgaaaccctcctgcacaagggaactcggcgagagtgcattttcgcttcacatatgtgttctcacttgtcttttcagctacccgacatgagtacatacaagcatgtataatatatatatatatatatatatgtatctatttatatgtatatatatatatatatatgcctacgaaacgcttggatgagtgaaagcataggaatggagaggtagacagatgcaggtagatcttcgtcgatgtctttcttgtactgcttcacgtttttctgccgcgaagaccgctctgccgccgcctgttccgcgtgcatgccgccgtgcatgcatccgctgtcgacgttgacatcttcctcagtttctttgaacagcgctggaactcgagcagagattcctcttgccactccatccttttgtcatcaacgagaaggaccgcatttccctctagaagtctccgcgtttctgctgttccgcggccccgtcttgcgaggtatagcctcagctctgtgtcgccgagcagcgttttcttcagttcaaacaactgtagagcttccaacttccgttgatttctgcagacgggttttcaccgtcacagagtgattcacttcgtttccgttgtcgatttctttcaaaagtgaagacgtttcttctgcgtctcgaggcgtctccgccctgtcgcggtcggtctgcatgcacggcctctcagctgtttcgtccgcgaaacgcccctcgaatcaggattttccgtcgttttcctcttctctttctcgtcctcggtatccctctgtttcgctcgcggccttccgactcgtcgcatcccaggcgaaacgcgtctgctctgcacttcctctgcgaaggtgaaaacagtttttggagctgagcgacaagagaccgagaaaaacttttctccacaa

SEQ ID NO: 3326 - DNA, 2560 bp, Toxoplasma gondii
  misc_difference 1519..2110: note = n is a, c, g, or t
  source 1..2560: mol_type = genomic DNA
ggacctttcagcagggcttttctggtgaggcagaaaaagtgataaaggacgtagcggcaggtagactgatgctttgggggaacagtgagaggggaggtgactacgcgagcggtgaacgaaagaggaatgcgaaaacctgttgaagcaggaagaaattgatggacgtgtgagacaggaagcaagccaaatggcaagcgtggcagaggtacgtctctcccttgttactgttatgagtctctcgcagtttccttctatgtccagaaccgcaacatcatgtttagaactaccaagctagtgtgttcgagcagagtatccgatgttgaaagcagcggcatccaaaaacaatggctggttactatgtgtgtcattcgttatttttctgtgttcgttttccgccagggggtcatgactgcggaacgtttaaagtgggaacgaagtaacgaatacacacgaagtgtgaacaagcagggtgtgacggaattgcgtagaaaactacctgtggccatccgaagaagatgtctctcctctctcactgctctacgttttgtggcgacagacaagaacgcaacagcctcattacggcagctgtaacagtaaccgtcgggtcggtggtcatgaatgccacacctgcgcggagggcagttagagaaataatgcgcgcgtcattcacgcgaaaaaacgaacaaaccgggggcatctgggaaacgcgaaggtggttcgaaaggccgaagggttcaacattcgggaatccagatgtcgaggtctcgacttttttggggccagccggccgctcaacatgccaggcaaaggcagtcgaatgaacaacgacgcatggctgtctcaccatatagttagtagagacctcatgcacggtgaggcggtgttgttgccgctctgtcgctccaggtagaatttggaggtgtgccagacgaataggccagaacgccatagaaaaggagggtaacgagctgcgcaaccagttcgaggggctctttcacggtcccttacagccctgtcgagagatcagagctctgacagcattttcctgaactcgatagtcgattcagaaaccgaaaccgaccgtggtggggaggagtgccgaaacgggtatgcgggaccaagaaggctgttcaaagacgaagtttgttcggccggcagctacgctgcgatccctggagcttctgtaccatcgtcaggcttctacgctgtttgttgccactctcgtgtccctctgttcctcttctgattgccacatcattcggggtaatgtcgttaaaccagtcttcagcgaaacgtggaagggtgatgtgggcatgcaccgggtctcatgttttttgagtcagttggaatgggcaatttcacatcctccgatcgttttctggaaagatgccccttgttctacggccgcagggatcctggaagactagcgaactacgtagcccattgcactgatcagcctgcccttctgttcatgtcttctgctgcagcggcaggtagcaaatcgtttccttatatactnnnnnnnnnnnnnnnnnnnnnnnnnnnnnnnnnnnnnnnnnnnnnnnnnnnnnnnnnnnnnnnnnnnnnnnnnnnnnnnnnnnnnnnnnnnnnnnnnnnnnnnnnnnnnnnnnnnnnnnnnnnnnnnnnnnnnnnnnnnnnnnnnnnnnnnnnnnnnnnnnnnnnnnnnnnnnnnnnnnnnnnnnnnnnnnnnnnnnnnnnnnnnnnnnnnnnnnnnnnnnnnnnnnnnnnnnnnnnnnnnnnnnnnnnnnnnnnnnnnnnnnnnnnnnnnnnnnnnnnnnnnnnnnnnnnnnnnnnnnnnnnnnnnnnnnnnnnnnnnnnnnnnnnnnnnnnnnnnnnnnnnnnnnnnnnnnnnnnnnnnnnnnnnnnnnnnnnnnnnnnnnnnnnnnnnnnnnnnnnnnnnnnnnnnnnnnnnnnnnnnnnnnnnnnnnnnnnnnnnnnnnnnnnnnnnnnnnnnnnnnnnnnnnnnnnnnnnnnnnnnnnnnnnnnnnnnnnnnnnnnnnnnnnnnnnnnnnnnnnnnnnnnnnnnnnnnnnnnnnnnnnnnnnnnnnnnnnnnnnnnnnnnnnnnnnnnnnnnnnnnnnnnnnnnnnnttccttttcaggagacgtagaggagtcacagattcgttcctgctgcagtgaggctctttgaagatatgtaccccgtcgaggcataatggacgaagccgacgtccattcttcctgcgtcctggttgaccgctgtcgctgtctcgtgggaattgccctacggcgttttgttgtggaagtcgctgttcgttagcctcgtatcgagtctacggttccccgctcagtcggcggccaatagaaacacaaagaaaaaccaagagtcccttgaaaaagggaggaagaaaccgtcacagataatcttctctgcttctccgttccttgctgctttctagattctgtcggagcgggcggtttctcctcttgtctggcgcctcccctgcatctcttccaccactgtggagcgcattgttctaaccgcgatatttttatattccgatgtgggcaaggcaccta

SEQ ID NO: 3327 - DNA, 3833 bp, Toxoplasma gondii
  source 1..3833: mol_type = genomic DNA
agaaactagagcggcgagtggctgcgttaagacgacaactcgcagagtccgctgcagagttagctaggatttcagagaaagaaagtgagcagaaaggcgacggtaagtccgagtccagtaccccgtcggagaaaggagctgacgacgacggggatgcggatgactcgctcgatgccttcatgaaaggcgtcgaacagtcactcgtcagtcaggagaaacagaaagtgaaagagaaaataaagactctgaaggcggaactaaaagacgcgaaacgtctccttgcgttcgcgaaggcgtagaactgtcgaaacaagccaagtcagggatccaaggatcagtgagagagtgcagggttggtgtcaggcggctattgcggataaaagctacagacattcgtgtgtcggcacacacaagctgccgtatccatactccagcgacagttcctgagagtgccgtttcgtcgattgtcaagtgtcttgtgtacagaaatcgaagaaccgaatcggcacacgtttggcattgctgggggacttccttgtcacacgggaagggtgtctttctctggtgccgctgccttcgcgataaaaacgcagcgaccacgagcttctcaactcctcccggtcacatgaaagcgcctgcgaattcacttctacgttcacgattcggtcagagttcttcctaccacagagaaaaatgcacgtcgatacagttgacacacacgcataaagtcctcaacagacatatatatatatatatatataaacgcaaacagcatacggatagcatacgcacgtacgcttgtgcatatatgcacatctaccagagcccgactgcataggggttagcgtctagcactaaaaacagttcgttggtaagaaaattgctatctggtcagggtggtgactgtctcagaatggaaccttcggagcttgtggccgtctgtagtttccgatggttccaagcaaccctgtgagacgacagaaagatgcgaagatctgaacaacttcaaaacaaggtaaagatgcaaaggacgaaagaactctctttaaaatgtagtacagatacaaagacaggaagagctttaagaaaagtaaagaaacgaaaggtggaacaactatagtgacttgtttctcaagcacacaccacattcccgccaacgaccccaacatcgagtgcgctgccactcatacgccttcgactgaagcctttgaagtctgccggggtcaagccccaggaacctttttctcgtgacagcagcgtcgaaactcttgcaactcctcgcggcacttgcgccagtctctgaagaaagaaacatttgcatcggaaagcatgaactgcacggaactcgccctaagaagtatgcactgcttgtcacaactacacggcgatatacctgacaccctcaacaaacgtgttcggcttcgaaatgcatcagtgcacaactccaatacgatacaaatacaaacatgtatggatatatatgcgctttgtttctcttggtcgagggatcattagtggaaggtcgaccgtgaacacacggctacagaagcgatgcagccgtgtaggttgttatcgcacgccttcatcgtttcacagcagtgagtttctgctttacagtctgctgcttcaaacccaggcgggcctgtgtcacgagagccgcagtgacactgaactttgctaatgtagaagctaagagcagtacgagggcagaggccgcctccgaactttctgtaaccaaaccacttacttgtcctgcacatcgagacaatctacgagccggccatacggctcactgcagccagttcgctccactttgtcatcgacatcgtctccccagtacttgctcatctgagcgcgactcgtgggcgcacttttgtctaattcgctctttgttgtgttctgctttacagccacatgtgcggtgactgccacctcttttcccctggggtcaaacgcaggtttcgatctcgtatcgttttctgaagccatagttttctacgcaatttacagtgccatgccttccgttcagtgactatagtctgcctttcagcgcaggattttctgtctcaactcttgcagcaacgtcaccacctagcacgatcaccaacgaggaaagacagcgagcgtagcagacaccaaagaaaaaaacatgacattcaaagacgggagaggtcgtttcttgccactgctgcttttgacacgaggagcccacacatagacttgaagtttccggggtctatgagtttcagacaaacaatgacagccgacgctcctgcacacgggcgcgcgcactgtgagcgaaacaatcgaacacaaagaatcgacctatataacaagcggcgaacagactttctgtcactaagtcgtcaacatgaagatcggaaggatacatagggcaacaacggtaaacgggagaactctctacagccacatcctgagaggcttgtatgcgagtgttggtgtctcagatgcacactgttttttcgggcgccccagtctggatattctgtggagcatatgctgaacttgtctgcggaaaaacggaagttctctgcaaacacaaatattgtgtgcatagttcttcggagacgcgcgtgtgggcaccaaacagcagcaaacaaagcgtacccacaacaaagttcgctaagtgtgaactctgctgagagcaaagaatacgactgagagatctacacaggtcccgccgaatatgacctcgaagacgagtgtacacggtaagcgtttcgcgaggaaaacgtacacagtgctctgacatggatgaaaaacaagacctcgatcctcgcctcaacgaggctccaagcagacacacacgaactcgcgcgagtcctcagagacaagcgttgcacagcatccagtttccctggcgtttcctcagtgctattatgagtggaaacagaagaactcgtggacttttccagagcgtcagcgcctcctgttccataagaacaccaagaacgctttcgtagacaccctcgtgccgcagccgcgaggagcgagaggcggctttctccttgggggagcttgcatgcgtttctgttttctggcgaccgattctctttttctcttttcctcccgcacttctcggcttttctggagaccttttcgctgccttccacgtagtaagcgtgtggaaaaggtcggaggactttgcatctcaaaaactcgggaaacatggaccttgtgcccgccccaggagtgtgacagcgtctctccgcagtgggtttgctccatcggcgcgacagccaccgacatttcgtttcggaactgcaacctcctcacgaaccgtctgccattccgcttgtcgagcgtaccccgatgcgcctttctgttcaccgtgcattcctctcacggtttccgacttccagtttcctgccctgcggggaggagactgtcgagacagacgattctgctaccaccaagcctggtgcgttcgctcgctgttctctgaggcggcctccacccgtttgaagccttcagagttaaactcccgcgtttcctgtgttgtatgctctgctccttcctcgagcttcttcgtctcctgagacttcgacgagtccgtttcgatcttcagtcccgacgacatcacaccgccgtcgtctagaaggctggaaagagagctggcaagaagggagtcaggtgcagcttgttccgtttttcctggtttctgcgcgagaggaaggaaacgaattctcgaggacccagggaacaaacatgtgattctctacttgggaactcctgagttgagaacgacttgcagaggaggcttcgctttcgctcaagttccttgctggacggacttgtatgccctggaaaaa

SEQ ID NO: 3328 - DNA, 2592 bp, Toxoplasma gondii
  source 1..2592: mol_type = genomic DNA
accaatacacaatcaaggcacatgttcttgtttgtttagggacagcgaagcccctttacatttccattttggcggaacgtgctcgattcgtactcgctttgatgtggtaactttgcaaggtcggggaaacgcatgtggctgttggtcggacaggcgttgtttcgaactatacagggatcctgatgccgagctctacgcttactctctccacgcatgtctgtgttacttttgaataccaactttttcgagtaaacgggtgcgaaagcgcgtataatttccgccacgtatgtgaacctaacctgtaaggcaagatcgggactcaccggacatcagttggccactcagaaaccgtgaatggagaagccaaagacggcacctttcattttgcttccatcttttgacaagctcttcagtcagcacaggagagctaaaccgtgactatagttgagagcaagttgtggctggcagattgtcgtgagtaccatcctattcacacacaccacagaaagttcacttaacggattgtccgcaggagcaacattaagaagcaaaaacaaacagtagcttcctagagacgagtgtttgcaagcacgtcctacctatccacgtaggcaacgttgcaaatgggattcgttcgctgtagtagagttgcttgtcgatgaattgaccaaaaggaccgcaaaaaaagaaccctggaaactttccccgaaacatcaaggacctcgaccaaactcacttcctcaagtaacgcttcagagagttatcctaaaacaatttttcgatctttatctcagagtcccatgaggttcagcgttggcacctcaaagcatctgttctggactcggtagtggtctcggctaaacagcctaccgtccacagattctagccaactgtttctaagtactgaggcttcttattggttcttttctgttcctgtcgtcagtggtatccgtaattccactccttttgcttttttttattccacccgcaccttgaatattgtcgctgtgctctagctctgaattctccttgtccgtttggatgcttactgaaatgaccctttcggactccaagaagttacaggttccactgtagcgcttagatctacttcagaagcatctcgtgcacttttctgcttgctagcgcgatgaggttctgaagcatgaggcgactgacaggctcatctgcggacttgctgttaccgactccatacgtgtgctcagctccatcaatttcgagagctgacgtgacgaagcccctaaactgaggagagtatgcacagatacaaagcgcgtccacgaaacgaaaaccactttttcctaatcaagcctttcttctcagaaaccgacttgcaagcgcggtggctgtttgtgtccgctgcatgcagccacgaaaccagagttgaacttggacctgttctgacccattttcccttctttctcacctctatatgattattaattgaaaccgacacgcccatctactcgtttcacctttcaaatggtcgaaaaaggaaccgtgaagtgaggttgaaagaacaggaattcagacatgcagagaaccctccttccaaggtcccttgtatcacgagtgtcatcgggtgtgcttgctcagaagaaagtggatttctccgtgttctttcacgttctcacgacttccctctcttgcctgcgagggacgctggaatctccaccgttaaattgctttggtttgtctgtcttgtcggcttttttttgcaagaaggccttttcgtgtaggcgactctggaatgtagcttgataacgtgcggcttttcaccgtccttggcttttctgctgtcgagtttcccgcgcactgtcaacttttcggcttgaaagttgctttttatttcctcacaagaaccgcaggtgtgtgcgatttcccttttttctcgaactcgcctgttttcacgagaggtccgcaccgcgcgtatccaggaggaaatcggacagccggaacagaggcaaaggtctctttcctgcttccttcctgtcgttctctgcaagcattaaggagtagacccatgaaccgcatctcggttttggttgaaactcgttttggcaactttcaccactcgagctggtcgcatatctcgcgctgggactgttcacctcggagacaggatcattcgtgagttctcgtttttccagaagtcccgaccgagtccgttcttgtccctgtgctttgtccgttttctccgttttcttagaatcctttctctctgtttgctgcaacgcctcgccgggtcctcgagtgtaccggacttttgcggcagacagcattttcgaacaggggagagtcctgacccgtctttctttcttttcgtgagccactgtttcgcgcggatgtgtctccccgaactcgcgacgctgctgtccgtggatctgcaacgctctgcgactcgcgttgtctcctgcactttcccctgcatttcttttcgcgtcctctgccgcaccgcctgccgactcttttcttgtgcttctctgcgaaacaggctctcgctttctgcgagctgcggcgacctgggagacgcatgcggtctgcagcctggacccggctgaagagagaagaaga

SEQ ID NO: 3329 - DNA, 2870 bp, Toxoplasma gondii
  source 1..2870: mol_type = genomic DNA
tcaaaacatcgactcgtgaccgtgcaagagtgtgtcacacatactgggagaggagactcgcatggagagagaagaaaaggaaccagaggcgactgagttttcgcttcgcctgaaaggggaaaaaagcaaaaagcggctccctttgtgcttggagggcgtcgtgtacagacaaagcgcgacagacgcgtacgaaaacaagagctctactcgtgcgtagtggagggggttttgtgctacctgttgcacatacgtgagaaacggtgagaagagcgacagctccaagttgtcaaaaaagaggagagaaagtaaaggtctgactggttggtgtccgatcgctgcccttcggagctgtctgtgaagcgtgcttctgctccggggtgtctgtacacctagtggggcacacgggtcccgggctggggcgcatggaatggcaaaagacacccagcgtattccgcgattgggaatgccgttgacaagagaaaagaaaaagcaccatacgacgttgaggacgcaaagaaagcgaagatccgtggaggaacctttgggcgcgagtgctcggcggcagggcggcttcacgggttgtacaaacacctctgcaaccgagaaaaacgtggagcgaaagaagggacaagaaaatgagacgggaacgccgcgcttccaggacgcgttctgagtccgtggaatgccgtggacagcgaaggctcgagttctattttgaggcgcttgaaagagaagacagcaaaggatcgatgcgcggagaataacacagatccgaaatagaggcactttctcagtttaactggtagtcacggaaagaacagaaacccccgtgttgaaaaggagtcgcgcacggcttgatgcttctcgtacactttcccgtcccggggaaagggtctgggcaggtggatgccgagcagatgtatgtacgagagaatgcagagagctcgaagaagtctcgtccgccctgcagctggccgagaaagaaaggaacgggagcggcggcgactctgacgaacttcgtgtacgacaaggctacgagaaaaccagtctggggcggtggcctcgaaggctcctcgtcggactgtgcctaacagccaagacagcgcgagtttctcacccagaaccctacgcttttctctttccacaacgcacatacacctcacgcatcgtccactaactgcgctctcctctcacttgtcgcaagactacttccttccgtgcggagccgcgccggcccctgtgaacgcgtacagtccttagaaattcgccttttcttgccagaccgagaaaagaattctggaaaactgcagcgtgcatgtttcgctttttctcagctcgacctataccccagtgtcgctgtttgaggccaacacccccccgaccactcccccctttttcaatggtgtcgtgtgcagcccccgaatttcccctgtgtcgacggcaaaacccagcacctcccccctccgaccgtgtcgaccactctctccgccctctcctctctactggcagctcggaaccgcgaccgctgtgtacacccgagcttctttcacgcaagaagcctctgtcgtagcgccctgtttcagaggccggcgacgaatcgaaaggcgcgaaaaaaagcggcctctccgggtggtggcgaaaagcagctgtgagcaaaccgaggtcttcgccaccgcggaccccgccgggtgtatgtacaccctgctagtcgctacgccaccctcctccagtgtgtctggcacacatggcgactggcgcgtttgcgaggaaaggcatcgtcgagaaaagtggagtgaccaaaaaacacctgacactctctctgtgaaaaagtgtctgttttgaaagccgatcgcggcaggaacgacgtcatctttctgccgtgggaggtggtctggctgctgggggaactgccggacacgtcgccgtttccgtccctcctcgctcccgtttccactttctcgccgacgtctcacgtcgcttttttggtagcaacatccgcggaaccgtctaaacgtggcgcacttttttcgaagacgcgccacaaagaggacaagacaaagcaccctgtcagtgcctccgagcgcacacccgccaaaaatcgggagaaaacagtcgcgccctcagctcttgcaggagacacgaattagcctgcgactcctccttttttgcggggtgtcgtttgagctttgggggtggaaggcgtacaaaatagtgtccccagctgggctcggcacagcccgccttaccgtcggatcacaagctagagtggccgtcaactcgactgcacgcggtcccgtgaagccttttttggaagcgaggacaaaacgggcaggcggaatacggatcacgctcttagtacgtcgtggtagtcatttcgaaatacgccagaaaagcagcagagtcgcagcaaggaacctccttgcctctgttgctccgccgttctctgtcctggggtacgggacagcgctgagcttccttctccaagagaatctcgtcctaacggtacaagcaggtatagcgttcttgacttcttgatgctctctcgggtgtgtacttgttacaccgcggcagcttggagtggagctgtatgtacgcctgattgggcggctcccgctccagcgtccccagagtgacttttctgcttttcactctagggttttctcgttttcttctcgtcgcttctgtctgtctcttttcccctctctccccttcttccctctggttccctgattctcttcactctgtctttccctttcttcgcctggacccagggcttttgcctcggcgtctcctcttcttcgcacactccggcgcatgcgcgcggccgcgccggggccttcctccctgtcgacgaccgcatgtcatcacga

SEQ ID NO: 3330 - DNA, 2597 bp, Toxoplasma gondii
  source 1..2597: mol_type = genomic DNA
gggtttcttgaactttttcgagatactgttctcattccgacagtgaattcttcagcttgggggggggacggaggtttttgactggagagcggattggcgtgccggggcaccaccatttctcgtcattaatgagaccagtgtttttcttcgtttctggtgcagacggggcctttcggacgcggagaacgcccgtctcgagaacgcaaagtcagaagtcaagactgtgcagcaggagatctggagagtggaggctgcttccggtcaaaaataaataactgtgtgcaaactccaacatcaccgatcaccactgcgccgtcattcgcgacaaacgaatgaactcaaagaaaaggtttttaccacagacgaggacggaaaatcggctcaataaacaatttttttgtggttaagtgcggagtacgtccaatggtacagtgttgtttttcgtcagtcgcaacgtcgggaaatgtccaataactctctgtttcgtgtctttttcagtgctcagtccgtcacttggatgctggctggactgcgtcacccctgctcttttcagatttatcagaatctttctgttaacgttctgtctatggagcgccgccacgcgggcttaatatgtcagatgctttcattcggctggtttccgtttacatctagagtatatggagcacctctccccacaagctcgcctgaagcacaccaaatagtcatggttgtggcaggcacagttcagaaaggcaaccaaaggggctgatgtggacaagggcacttccagagcatattaaactcactgcagtaaagctctcaacactcggacactgtgaccgagctcgtttctacgatgcggtcgcgggtgtcttacaccatctgttactttgagaaagcgcggttgctttaacgctcaatcgtctccagaaaaaacacgtagcattcgttgtgctgccacgtctgctactccaactggagtaactacccgatgctctgggttaagcacgttttggctgcgttcgctccggccgtcaggttgtcagcttgttcactctaccatactgagtaccagcagtacccgctgaactgaagaatcacggaactctttcctatttaataaaaccggacgttatgaggctttccttggtgtagtgtcgacatgggtagtggacgtctggattccgtctcgggcgcttagcagtctattcatacgaaaaccgcaaaaacaagtgttcacattccagcagaacatcgcagctgtctccgggactctggtggagcgtcctatcagctggataccggtgtagcgttgaaactggtgaggggctgaaaaaaacggcccgccatcatgagtattgcgtcatgaatccccagcaaacaggcggtttcagcacgggcggaaaaccccgaatggttatctagttgccaggcgagcggttacacaggaaccagtagagtgtggtaactcgagtaaagaacggagaacaacctcctggaacagcagcaccacttgttggaaaaacggagccgcagctacattgaagcactcagatgatagggactggggaagcgaaatggaaaatatctctcggcgaagcattatgctgaaagaggtgggtgaaagaatgcgccattgagctgaagaaggcattcgaaaagcatcgtggaacagtcagtacttgtccccgctccatttgttcgcgctgcatgcgtttcgaaacagctttgcaaaacgaacctttctcttcccgagatgctatttccagtcccgtaccaacaataaggactaaagtcgcgtgacgaaactggttctcttttcatactgtaacatgtagtgtcgggcgaacaggtgagaacctggtcacggggaagaattgtccgcgcccctgcattatcgatgttttttctgaacaaccaacgactttggtctccgagcactgtgtctgtgagtttcacttgtttgttgtggctttggaaagaggtttgccagacggttaagagaacagacctgtagggcgggaccgtcttccagacgtctgttcatgctgctcagaacccgttcgttgttcgcactgagtctttgtgctccttgtcttaaaactgcttcatccgttctctaattcgaaatccaaaagagatcgctttaattcgacttcttagtcggacagacctcggccctagaagacatccctactccttgtgggcttgtaaccacgtcaaaagaatctctgtcgcgttcgctggagattccttctcggccttctaacagtggaatcttgctgcgtccccttgagagagagtaaaacccgtgtcgtaactgaaatgttctcctaaacaggttcatgccttcgtccagctgacaccttgaatccccgttgctccccacgacgtatcggcttaccacatttaaaacccacggcttccgcaaaaccatatttctttgagagaaggccgtcgccatttggttcggaagacaggaaatcgttcactggtgtctcgcgaacgcaagagaggctggaacgccggaaaagcagcagcgtacgtgaagacgggcacaaaccccctttccgcgtgaagtttcaattgaagcttttgacagcgaaactttacca

SEQ ID NO: 3331 - DNA, 2560 bp, Toxoplasma gondii
  source 1..2560: mol_type = genomic DNA
gatccagtcttgattcctcgcgatcagcgtcgacttggaaatgaggcgagtctgcatgagacaacggacgcgcgaaacaaccaagggggggagagaagagatctttggctatccacatcgacgcagggatatttgagtctgaactcacttgccgagaagactctcgacacgagtcgtctgcggcagagcacccaccgatcggttgatcgcgctgacctctggggtcggccttggagtcctgagaagacgaggaagagccggcggactttctcgaagcgtggtgcgaagaacgttgcaggagaggcgccttttctccccgaggctcatatggagtgtctacaaaaatccccccagacgcgagaaccgcgcgatcggggttgcatcgcgcaggagggagcctgtcagcgtcgcttttgtgaggtcgagagacgtcggtggtccgagtttggggaattcgagtcgagcccagaaaagctttacactccgagctctggctagaaagagtcactgattttcctgaaaaagaaatgatgcgcgtgccttctgggtaggaagcaacagcctgtttgggtcctacgctcgagctcggggtcccatactctggcttcagcgctgagtgttcaacgaaagccgtcgcatcctcgaaagacataatcttcagcgcatccatatctgtcggcgagaaactcagatctaggggttccgagggcgttttcccgagaacaagtgcgatcccatgttccccagtatcatcggtgtactccatctgtctgctttaacgtccacggtgcgctcaatagaggcgccgcggcatacacccagtgaaatggtgaatccgagacaggccggacagcaaacgcaaaagcttggagtggcaggagagtcgggcaggaaagcgggtatgcaatgcagccgcgaaacggtgtgaaagagtttctaaacattcaaataaactcgtgattttgagtcgaaaccggtaagtggcgcggctcttcaggtgtcatccgataaccgcgagaaatatgaatcgcaccagatcgaagtcttcgaaagagacgaaaaaactttgggaagatttgcgcctctcgctgcagaaaaacggtttgaacagcgacgaggacaagggaagaccgagtctgcgaagtgttgcaacaaatcgaatagggctcagtatgggtcgagtgtcatagatttgtttcagcgctcaaaaagaaacgaacggaaagatatgaaatcaagacggcagacgaaaaaacggggcaggtcggaagaacaagcagaaacgcgggaaaaactaccctggtcttgtggctggaaagagtcgcctcaccgcgggtctctatggactcgccatggggggggaggggggaacctgttcgggggctttaaaaatgagaatggcgctttcatcggggagagaatggtcgtaacatctactccggctgagattattggctgcgaactgtgaagaaagttctcgcagcaattccgacacttcccgctcattcgaaagcaccctccagcccgctgctgttgtcttctggcaaccacgcgcgcgtcgggtctcagaaaccgtgaaattagaggaagttttcaagaaagcagctggagactctagcgcgcatgtcgagcgtgacgagaaagctgaggaaaagacacgacgcgagagacccgctttgagccccaaaggtcagaagacaagcagcaggaggcgcccccccccttttcctgcgtgtggaggtggatccttgagtctagaaaagaccaagttcgttcagtaaccaacgggcgacacggcttcttccgtgtcgttctggtaaagaatcattctccagtccatctggcacagagagagcgcgacttttacggttgtcgccgcctcgagtcttagcgacctaactgtaaagattcactccttccataagccgctacactttgcaatgctagcagcgtgccgcccgctgccccgatttctgaacagctcgaaacgcggcaaaaaagagagggtgttaatggaagagcgtcatcctttcgcgggcgtttgtgagaggtggacggctgcttgtctttcggcgcaagttctgggaaaagtcgaacaattgagaaattccaaacacctaggaaagtgccggacgaaagggagttccaggcgtcctgcgcgagcgaaggatgagggattggcgctgattccggagtggtacggattccggatcatttcgtcctgcggttgtcgagctcggtgtcgagtcagaaagtcgcgggaatgtgctctggtgtttaggtctgtgcaaatgttgttacactcgtggtggcaacatcgaattgttccacagggacgcaaactgggcaaagagaactcggcctgttttcgttgtttcccatcaccgcccgccgaccagttgcgtggtcacacacagcactcaggccactgcgtgtacatcgttttttcgttcaagagaagctggcggatttaaaagccaagtcatttgtcttaccgcgcacccttgacgcgagctttgtccgcctgcgactgtctgcaagttgattcgaatcacgaaaa

SEQ ID NO: 3332 - DNA, 2190 bp, Toxoplasma gondii
  source 1..2190: mol_type = genomic DNA
tttttcttggtgttttgcactgtgcgtttgctcaggtggcccgatgttgaacgcaggctatgcagcccttgtgacagcgtatcgtcttgatgtgattggattttttcttctggtggcggcggacctgctcgctgcgtacctagccacgcttgttgtgaagccgtttgcatgcgtccccgaaaagaagcctgtagctccagcgagaagaaacgtctctgtgtggccggaacaaagcacagagaagcggaaggcagagtagctaagctcgtgccacatacttacctgcatgcacaagtgaacatttggacgcggtgtcagctgcagttcattttgcgccgcccggttcgtagctggatcggacaccaacaccaacaagaagcatttacatggcaagcagcgaagattgggtaacacgttaagccaatccaacaatcccaaaagttaggtcggcaaatacttggtgccgccagaggatacccaagttgcttcttgtacgccattcggcgaagggacagggcgacgtccacagttcagcagaggatctctgagaaaaaagcggcatcgcaaatttgacagggcacagaatgtagattctgtgacagttgaagcatgcactaactgcgagccaagaaaaaaagtggcgacgaagtctggggccgccgcggtctggtggtgtgacaccacgggctctacagctctgctccttcagaactgtatgtgagaacttttattgctgtgacaagtcgctcatgctgcttcgcattgttggtttcgcttccggtcctcattgccgtcatagtgttgtgtgttgtatgttgctcggtacgtggcgggcgctgcactattgcggaaaccgctctccaatgtccgtaggcaagaatacatgatgttgctaggcgtattcacgtgtatctgcacggagtggtattttgcgacgagcgggtgctcacagagaatacacacatataaccgatgtgtacgcatgctcttacacattgccgtcacttttgttggtatgtgaaacgatgtgcttcagagtaagcagtgtgtgaagcttgataccatggcttggctgaactttgacgggtgctgtgttctccagtgtccacggccatctaaggaagtgagcggattacacaccagcccgtcagatgagaaaagtccgttgtacagaatggcattctcaagttcaagcggtgacgctgttgacgcacggcggcagatatttttctccagcgctgctgcgtgcccttgacgtttgcgtgtgagggccgcggttgcgcccccttggattttctcagtgtctcgttttttgccggtaacgagggtgtgagcagtgcgaagtcgcgatcttgtcggagtgcggaagaaacaagcaccacagtgcaggttgtacacatgaagtgaactgtcgtatcctcctggagccataggttgattggtaggcagcacgactacattgcataggaaaggactaaactcgtcagaatacctctttcacgaaggaacacaactatagcagatttcagttaaccgagagtaacggcggcttggaagagacgccaagctctgcgcagctgttcacggagcctaacagaggctgcgcgttgctaacagtgttgttctcatatgcatctctgccgcgccaaatctgtatgcccagaagagcgtatttttcttttccctcagtgtggtcttcgccgcactggcagcaatgcacctcgcacctggctacgctcgtttcttgcacaccgcattcagcaaaaaaaaaagaagcagctagagctcgatagggttaagatcggaaattgagacgagcacacagacgcagacaagagggaattccggctttcctgtttgaggttcaaaaacggcgttttggtaatctgaaaaggcgaagaccggtgtatatccgctatgtctaccagacacactcgagagaaactacagcccttctgtatgtgttgggtttcgccgtctgatgaactctcggtggctgttagaagatgttacgtcaaatcacaggcgcattcatctagagatggtgctttttttttattggccacaagtccaaaaaattaaactgcttgaagccctgacgccagcaggtcgtttttaaagccttcctggagcactcaactatcgagtctattttcaccgcattgtaaaatagcggcgacctccgcgata

SEQ ID NO: 3333 - DNA, 4067 bp, Toxoplasma gondii
  source 1..4067: mol_type = genomic DNA
gtgtacagacaaagagcgagatccacagggaggtcctcgcctcgaatcgagagctcaagaggcacagtcacgtccacgaaaggatcttctctggcagggccttgcctgctaaattccctcgcgtctccgagtggctcttcttttccgcttctgtcgccgtcgacgcgaccgccgtcgtgttggcccttttgttctctcgctttgtttccgccgcccacggcgctctgcaagcgactagcgaccagcgggaccgacgcccgcagactcgtcagagcaagagcctgactcgagtaaggtccttcgcatcctcctgacagtttcgtttttaccaccacgagcgccgatttgagagcctctttgatgtcggcctttgtaaaccgtcttcgcgaagagaggtttctgcgcaacgaagacatcgcctggacgcttccttgttcgcgggagaacaacgcatgagcgtcccccatctgcacgtccatgccgcctcgctctgtctccttccttccccacctgcctcccccgccctccgctccggagtctgtacactgcgcgcccgccaagatacccgcgccagttcggcgctcgccgacttcccggcccgtgtgttttcttcttcccgtcgccgttctccatccttggccatctcctccatcgtcgtagctcccactgtctttccgaaaatggccttcacagacctcgccgtttgcatctgcaacctgcccagtcatcccagcccccgacgcgtctccatgcggcctcgaggcgccggcagggggagagagacggagcgggagagcgaggtggacgtcgtaaacgccgttcagagacagcattcgtggagctgcatgcaaaactggcagcgacagagaggaagcctgctcggactccttccccgtcgtctctcgcgcctcgtctgtctctgcgaaaacgacgcctgctctggacggactctgggtgtgttggtcagtccgccttcctccctcaacagcgacttccacctgcggtttcgcgcaagtgtctctgctgtttccgccgcggctggctgttgcgcgaccccaaacacaggcgtcagggactcgtccgaacgcgagagcgacagcctgtttcgctgacgtttctcgaggccattcgacgcccacaccgacgtctcttctgggtggctcgcctctcgactcagctggctggagagcctctgcatgcccctcatgtgcggagagagaagaggaagagggctctgaccagtgcatgcagaccacgacattctctccccacaactcatcggttggagcggagaatgagacagagtacagcggcggagcttcgatgtctcctcggatccccgatgtttctctatccgaggagacagagcgttccagagtcccccgcgcaacagctggcgatgcacagagcttcgcagagacgtcttcatgtgcttgcggcgcatgcgttttctgctcgccactgaccataccatgtctcgcgtccctcctgcctccgcctgctcctccaatatgagtggcgctctgcacaccggctgtctctgccgacgcagggggggtggtgtcgcctctcggaccgcctgcctcgttgtcgagggccttctctccctgaccgagacgtggtggatctgcgtctgggtgaacggctgcatgcaaggaaaaaaacgcagaggccgggagagagcacggcgaagtagggaacgagagacgcacaccccagccgttgtcggggtcgctgaaggcctgaaagagaccctgagtggggagccaggcttttccggagggcgtcgggagaaaagtggagaacgacgaagcgatttgtctctgcgcctcgccttcgaagagaggactgaaagcagaagaaaaggtagatggccccgacctgacgaacggctttctgtgaggagcgcttgccaggcaatccggcgactcgccgtgctgctgaaccggggacgacatctgaggtgtcgagacccccgaggagacgcttccctcctctcgggccgcttcaaacgtccccgcagcttcgggtgtatcgacacccgaccaggaggtgatggccgcctccctgagggaagaggcaggtccgctcttcgtcgcggatcctccatggctgctcagcgaggcatttgctccgctggacgacggaaggggagcgggatgcgaagcgccgatgtgcgagcgaggcggcgcgggtgtatggacacctgggaggtgcggagggccggggatcgtcgccaggggcgaggcagacggcgccctgagtgcggcgacgcgcgcagagagacctgcgaagacgaggagaaaggggagccagacgagacagccgcgaaggctgctgagagcgctcgccattctgtaggggagagggacatacagcacagcgcgctgcaggagagaacaccctgaagcggacaaagagcggagccggagaatctgagtgcacagaaaagacgggagacttggcgagagaagcgggagacttggcgagagaagcgggagacccgagacgagccacacaaggcgaggcagccgcctggagagagacacaccacgcgcttcctcccttcttctctgatttctgtcgcttctacattgcggcggaaggcgatgcgttttttgcgtctcttccagtctcccttcgctcggctttctcccgaggagacacggacgcattcaagggaggggcggggggggggggggggcagagaggagaggagaggagagaggcgcggagagccacgcacaagcagcggcgatgaagacgttccgcagcgaggaaaaaaagcagaggtgaagaagcaaaaggaggggaaaacgacagagaacaagaccgaacacgagagctctttgtctccgcctctcgggcgaaggatccctgtctacggcgccttcacacggagacggaaaccggcgagagacggggggaagcgaaacagagaagcaagagcgaaggagacgctcttctgacagaaaaaactcttttacacttttcgttccaaattgtctcggccgcaaacggacaacacacactgctgatttcctctctcccgccgagcgcgcagtcgctgcggcgagaccgacggcgcccttcttttccccgggaggcacctctctctctcgcttggtctctctctctctctacctctatctctctctctcgcttggtctctgaggagccgctgttcctaaacgacgcaaagaagacaagaaggcgacacgaagagggggaagaacgcaggtgagaagaagggatgcgaaagaaaaagacgagagaagagtcgattgctcgttctgggaggctgcttgctgttgaccgacaccacgagaaagacaggcatgtgcactgtgcggccaccggagccccgcgtttcgcgttttttacgggagagaagaacgcaggagaaagcgagagacgcggctttttctcgaagtttttcttctcgcagcgaggcttgtctcctcgcgcggagctctcctgtttctctctcttcgtgtctctgcttcccttcgttttcgcgcgcgacttcgcccgctgcgctggcagtccctagcgtcctcccgccaagtaccacgctgtttctcgctttcgcctgcttcgccttcatttcgtctgttccgcgcttcttccggctgacatttcagatggaggtcgaagccggcggttgccgcttcagtcaagcttcttcctctgtctcgactgctgctccgtctgtcctccctccctccctcccaacccagggaggcagagaaagcagccgggacagaggaagaagcttgactgctggaacgaggacttcttcggtgctctgcgggctgtacagacagcgtgtgtgccactggcttctgccgagtcgcttggagcgcgagagaggttcccgaacttgaaaaatacatcgactcccccttctctgttcacttctttctttcgacttcgccgcgaagcccaggaacagactggagacggagtggcaacgaaaaaaaaggaggcatttctgctgcatgcgagcgcagaaggagcctcgcgaggaagaagcgaaacgaacgcatgaagatggcgtagcagga

SEQ ID NO: 3334 - DNA, 2832 bp, Toxoplasma gondii
  source 1..2832: mol_type = genomic DNA
aaacgcgatcgaacagagcctgggaactctacagcgttcttctctcgccaccggaagcctgtctgagacgcgtcgtcactgccaaacacagcacaggcgagtctcgcttctcgctcctctcttcctctgtctccgcgcgctttctcttcctctgtcttgccggacttcttcgcttgcttctttcctcctctgtgttcctgctttttgacgcctaccgtctccgttggagtcgaactccatgaattcctcgcggatgaaggcctcgtcgtcttcgtccatctccctcccgactttgtgaacggctgcttcgtcgtctgcactcgtccgaggctgcaaattcgctgtcgacggacttgcgtccttcgccgtcttccctgaagcagaggcctgtggggcggctgcggcttccacggccagtggcggcgccaggcgcgcgaaagaggacgcgcggcaaaacagagaaagcagaggaaagagaaacacagcggagcggcagagagcaccaggagagacttgcatggtggcaggaagcgcgggggacgagagacggtcgcgtcagcaagcggcgcagcggcagaggagagagaagagaagagagacggaacgagagaagaggaactcggcgaggagaagacggtcggttgacaaaaagggagcggtggggagatcgccaaggaagctgaagtttgccaaaggtttggaggaacgcggcgagagacgcacagggcaccagtggaaaagaagaaaggttgagagcagaggctcttttttgcagggatggcgaggcgagaaggcaggatgccgcaaaaagccgcggagacacaggcgagaagcaatgccgatgttcttcagagaagcttcttgtgagaagaggatgaccgacgagagagagcggctgcctgcgaaacagagaagagacgagaaaagcgcctgcctctttcctgacacacacgcgtcgttcctcttctagaaagaagacaagaactgacagagagtgacggcgccaatcctgctcgcgggcaacagaatgggagaaaaaaagagaaagacaccgcgagggggaggtggggaggggaccggagcgcgacggcgtagaacgcgagttggagttttccttctcccttcaaaaaggtctgagagcgaaggagtctttttcatgtgacacgcgatctctctcggcgcgagacgcctcctctccgcgagggtcaccggggaggaactctgcacctgtctctctccctagaaaggatgagagacagaaacgcaagagaaaacagagccgaagacgcatgcacaaaggaaagaaagagaaaaaagggcactggacgcacacaacgtcgcagaaagaagaacctcaggttccacgcaaaggcgagagcagatatgggcaacgaggaacagaaaaggatttccgacggctggaggagaagacggcgccgccgaaaatcctagacgccacactgcgttccctaaacggattggtttcgtcctctgcgttgtcaaatttcttcaaactgttgctttagcacatggagaaaaacgcattttccgatcttttccccattctgcctgagcgcacaaccaaaggcgcgaggaagagctttcgagagacgcttcagcgcgcattgttttgtagacatacgagacgcgctgttctgtgtttctacaaaagcaactttcttctcgcgaaactccgagagaacatcgacacccagagaccaccgaaaccgttttttgaactttaggccggctgtcaagggcaccgcgagatcttctggttttcggtgtgcgaccgcccgttggtctccgtgcatcttttcttctggtcttctgcgctagcttctctacctcctgcgtttctcgcgtcttcctcgttctttgttgttgtcgataaacactggtggaagacgtagagcagcgtcttgagcttctcgcgcgtggaagcgcgtcactgccctgaaaacctcgcagaaacgcccctgcgtgatctccatctcgcggtgtgtgcagcggcgtcgactctcgatccttctcctaccccgtctgttctctgttccctctcttctttcatctcttcagtgaggtcgtccggccctcacctgtatggaacttccttgcggctcgtttcgcctggttcctccagtctcgaggactccaggtctctctctccctccgcgcctgtctccctcccgccgtctctctcagaaaaacaagagcgacgggaggaagaagacacgcagcagtcagctggacgaagatcaagcagaggtcaaggagagagaaaaaaaacagatgagaaggagggcgcctgagtcagacgacgcgctgaaggtggaaagaaaccgcagtgacccgggggtcctgcgaggaaacaaaagtgcgaacaaatgtaaatcttttccttgagaggcgaatctcaggcggagcctctcccggaaacagttcttcactgcttcgtcctttcctcgtcgtcttcctctcgtcaccttcggacgccgtcgccgtccccatctcctttccctgcttctctctcttctttctcttcttctccctctctcctgtctgtctctcttcactctcttctctctcttcttctccctctctcctgtctgtctctcttcactctcttctctctgttctctctcttcttctccctctctcctgtctgtctctcttcactctcttctctctcttcttctccctctctcctgtctgtctctcttctctttcttcactctcttctctctcttcttctccctctctcctgtctgtctctcttctctttcttctctctcttctctctcttcttcgctccatcgttcgtttgcacaa

SEQ ID NO: 3335 - DNA, 2232 bp, Toxoplasma gondii
  source 1..2232: mol_type = genomic DNA
gtattgactacaaggtaagggaggtgaaatgacacccatctttatagctgagaaacgtccttttggtacaatacccagaaggcttcggatgctcttgtaacccagcttaacaaggcgttgaaataggtcgttgactccaaggtgttggttatatttctgctccgttgctgtcgcaggaatttgcagagctgttcaaatgagaagctgagcttgtaacaccaccgattcgacagaggcaacgcgctaagtattactgaaacgcgctttgtagaggcaacgcgataaatattattgaaccgtgcttagtcgaggggcattcataccacagcttgcggtggcggacgaagacggtggcctgctgcctttccgagttgaaaaaaagcgtcctctttttaggagataattggaccgatggttttgcttgtggaaggagaaccaaaagactaaacacagcgcaaatacggacgatgtacgggaaatgcaaacacatgcgacgtgaaacgaaacgcatagcggttgtgtgaaacggaaggcggcagaaaaagaagattgaggggtgcagagaggcaccgcagaaggaagatgatggaataaaaggagggtgaaaaaatgtgctacagtgaaagaggaaaatgtgacacagaaacaactgcttagttaacgaggagaattagtccactggacggcattttatcggggcctgcccagttaagatttgcggaaccgaccacacgaaggaagtggttgggggccgcgaataggtattggaaagctatcatccagaaacatgggcatccctgtgccccctgtgttctgaactgctaaagccgcgcgtaaactggaaacgtttttctgtcttgtgtgagattggagagagaacgactgtggtgtaaaagttgtggcgccgtcttccacaggacttccgccatcttgagagcacccaatctgttacgtgcatgcatagaaaaaggaaatgtggccgttgcaaattaaccactttcgcttatacatcgaaaatacagttctaaacaaccagctttggcccaggaacagaccacgactgaaacccagaaggaaggaagcggtccgttgttactcctgtaggctgcgacctccgagaaagaactatatatctgaatgatgtcttctgccacgcgtatacctgcttaagaaaccttgtgctacgcaaacagctctgttgtcaaactaaggggtaacactcctatagcgagcccagtgtagatcagattatccacaattgtcccgcggttcctctcctcaactatttttttgacgaacctgagtgtgcaaaatgtgtggtgttgcgtctatcttgctactctcccgagaagtctttcacacacccgtggaagtcttatatcttctcaggcgttttattcgcaaaaacggctgcggcggaatttgtctcaaattcagccactaccggaaagtgacggtgctcgttccaactgatcattttgtggcagatgttgcgggagctaacgacatttgggaaattcctacaaaatgtacttttgagatgactccagactgccacgactaggaacccgacaccaattgagagcctgtcgacgatgttttgacgcgcatgcacatctgccggcacgtgagaaaatgtgcatgcactggcattttcgttcgccaaagtccacggcttttcttccctgtttccgtcagacacgcgaccacccgttccctcctgatccgcttctttctttttcctagctcttcatcatgtctgcccgccagctcgggtacaaattgcttgtgcgtatgcattggcaccgaaacagttctcggtcgcatgtgaatccttttcatcctctatcttgcaaaggcaccggatcctagttgaatgccaggacgagtcttacgacggcatcccctcagagaaattttctttccatgtccaggttgccacccttccttcttttctgatgtcactgaagacgtttctcttcaggtcactcgcctcccaacgacctcaccacctaccagagattccacttgagcgtttctgcgaactgtttgactttaaatcaaactagccgattcctagaagggccgctgctgtgtcggcttcgtataactgcatgcggactttgaactccgcagagactggaataaaaggcacagaattggtactacgaagaagcgaccgcttctctgacggttgagaatcgggcgttcgctagaggcattcttccgcca

SEQ ID NO: 3336 - DNA, 2605 bp, Toxoplasma gondii
  source 1..2605: mol_type = genomic DNA
aaaagtgagggagagcagaagaactgaccttcggagagagaggaatctgagaggaagagagaggagaaagagaagaagagagagaaggagagagagaaggagagagagaagtcgctagtggctggtgaggctcagacagaggcgaaggaggcggaacttcctgccgcgggcaccgagacaaggtgtgaccgaggctggggcgcgtaaacggagacagagaagaagtcggagaagaggaagaggaaggcgacgaagaagaggaagaagaggaagaagaggaaggcgacgaagaagaggaagaagaggaagaagaggaaggcgacgaagaagaggaagaagaggaagaaaaggaaggagacgaaggaggggaagatgaatgatacgactctacatttatttcttcctgggtaaagcgggaagtgggcggaggttcttcagagctcacatgcccagaagacgatggagagactaaaggcagtgcatacaactctgcacacgaggaagaggagacgacggaggctgaagaaggagacgaagaagttgcggacgaggaaagcgcttcctcatcgccgcagagcatctgcatagacagagagccttgaaaagcattgcgcgagcgcgaagcttcagaaggctcgacagcctcgtctctgaacgtcgaagaaagctcctgctcctcgtcctccatgacaggagcaactgaggggaggaaagagaagggggaagagccggcgcgaaggcgcgagaacctcgctttcagcagaggcagagcggcagtccacgctctctacgcgaaggcgacaatcacgaggttctgagacttttggaagatatcgaaggcgaaaaacacagagtgaagcagaggcaacgagagcagcggagaagcttgacaggggcagagacttgttccaggaaaggtggagcaagagacgaaggaaaagaggtggaggacgagaaagaacgaagcaaatcgagcgacagcgagaggaggaacgtaggacgacgcggcgaaggaaaggagtacacgagggaagagaaaagagaagaaaaaggagaagaaaaaagagaagaaaaaggagaagaaaaaagaaaagagagaagagagcaattgtagaaggagaaaaggagaacagtagttgactacatgaaggggaaaaaaggaacgcaaagagacaaagagcggacgatgtagcgcaggcgccttccgcaaaaagcatcgagaggagaggaagctggcacactctttctcgaacgctttgaaacgtttttccagaaaggttcgcgtccttgccttgcgtaaaagggagaaaactcgaaagaacgagagcatatgccatcgccgttctcgtgtttccctgtgcttctctttcgcgcggatcgtcgcgctggacgggcaccgtctctgtcaatttgctgtttcctccacttttgcgtcgttcgcgtattatctttaacggcgaatctacacccttggtgcgccttttcttttggcctcctttctttccgagcaactgaggcgacgttttgaaggcaatctgggtgtcttccctcgggcatggctctcaggcctcgcgagacgaaacgagctggaacttgtgcttgcgccgcgacagcgccgatttccggctcccgtggtgtcgaggcagagtttcttcctcacacctgcatcgaaggctggagcgaattccccggccaccatgtccaggcgacgtttgtaccatccctggcgtttcacagaagaaaaaaaggcctctcgaacggacatttccgtccctgcgccccgctctcggcggtttgcgtccctgctccgagtttctcgagtgaggcagtgaaaaggcattcgtttcagtccttctcgtctgcgcaattatccgccagactcgtcggcttcttcgaaaaccttcttttcagacgggcgcggaggcgttcctgggagtcgcgaccggcgcttgacactgcggagagctgcgttcgatccgacagaggggtcgcacacactctcctttttacacgaaaacgctcgcgaaacacgggagcggggaaagttctgccgaaaagagctgactgcccgaggcgggagggggaccagcgttcgctcgaggctggaaaaaaagaaagacacttgcagacgctcgtgagaacgctgcttcgacagagaggacgccagcggcgctgtactcgcgagtccttcttcgccgtttcgccgtgtgaagagaaagctggaaaaagtttgtgtcaatcctgcggactgacgatcggcttcgcgacacaaagcgcgggagttgacccaggctgacaagctccgtctgttttttgtgtacggtgtgaaccttcgtgtaacagtccgcagttcgagttgagatgagacctcgactccgtcgctagttttgagcgcgaacaattccgacttttgggggttgagcgtcgctctttcgcgacgacgagggtgttttgacgcaagttgcgcgtttgtgtctccagttttttgcgtttcgtatcgactctcgcgagagctccagaacgcgcgaacacaggccgccgactctcgcctccttgacattcttctgcttcttttcaagagcccggcgacaccgtcacttcacga

SEQ ID NO: 3337 - DNA, 2337 bp, Toxoplasma gondii
  source 1..2337: mol_type = genomic DNA
cagcacgaactagaaggacgaggaccgtaatttcggcgcttgtgttgagacccttcctcgaccgaccggggaaacccagatacagatgctgaactctgttttaagctggacagagagcgtgggaactccctgtcgagggccgtgagagtgcaagcccacggcaactgattttcttctgctctgaggcaaaacggtttttcttccgcgaaggcggccttcaggcttcacgagcgtccgccattgcctcttgtggggggtcccgctcttcttctctgattctctccgaggctctcgggtcccgccagcgtcctcggccgcgctcgaagagccttgacttcatctcgtgtctgcagcgagagtggagcaggaagccgcataagaggggaagtcaccacgaaaagtaatgacgggggatcagagaaatgccgagagaagtcggaggactgagcagaggcagcgaggtcagagttggcgttgcagagagcaagagagaaggcagagaagaagaactgaacggaaaagaagagagcagtggggaaaaaagaaagaacacaggaggaggaacagtggcggaggagacagcggaaaagaggggaagagagaagaagggcagacgcagttctggacgggaggggcggagagcgtacaaccgagctagaaagtgcatgggcgtgatggacatgaagcgaaggcagcgagagaaggaaagcgaagaaaacacggagggacgagaaaagacaagaagcgaaagatgttgctggggcgaggaaggatgcatagaagagttctgcattctacgattctcggcaagtctgcagatgagacaggtcaagagggccgccgacaccggaggaagccgcagaccgtcgaagcatgcacgaaggaaacttcaaaggttttgaaaagcgccttgactcctcggagagctgtttagcccacgcttggaaagacaacttcccgcagtctctcacgaacagtttctccctctgatacgcagtcgaggtccgagaagtcgagaccaagcgacaggagccgcagggctcggagatggaggctgtagaacgcagcgcgcgaagaggaggagcggcagagggcacaagaggcgaaaaatgaagaaagacgacttctttctggccctcagaagagtgtcgactttacggagtgaagcgatgtggtacctggaggatcaagaaatccactggcacttgaaaaaaagagcggcaaacgaacgaaggtcccgggctgcgccacgactttcgtggctgcagatcgacgcctcggagagccatcgaggtggtatcaggtgtacatacacacccgaacgaagcactttcaggtgtacatccgcccagaacttgaggccgagagtgtgtcgaaaaaggcaaggaaatcacgcttccactataggcgttctttgtttatttgcggcaccactctcccgaggggggcagcttcttcgcgacgggagtgaaggcagacaagacagaaacgtccgcgcggagacacatctgcgcgggaggagaggggaggagacacgcgcaggcgacccacacacatcgcgaaaggggatgaccagatgcagcagaagctcgggaaaggcgagggcgaagcgggcgaggagcaccggaagaaattgtggaaaaagacgcacaaagtcgaatcaagcggtgaagtttggtctccaagaaatccgtattttttctgcgggacggaaggaacgggaatggcaaggcggcgcattgccgggccaaggaaaacgggccccggcctcactgtcagcagccaagtcgatttccagctgctgtctcgattttccggctgcatctactccgacgagattctccaaaatattcaaagaatcgtttctttcgtgcagacacaagaaatcaactcggcaccaacgcgtcctcggcgttcctgagatgtggcatcgcggagcgagttcctgtgtgagcgactctgcagttgcatgttcgggtgtatgtacacccgaggacccctcgatgtttcctcccacaacttctccgccgctctttctgaactggatgttgttgagtaggagcgcggaatgaagttttcctttcacctgccacggcggtgttttgtgttgtgtgcacacggtcgcgggcatttctggtgtctcccgaacgccttcttgtccacttccttggctcggccgggaagtgtacgtacaccgtaattcgccgccgactgatctcctcgcctttccaggtgtatgtacacacctcggcctcgccgcgtcacgctttacgcgcctccatctctttcgctagctcctccttgctcgcccctcggcaaagccatgaagcctcgcga

SEQ ID NO: 3338 - DNA, 2800 bp, Toxoplasma gondii
  source 1..2800: mol_type = genomic DNA
actcaccacaacagtgtacgcggaaagccagttccggtgttttgaagtgtgcggcactcagtaagggggtgtcgaacgggagaggcactggatttgccggttgtttcttcggaagcgactgagaagttgaagtcgacctgtgcgtctttcgctctcgctggagggagtccctgtcttccgcctctcgtgacaggggggtaaagaggtagtacacaagagaggtagctgccggtgtgaaaaggtagacactgcgttgttttctacagtgtaggtcccgaaggcggttctagcaaccaacgtgtcgggagagcgagtttcttctcttttcgtaacaatgtgtacagggagtgacgcgttttttgtgtcggttcttgctgtgatggcaagagaaaacttttgaactcaaccgcaagcagggcttgagggcgccgagctgacgctctcctctttccttctgaaaatggcttcgctgcgctgctcgcaacaatccagagcactcgatgtgcacagcgacaccaattgtattccacttcgactcattcacctaaatctctttttcacgtgcgtttcgattgtgctagcgaaactgtcgaattcgcattcgtcggcatttctttcgatgcgtgttcacagtgacttcatatacagaccaatgccgccacggtgaccgagtgcgtacctccggccatggaaataaagagcgctgtgtcatttttgcgttcttccatccccgattctccctttttttcctccagtctcgtttgactctctggttgagttcctttttctctttcgcgacacccctgtccggctcgccggattgtccagatcgtcgcggagtcctgtgagtcgattaacaccggatcaaggcgcatgctcgcagaaagtgaagagtgtcgcgttcttctcgcggaagcctcccgaccagaaagcttgcttgagacagagtcggtcgattgttcacagaaaacacaaatctgcaggttttcctgccgtcgagagactgaaatgcagaaattgcaggatcggccggtatcgttaggatacgcaaactcatcctgcagtttccaaccctctgttgcaactctggaagagtctctcgtggccgggagagggaaacgagctccctccgtgacggtggactggccgcacagttcacagttcaaaggacagtgtgctgcagagaaaagaagggatttgccggcaagttcgctttcatgtcagcacgagcacgtgagggtacgttgccgagaaaggcttaaacagcgacgccgggaaaaacgagacctgctgctctctaaaacacacgaacagcgagaaacggctctactttacacacgctgcgcaatgagtcgttgcctggagagagaaacggcttattcacaggaacacaaaaactactcaaacgtccattgtaagttttcatagagatattgtaatccatgaataaagggaccatccccaactccgctacgtgttaatcacagagctacaaaaagatctgaaaattccgtttcctgtctcccctcccagtgacaagaaacggttctcgactttaactgcttatttcactgaacaagatggattgctttaaattccacggttgaactgtgcaggcggaacgtcctaaggagacagagcactgaagaaaatcctcaggaatctggcgacgccgttcgccggctctcttctaaatggcaactggaggcatcagcgcaagcattctacccccgcgtcagatgctgaaagcgcccatggtgcggaagaacagtttctcttaagaaactcgacaaatctcgcgtgaagtccacccaccttgggagtggtttgcttttcaaccttcaagcgcaaggtgaactggcgtgtacttcgcgcggcaaccgcgtgtgttgtgtcgaagtgcctgccgagcgagtccgttgaagagaaagggctgttcctctgcctttgcctcgtttccctccacttcagtcgtccagtgaaagaaagtcgaccgaagaaaatccagcaaaatccctgcatgcacacggttgtcttttgactgtcgtgcgtgtccagcggagaccagctgtagaagtcgctgtatctcgacgatacacgagacagcttttttcctcatttgagaactcgaacaccccggaaaggcagagggatttccccagttactcctcgaggcagaggcgtgcgtcctcgctgtggcagaaaagttccttttcgcgatttggttccttctttgcccgcaagacatcgctggcaggtcggctttcagcacacacacacacacacacattcgattgtgcagaacatcccaccgtttagaaggaagtcttttttcgtgtcctgctttttacgggcttcctcgtccatcgaatcaccgtttttgtccggtaacaacgaccttggcttgtgtctggtcactcgaaaagttgccgttccttctacccccctggccgtctctcgtctttctccgtttcgataccggagcttctgctgcatctcaagcgtttcctattccttttcttgaggcagaattcctggagagaggcagtcgccggaagttcgcagagtctcctccatccgacgggtcggaggaccccggcgtcgccggccaccgcgagtgccggctgcctccctcgtcgttttttcgcgtttttcctctgggcgcgtgttttcttagcttcgcagagaaccgcgcagagaaacttcgccggtcggaccctcgcgtcctgctcatgtgtgacgagaaccttccctctaccgccgcagacgaaactcgccgtcaaccgctccgtccccaaaa

SEQ ID NO: 3339 - DNA, 3159 bp, Toxoplasma gondii
  source 1..3159: mol_type = genomic DNA
atgcgtcggaacagaagtaaatcgaaaactgctctgagcagaacaagttgaggaaggagacagtcgcaagggcgacggggcagagccagcagaggggacagggtcgcctcggtgcggaggagcagagggtgcacgacggaggcgcgagagggaaaccgtggcaggcgaggcagaaggacgctggagagaaaagcgaaacggacgagaagacggagcgaaggagggcgcacccagagacaccagagaggcaacagcaggtgacggagaagcgagcggagaaggagatctgaagagagccgcgtcggagaaaggagaaactgaggcatcaggggcgaagagacgcgcctggagttcgttctgcggaaacgaggtctcctctggctgcttctttcctaggtcaaggaaacagagcttggcctgaagttgaccgccgtcctcagcaacgcgcttctcttgactgttctcggcgcagacaacgcatgggttcaccccaagaggagacacagggaaaagcctctcgccagcgccacgcacgcagtcgcccttctcgagctcttatgcgggcagactcagctccgttgatgtctcctcccttcggcaaaaatccagttcaacaggcgacttctttctcacagtccgttctcctgttccctctggcttgccgagaagaacgagaggagccgcctctgtggcgtcagtacgcctggcacgaggcacccaggaagccaaaggcactctcgtggcatgcgcagccatgctgcctccgagtggacattctaaagcgtccagaaagaagtctttctcgggtgcaagtgcaggtaaacacaccggcggaggggtcgagacagagccgcgtcgcaaggcatggacacccactcagttcactccggtcgcaaggaccaggtacagctgggtcacctcgacgcgcagaacttgcgcgaaaaaaagaaaacaaacgacggcgctgacaagtctagaacgctggagaaggggaagggtggctcgaacacacactcctgaatctgtatgtcttcggagtcgatatgggatttctctgcatgtgcacatagacggctgagccgtaggatagcagcataatcgagattttgactgacgaggcagcctacggcagcataagggaaaaacgccgcgggcgcatcgagcgtgggaaagggcttgcgggttctcgataatagcgtctcggtatcctcggaacgtctgttgttcggaaaaaagtgcagacagcagcgaacgctgaggaagcgaaacaccacggagacctcagcaagacagggacggtgcgagaggcaactgtggacagaaaccgaccggggaatagaccctgtcgcgttcttcagtcgctgcaccgcatcatgtcggaaaaccacatgctcgccgtgcaagtgcacggatttccacacaaactcaggatttccagcgagttccagtgtgtgctggactcgcggagtagtggaggttctgctcgaagccgcgtgtcgaaaaaggtgccacgcgctctgaagaaatcgctgtgaaaaggttccgaatcggcaactcggtttcggcagacatgcgttccctggtcgccagccggcactcgttctgcacactttttgagtgccgcgttgcttttcgtgacccactttttgccagattttgtacgattgccggaccggacggctggtgcggtctatatgggaggaaacgcactcgaggctgcatgcgcgagacggtttcccggggcttggagaaccgcgcgtgcgagagccccggtcccgcctgcaggtttttccgcgttttggttggagacgtccgagagaaaaggcgaatcgacgcgagcagcagagacccagcagacacccgccgatttcctggagaaattcgcggggaaaccacccagattcgcgcacgcagttgtactcgcgtggcagactcgaccgccaagcgagacccagctgggcgatccggtgtatgtacaaccgaccgccagcggggcacggcacagaggctgagcgacagaccgtcagaagtttcacagagcgtttacggctttgtcgccgctgagaaaacgagagcttcgctggagactcgcggctcgtcgccttctctccagcagcgaggcagttgctttttcttccggtttttgccccagcctcgcgaggtccttgctcgaccagccgagcaccaccgcgtgctgcagcgcgttgcgggaggaccgtgctgccacgaaaagcctcgagcaacctggcgggagtcttccattttccgttgcttcgacttgccttgtagacgagtggctgaagttcgcgagcctcgcctgattctgtcttgcgcagggcgtgttggagcaacggggcttgctcgcggcacgtgagagctgctgctgacagcagagcgcgacttcgcctagcgccacgattcactgcagcctcgcagcacaccaagttttctttccactcttcccactcccatatcccgaacccgatctgtttcgtcttctggcggacaaagccccgagtcggattgtttcgtcagtaccttcctctcctgtaggcatttgctccgcatcgtccagcatctcgaagaatcgacgctctgtcggtccggctgtctgcacgccttggagagaaaggtctttgagagcgcgcgtttcctctcgattcaaagcctttcttgagagaaaaacggtataccatgacccttggcttccttcaggaccggtgccgcgactttcgaagcctgagattcgccagtctacatctggtcgaacccacctgtagtggagaagaccatcgagaagccggcctcttccccttttttcctcttgcctcttgtccgtctcctgttgtgcttctttcttttgtatcgtatcccggaaccgagccgcgctgtcctccggcactggctctcaggtttcttttttccgggcaacagttcctttgaagagacaaagcagctttccaccggcacaagtcgtcgcggacgttcttttacagcgactcgttgtcaagcgacatttcatcggcaccctttctctgcggactttctgtgtctgtttgcaacttccaggaccgcgtgtctcctcttgtcttcccgtgtacgtctccctggtcttctggtcagttcccccctgttccgccgcctgctctttttccgcga

SEQ ID NO: 3340 - DNA, 2567 bp, Toxoplasma gondii
  source 1..2567: mol_type = genomic DNA
gaagaatctcctcgacgtcctcgcgaaatcccatctcgagcatcctgtctgcttcgtcgagcaccacggcctccaactgcttgcccgcaatctccccccggtccatgaagtctttgaagcgacccgggcatgccacaatcactgacacgccgctgcgcagcttctgcagctgcggatactccggcgcgccgccgtacagacagacggaagccaggcggccgccgagcagcgtctcgaactcctcctgaacttgttgggcgagctcgcgagtcggcaaaagggtcacgatcctcggcttctccttcgagttcccaggctgaggcagcgacgcgcaaactctctccacgagtggcagagcgaaggcaatggtcttccccgtccccgtccgcgcgcgaccgacgaagtcgcgacccgcgaacacgtgcctgtacgcggcctgttggacaggaagtaagcgagtgatgcctcgcttctgcagagacttcagggaagtcttcgacaagttgtagtccgagaggagcccagaatcggacgccggccggccggactccgcgtcgctgtctccatcctgctcatcgttttcctccttggaagaactcggttcagccttcaacaggtcgtccgagtcgtctcgacaccgcgtcttcttagacgcggcagacctggaggacgaaccggagacagtcgcactcggcttaccggcttcggtcgtcgcctgtctgcgcttcttcgcggactgcgcctcgacagtctccggtgtgtccgtttcctctgaagcctcttcagagcgtttcctccgcttcgacggtcgcgcggcagccccctcctcgcgagagaaacgacttttcgcagtctcgggcgccatttcagcttccgttcgtgcagttctctagcagtagccgacttggaccacgcagttcatgcgcgcattcgaagagtccgcgagagaaacgaagagcggcggtcgagctcggactggcggctttcgaaattcaggagcaggcacacctggagcggcagccagctacggtgcggaatgcgtccccggaaagaacggcagtgacttctgcgagcgatttgctgctgtgaacgcggaaggtggaaggccagtcacctcttccgaggtaagggaagacgacaagtgtttgaaaagagaagacagagtttgactcgactacgaggaacgcccggaacatcgacacagcgtacgcgccgacgaccagcgtgtacgggcgacgaacgggtacaagggtagacgcggtttccagtgtcacagcacgcccctgcgtggtgaggcgaattcgatggttcaagacacgagactgagccagcaaacaaggtggggaaatccaaattcgtcgatttctttagcggatcccgcatcccaagtcaacgtcgtgcgacctgtggggcagagtcggcgagagtgccaggagcgggcggtctctcggggaggagtggaaaaaatggggagaacgggaacagaaagaaagatggggaagacgcaaagttcgatctgttgctccgtcacgagaaacttctgtccttcaccgtccctgctccatcgtttgtctgtttctggtctccatgtggcatgccaagcaattagcgagctctcgcttttctttcgctcttctcgcgcttgcatgcacaccggcacagagagcatgggagctgtggctcccctcgacacgccagggcagcgactcctgagacagacggcgcctttttccaatttcttcgctttctggccgcacatcgccgaaggtgacttgaactgagatccgagctcgaacgcatcgactcttctctgctgttccttttcgcttccttctgcagaaagccggatttcctgactgctccgagtgtcaaagatcacgcgcggaggagacagcccaggctcagcgttgagagacagcgcagaggcgacggagacgaggcttccacccgcgtgtctttgacctgcttagatttgcggctttcgcttcctcgccaagcagaccgcgaggctgaaaggcgagaaaaacaacaggtgaattacgcgttctacggagctcgcgcagctgaggacgtcagtcctccctccgtccagtggcgacgcataactcacgctctcacgacaaaatctgcgctctgcatgcggattcctgcccgcgccgaaacgtgattttctcgcgcgttttctgctgaaaacttgacacctaggctttcttcgatccatgcctcgaaacgtacactggtgtctcttccgcggacgtttcttatcacccagtctccccccacgatctggcgaggcctcagacaactggcgacaagtcgccttcgcatctctcgtacgtcgagagaacgattttcctctttactgaactctctctcccatactcgggctcgtccaccgtctcctttgtctccttcgctcctgcctcctttgtctccgtggctcccttcttttctctcctcttctcccgcctctcttccttctctttcctttgcatcctctccttcgtctccttctccttcgtctccttctcctccgcgtctggcatcttcgctttcttcgtctcgaa

SEQ ID NO: 3341 - DNA, 1217 bp, Toxoplasma gondii
  source 1..1217: mol_type = genomic DNA
ttacaaaacactcaataaactatcaaacggctgcgtgcgtcgagaaagctaaaatttcccaggcaggcaaacctcccagcccctaaatgttgtgccagtaagagaaacaagaaaccaaagactcccacacagggctttctggttctgctccctctgctctctgagagaagcgaccgcaacctggcaagagtatcgcgagcacacgaaggacttttcgggaaaatttccgagtttcttggaatccccgcatgcaaacaaagaaaatctcgaggtcgtcacagtttaaacaccacatacacagttactgaatcaaccttagcagaccgtctgaagtccgttttccccggtacaccgacgtgcagttagttacacctctggaccatgagaacttagccgcacgaacccacgaaccacgcctcattcaagtgtctcaacaccaaataaaaaagagaaaatagtggccgtctcggtttctgtgctgggaagtctgaccgtgtccactacgactcgccagatcgctgcggcagcgctcgcggatttcctgtgggcgtggaactcgaactgaaagttcgactcccgaggaagagcctttttctcagaacctactgccaacttgtcgctgaagcgtcaccatcatgttgttgtcgctttcggcgacactccacccggaggtttgcaggaacttcttgaggtcggcgtcctgttcgtaggtggactgttcgtgctggatctcgctctgaatcgttttcaggaggtccttggaagcagcttctaccgagctgtcggcttcggaagagaaagctcttttttcagccgcaaaagcggagctctgggtgcccgtgagcggggagaagaagcgactgtttgtggctgccgccgcgagacccgcgggggctttgaaagggaccgctccgagtctcccctcgcgcagcaccgcagagcagaaggaagaagagaggaacatgcgctcgcgggagctcgaaagaaccccaggaaggcccagtggggttttggaagaaaagagacgaaaaacagaggcagaagtcgccatggtgatgaggcggggagacagcaaaaacgcacgggaaaggcgggaaggcgagaagcagacgacaggcaagaagaacaaaactcgagcggaaaaaacgacggcgcgagaagaaagggactcctgcgactcggcgaccggagagatttctcccgcacaagcagctcta

SEQ ID NO: 3342 - DNA, 1363 bp, Toxoplasma gondii
  source 1..1363: mol_type = genomic DNA
tcgaaacaatcgtgatccgtgtcgacggtgaactgactatacaaagtagtggcaaccaggtgcactgtcgtcatttcgcgatgtcaaaaccaccgcatgcgcaaagaaaccatcgcaaaccgtgcacaaagctaacccatcagattcgtccactcgccgcgaatatatctagacagaagaaggaaatataaaggtgtcagtgtcggccacaacaaaggttggcagtctgatggtgaaccgcggcgcgaatatacactgcaaagcatactcgatgcacgtcactcgccccgtagaagattccacattgcccctccggaagaacggatcgcaaaaacatccgcccattagtatgccacccgaacgggagctctttttgccacaactgattaccacgttgcgttcagcgtcaacccaatatggtccgattacgccacctcctatatcgctccacagcttaccgcgctgcagacttggtgaacatgtcgctgattcatttgtcccttgccgggacagcaacctgctccctgtacacgagatggatcatctccagaactgttcaatgaatcacgtgttccagctttcctctgcctgatcttgagttgttggcggtgccgttcatgctgctggctcttcgtgcaacgcatccgtgcagttttagtcctcttcggggcaaacttcgacaagaacttcttctccatatatgcctcaacgagttttttcatcgatgcagctctagcttcgtcagtggaagcgctatctttttctctacgtttccccgggagactggcgcatgcggagcccttcttgttttgcttcaccgcctctgaggagtgagacggagaagctcccacatgttttgtgcctccatctctccccctcgctgttgacaaagatttattcgacatcgatacattagcatatgctcaaaaaggtagtaagaaccaaacgaagtggggaaaatgtgctcaaacacagaaaagtatgagcacatctcgttattgtagtcactgctccatgcattatgcatgcaatgaaaggttgaagagttgctccaagcgtgcatgcatgaaccgcggagtaccgatgccgtcgagcgagcctgcagtcgttgtagtcataacagctcttttctccgggtaacatttagtatttctgccttcaggtcttacaaatcgtcctgtacccggcaaatgagtgccgttgaaggtttggtgtgtattgccagcatagtgtggtggcgttaggtgtctcagtcctcccgggagatatctggcagaattgatcttccaggacggcgacgtcgccagcaactcatacaaaacatgatgtattgattcattgtaatctgaaggagcactcagga

SEQ ID NO: 3343 - DNA, 2608 bp, Toxoplasma gondii
  source 1..2608: mol_type = genomic DNA
atgagagtaaaaatggaagtgagacagatttcaaggcgcaactgccgatcactgatgaaacacagacacagacaccttgggaagactgacctcagactgggtcccgagagtcgcagcgagcgcttcgggatcgttcaactctttcaggtcgtcgaccgtcaccacggggcgttcgaattggccattctggagggccatccgcgagctgtactcgacgcgtggcgcctggatccgagtgcctgtggacataagactacgcaagaggcgcttgtagcatgcaacatgcgaaattccaacgttgctgatattttttgaactcgatgttggacgccagcaagtgcacaagatgcttgtacgtctcgtcaaaaccaccgggacgcagaagatacaacggaatttcagcttgggagtgtctagccgcccccccttctaggtaggacgatactaccctgcctgagcacctccctgtgccagctctctcttctcaactctttcctcttcttctctgtggtgtttcgtggatgcgacggccctcagagacacgttggtaccgtgacgctcttgtgtggggatcgtactcgatgaaggcgcgtacacagaccatcagagtaagatccgtacctttgctggcacttcgcctcccgtttcgtgaaggaccctcgacaccacgccccagactgggctgttcagttgacccctcagctgctgctgggactgcctgaggtgttcgacggggttcgggcagaggaacactcgagttcgtctcctctgctcctctctcctgtcctcttggcaccgacggtctggactccggagcgtcttcgcaagacgatgccgacacgacaacatcatgcttttgcttcttctccgttgaagcaaggccgcccagccactctcgcgctcgtcgcttggcgtgtctctcagggagagagagagacttgtttggcgggggggaatctggatccatctctaaatccctcgggtcttggagctttcgcgatggcatgcaatgtgtgtgaagacacacgcggttttttctgtgcgtacggcagcctttcacacagccaccgtttgactattcgggtacgacgcagcaaggttcagcatcaccaactcttcaactttctcctgtttcagcaacccaggaaatttcgccacagtaatcggtgccgaagcaaacccggcgattcaagaatttgtcgtcagattcatgagatcggaaaccgctgcctcagcggccgggggcgcaaatgatcaccgtgccgggtaaaaaaacaatttatgtacgcataagcttgaataaatatatataaataaatatatctatatatagatatgcaacgcattacgcctgctgtgtgctagaagaggaaaaagaacagcaggggtgaatgagcgggcgggagcctgttgcgggcctgaatgcgcgtaacgccagccaaaagagaaacaacgggcaagaacagcaggcagaaggaactaaatcaaacacacgcatgtgtacgcctgtgggaacggcgcacatcatgaaaacaggtatttacagttagaattattttacacggtgtcgctggtaccactggtaaaaccgcttccgtgcgcatgaaactgcattgcgttcgctacgtgtacaggtcagctctccgtcacaagtgtagaatcggacactcccaatctccctctcgcaaaaatgccaagaaatggaggaagtgagatagcagacacagagaggggcgaagagtacgttgtcgttttttgcctcctcgttgtcaaccgggaggagtgcgacatcacaggagaaaactgctccgctccgcgttcaaaacaacgcaatttcgcggcgcacttgaatcagggaaatcgaactttatgaggaggctaagctttcatttgcccgcgtattgtccaaaagcagagtcctggacgtgcttctgaaaaaacacgagcctcctcagccaccaagcaaccaatcggcagtcgaagtcgtcccgcctgcctcacacagcaccgaccgagctgcagaacagcaaatatcctcgcgtccagatgaaaacttaaaagaatcagcgcagctccaggctgcctcattactggagggaaatgcgattgaattttataagcaaatgcgagaaacatgctgtgcccgttcaactcctgtgcatgcacaggaacaggtgctcgtgcagtggcattctgtcggaatatgagtcgagattgacggagatagtctctcataagaccgtcagtcacgttgcttgatgatgaaaggaccaaagtgatagcgaaggttgcttcttggatggtcttttggaagcacgaaagagggagttctcttgcagtaggtcttccacgtcggaaacctttaggcgggtatgtgctgacttcagacaccgcgggctcctttgtgggtcgtccattcgattcgactctgcatttctgcctcaattcgtcgctgttgtaagacacacgcattttccctctgcaacatattctggaacctacattgttttcatctgtttgcttcccatgtctaatgaattttgtttttcaggggggtagtgtgcattatgttccgcgtagtactggcttctttttcttcttgtgacaa

SEQ ID NO: 3344 - DNA, 2252 bp, Toxoplasma gondii
  source 1..2252: mol_type = genomic DNA
aaaaacctcgagaaacgtgtggctccaccacgtgcggtcaagacaaaggagaccctcaccagggcaatgcacagtggcaacacattctcgtcgacacttcaccagtgctaaactggtgcactttgctaattcgcagaggtccaggcagatgcgaatgcgcaaacactgtttgcaggggcaaggacggaaaagaaattagtggacgccctcgggacttggggttgaatgcagacaccgaaaccactgaaggagtgttttagttcgatgtggaatgccaccaaaaaggttcataagcattctctgttacttgcgcttaagagcacatgctttcttctgccgccctcgactcggaaggtgaagaaacgaaatgccatcgctgtacattaggggagtaaacggcagatagaatcaaaaacgtcgctctgaagaaagttgtgtttctggctcttcgattctcggaggtagacagctggggtcaaaagtcgtgactgctgttgtcgacgaaggaggaatcgcacagaggatcgacagcacagaggttacaacctcctcccaacctcagatagaacggtgttgtgaatctatagagatatgaatagagagaaatgaatatatataaagagaggtagatatgatcatccagatagatttgggtatatagatgtatgcatgttccgtgacgacctgaatgggctgtaggccacacagtctttgaatatctcacagaacacagctgtccgtggtataggtcgagtctgcttttccgtatcgcagagcagcatattgtctgtcactagagagctgcggatgcgccagagtttcagcaaagcatggagtctgacaatatgagtattcgacacatttggtctgttccgcgtttacatgcaagtgacggtcggtgaggccttggtttcgcccttcagtgcgcgcacacaaccgataaaccgttttggtctggtttgtccgccacacgcaaatgagcagagctggactgcgtttgcggtcgccatcgattgaggatttccttcggaacgcgaaggccagcacagagctttcgcacctctctcttgccttcgaggactatggactaaattccatgccgcgggcctcttctgagctttttttccgtccttctgaaaagtttcttgcttcttcaccagttatgaaaagtgcttttcccaggtttctcacttcagctgtttgtcttctggagatcccctcgccagccacatcaggcttgtcttgttcgtaccttctgggacctcgtgcgtccccccgtacgcgtgtctctggcgctgggatccctgagagtccgtctccgatgaacgagcacaccctgtcctgttatcttcgcagtcctttctctgtttcagttcgtcagctgagctgtccagtcagatgtccactttgtcattttttcccttagcgaaattgtcgcgagaggagccacttgccaagctcgagacgatgaaggacgagcgcatgcgcgagctgcagccccttgtcttattttcgcttcgacgcatttcctccgtttttcgcccctgttttcctattttttcgggtctggtcttcacaggcttggtcttgaaggcggactcaacaaaaaatgctttaaatcttctttttacgcaaacgcaggacacagaagaagaaacatgcaagctggcctgacagcgtcgatgtgcatctttctcgtctgactcatgttgctcgacgaccaacaatcgacgcatttccttggcactcttttcagcggtaaaacgcgagattatacgtgaatatttcaaagcgaccagagccgccctgttgtgaggtttgaatcggcttatttgtcttcgatccgcggccactctgaaccccaccgactcgagacaacttcaagattcacaggctgaaacgggctcgacttcttcgaacgctttttcccgaaggagacgcctacgacacaaccaccggcgggtggaggagccttgctgtctggcgacacgcagcaattcaacagaagttggttccagcaagcaaaaaccttcgtcgacgtcgtcgtgtttgcttggagaaaagtttctttcgatttctcggtgcttcttcttcgttttctggtcctctcgtttccctcgcagactcgctgtgtttccttttgaggctgctgatgcattttcgcctcttgctacgcaagactttggccggcttgctccaccgaaatccttgaacggaggttcacgtgttcgatcagcttttcccccatggca

SEQ ID NO: 3345 - DNA, 1691 bp, Toxoplasma gondii
  source 1..1691: mol_type = genomic DNA
cactttccactacttctccttcgtgcataaaatcacaagagactgagtaggactttaatgcatttgacatgatggtcgggagaagcacaactgaactcggatccagtgaacagcgccttccagagacaaaccggacgtcgaactcttggcgggaagacgtctgattaaacaagcattcgagcgctaggttctctctctctccacggaagcagcttggcagtagaggcttgactgtattttttcaccgcaagagaaggcggcatttctctatctcgtcctctgcgtcgctgcggactctgataacgcgtgcctgtgcagaatcgagtcagctggagtttctgctggacagtaaagaccacgaaaggatggctgcctccagagaaccctctgaagaaaagggtgtaaaaagtgccgggacacggttgcctgtttgcggcgcttacggcgctggaactcggggagatttttcaagcgctcttcgagagcgatctcttccttagttcgagttacaatttctttttccttcaccccctccgaggtgatttcttgctggtagacgctgctcttgacaaagttcatcgtgtgtcgaggaaaccagcaactcaagcggtcaatcatcaacagactctgtggagtccaggctccacaaacgcgaagtagttggcagagggtgcgctgggtccgcagaaggagtcagatgatgcgtgtcactgctcagagaaattccgaaaagaaaacgccggccggcgacgcgtggatatacttttcttctgtcgggaggcgggcaaagaacaacaacggatcgaagacacgacacggttgtatgcagcagggtcgcgcagacagacgggtttctgatgcagcaaaacctttctggactgttggggacgatgtacgaagcgcagaacagcaagttgctggcagttctacctctctgcttccggacgaggcgcgtgattttctctggacgtccaccggtgagacagaagctcgagaaaccaggacagtctcaaaacaagcagcgaacggcacgaagggtcagtcaagcgcttcgctgtgaagaaatgtagagtggaaaggtcctcaagtcgacgagagagtttcaaattcactctactggatgcatgctgccaagaagttgtcgcatgcatgtgcggcggccgagtcttgcaaccgcggccgtttcgcgtagccattcttgtgagaggcgctttctctagttcggatgtgtttgcattgtcccacgacgttctgtgcatctgttcttcttggcacacccgcttgctcagcgaagaatattttccacaaaggtcgtgtgctgccttcttttacctaggaacgtctccgtgtcactccgacgcttgcatacacgacacgcacgcctgctggacttctcacatggacatttccgcgtttttggctctcctgtaaatcggtttagtgtgatttatggtcgtgccgtggtgattcaaacggcacgtgtgcatatgtccgctagcaaccccgacactgctcggtgcaccgcttcggacgtgtggctcacgaaactgtgatcggttcgctcttttttcatcacaaagcgtttctggcctcgaaggatacgtccaacctgcagtctgccagctccaggtcttccacaaccactgtacagcgacagcgtaacagggaatcagatggcagggtcggcagca

SEQ ID NO: 3346 - DNA, 2049 bp, Toxoplasma gondii
  source 1..2049: mol_type = genomic DNA
attttgtgcgtgggctgcataggcgtagtgtttacctacgaatatatgcatgtacaagtatgtatatgtatatatatatatatatatatatatcgtgtaggacgagtcaaagaaatgctaggtgttttgtttccagcactctcaacacacacaataagaattcatgtggggattataaatgatggcacgtgattttgacgctttcatttccgacttactgatgctgtggtccgacgcagtgaacatggtttaagatggagacaggggaaccaaagaaatgctggggtgtccaaaaacacatatacatataaaatgcatcatgtgttcacttgtgcgtccaaatatggtacacaaaacatatccccaaatgtgcctgtacacgttcttagcttagacaccgtgtgtggggactactcgttattgtaaattcctgatttcgaagttcaactcgtcaacaagggacaaaacgataggcataaggttctgtcgcttaatgcgtcattcgtaatttttactccaatcttggaaaaatcgtgactggttaaatcagctggggtctcgctgttgcacgactgcaccacaaaacgaacacccttgagcttcctcagtgacagtgcgaggaactagaaaggcaacagggaggatgcttttcgcaggcgactttgggctgtaggtaaacacgatacatacgatcgtgggtacgtggagacacgaagacgattcataactgactggttcggtaaactgtcttgtaacgaactggacgagaagccgaaattaaaggtttcatcagttgtgcctatgtttgggcaggagccgtcggctctgctccgtcacacagtcacaggcactcacggatttatggatctgtctgtgcaatgctggggggcggacgcgagacgtataagctatgttgtttgattctttgcgttacctgcgtgccaacggggttttatagtgtgatccaaaaagggtactgtatccgtaggaggatttatccactgtggaaaagagcgatatcctgatcgagaaagaatcgggaaactgaaacgacctgatagccacatttgccccactgagcacccaactgagattaaacagcttgatcaagccgcctatacgagtaacatgaaatgagatgcacccaaaatggtcgctagcgctggacgtttccgtggtaagtatactaaaatgctggtgtcaacacatgtgtaagtaaatagctccgtagatagagatttgaagatacgtgaagataatccgggtcaagggattctcttaagagaatatttataacgagaaaacttttctttgataaccgcttccttagtcactccgtcggtgggaatgctttagacgtagtatatgccggatactgtcgctggcggtatagctcgcacatttgagagacagtatctcaaaacgcgtttgttaagtctgcagcatgggagtgctctgctaataaaggtattcccaggcattgcgtgaccacatctgcaaactccgattgacagtagtggtatccaggcgttctagcaagtgagaacagtgcccgacgaactccactgaaaccgttttacgttaattacaagctgcgtgcctgagcatctgttgagttgaagaccttctctggaaatcgagacacaactgtagtaccgatgctgccagggagagatgctacatcacgctcttgcaacagggtaacatagtcagcacgcgaacaaggttcatgcgattcaggtgcagtcgtgtcagttccgagagtcaacttgaatttttcgcttttgttgttctcccgtttggcatttctttgctagtatccttctgttttcgccagttggtattctatgtttacgtccgatgcttcacatcggtgtttattacgagcggcaataaacatcaacggcattctgtcatacgtgtgcagggcattgtgtttgcatgcaagaaaaaccctaacaggagaaaatagacgtaacaggcaatatttcatgttttcagtgctacaaattacctgtcgacactacgcttgtttcggtgggacagcca

SEQ ID NO: 3347 - DNA, 4079 bp, Toxoplasma gondii
  source 1..4079: mol_type = genomic DNA
cactgatcacttctgttgcgtcacttgcattccacgtactgtaactgcgctgtgttttcgatgtgaggaatgccgatgcgcacgatagagaccgtcgaatttgcagagacggcaaaaaaacggcagaaagctgctggaaacttggagacgcatatcacgatgtttacacgtaagcaaagggaatggcaactcttgaaagggtgacggagctggagagaggcagagagatagggagacaaacacagggaaggaatagaataccgataacgatgaagctgttttgattaacatgaaacccaagaattcgtgggtagcgaacagagaagggtgggattcacatcggataaaaaagatctggaagctgcagaggacaatgacgaaggaagaccagataaaacgaaaaaggacgagaggcagaggcgcacctgtcgccccacttagagcagctttccctcctgtgcaaactcgaggaaaaaaaggagaaaggaaaacggtacagaaatgttttctctttgcttcttccgtgcctcttcctcgacaggatacatgccacagaagcgtagcgcctctgggtgtctttcgtttgccctgtgctcctctaccactgcgtatgggaggggcatagagccgcagaaagacttttgttaacagagaatgtctctccctgagggcaagacgacaggaagaaaacgcagagagaggcttcctaactccgtcgatgccacacgacgctggcacggcagcgtgcgtcactcgcatgtgcaatggaagggagcccggagacgtgatcgagttcccacggtcttagaaatcgaaaacgctgcagaaagacttcctcgtagacagacagttgttctggaagtgtcggagaaatgttttccacaaaaagattgacgttttgccgtgcagtggacgcacgttttattaagagttgcatacgcatgcacgcatgcaagcgggagggcagcgaatcgagcaccttgagtcagggagagtcacagatacgccgacgaaaatgaggttttttcacaagaaacctcagctttgctccaggaaagggctggatttcagctgaatgtcaggatgtgaaaacaagccggctaaggatagttacgcacggacaagagtatgtgcacatgcatccaccaggtcactctaccctggtgatgaggcgcgtcactcattggaaactcatgagctcgaatttccatttttatcaaatccagcctctagctttccggctttcgtcaaatgcgcggtttccaaaaactgggtttcccttcgaaggaggcagctctatcctagcttccacagtgttcaaacacatcccgtgcaaaggccatgcattcgccttcgtttcagtgaaacagtagtctgataaacttcagttgcaaaaaccgccttactccaatgccacacttgctaagtcaacagagacgctcgaaacgttggcggtggtggcaccaacgcacactcttgaggttgcaaagtttcttccctgaccgtcaagtacggcgcaggacgcgcacttggctccgtcgacgcgtttcaggcaacatcaaacaaaatggcagtgggctgcgagtgcgggattttccatacccacaaacacgcgagttgtttttgtcagcgaaacgtttcgtttgtatagtctgtgtcgtcaagagatattcagactttgttgtattagtacatggtgttcaagcggttcaaattctacagtcatttgtcatcttctgctctgctagcgcagtacagtagatgttcatatgatgcactatctccagagtacatcgaatcacagaaccttgaactgatgtataaatctaatgtgccacggtttttcccgtacgaacaacgccactgaaaaacgatttgactgcttggcagactggtgactgcattcgcgagctgaaaaaaagcgctacacctgattccatcgtttagccgaacaggtttcccgctgcttgaggtcttgcttgcgtccagttgtaagtgaaagtgtttgcctcagacagcagcgttgatggataccaagcaggagtgctctccaacagtttgtctgggcatgcggacgaagtcatttaccaaatggtaaaccaggtagtaacaactttctaggggtattgaaagggataagttgcggaagatactcttgtttactttttacactaaccagcagccacgctgtctgaacgaggctagactacgggaagactgaatcatggcacgcgatctaggggtactgcagttggatgcaaaccatggtaggccttctgatccctcttaaaccgatggtggcgcgtcaatatacaagcccatatgcgaaggctgatcgaggcctttacccgctggtgacttgcccagaatcgacccagatgctgctcctcgatggctatgcggagtttccgggaagggcgagatcatcaaaagtctttcacgctggagatgagaaagccttccgttcggtggggaacagcacacctggcagatgattctccagtggcggcagcgagggaccagcaaaatagaaatatataccagatgattgttccatcgacatgctgagccgtatgtaacaatgagtaggagcccgtaacccgacgtggagcaacccatgttacaagtgttggaggtaggagcatgttatatcgatccggtgcgagtctggaggaggaaagattctatgcgggcagaacacgtaccttgtcaaacaaagtggtttttagcggctcaaccctgcatcgtttaactcaattaattagagaatacatccccatagagttgttaagactgctccagaaggcaatgcaagatgggagcgtgcaacaatgccgagtgaatcgtgtttggatatgaagttctctgagctggcatctctgacacttgatcgattttagttcttaagacggaagtgccacatgagggaaacgtcactcctcgatgtccgtgagcgattttcagtgttctttgatggaccgactaggagcagtaatcacaacctcccgtcggtcctggaaaggtgcctgtgcagtcgaagcccctggtgactgactcgcgcgccccgctgctgctgtgttttctctgcaaggggtcttccaaacataatcgtgtgtcattcgcgctcctgtagagtgtaacactgaatttttaagctggaaaaacttcttggtgttgggacgctgcagctgcaagtgtggttttggggtggccgtcacggcgtcatgacgctgtggacagcgtgctggcgcgtatctaatgccttgacccgcactttgtctcgctccttcgttcaggaaccgttttacagaatatttcaaatgccagtaagcgcccaacgccgtgtaaggaccctcccgccttgcgctcacccccaggcaagccggctccgaggggagtttcgacgacttgcaattgggtgttctggcgttagcttgtctttgcgtgggtgcgaagggaagcccgcctctgacatcagttccaagctcattcgtgcgaaattttacttcaccttccccgactccgatatacaattcaacggggtaaatgaggactagcgtttatttggctttgtcagctactggcacacgcgcagcgctgcgtggcatcggctgcgggaagtgtctctaaagtgcaaacactgtggctccgcgctttcacggttttctggaggttcacaacagattttctgcgacagactgctgtggagcgcggagctcggaggcgcgtgccacacgacggactaccctgggaattcacgcttgtgggtcgcgttggagtataggggcttgcatgcagcagacgggcaccagttcagcggtcctccttccgcagaatcagcctagaggctgctggcgtcggcagaagtgctgccagcataaaggcgtggtgcacaggaggcggggggcctctcccgcaaaggtagtcctgggaaccaaagcagaagttggccggcgacacgacccaactgcggttggctgacgaacagtacctttccgtgtttttttgtgtccacagtggccgcagaacttagtgcgtgcttttcgtttgtctttcttccctcaaccgcgttgacaaaa

SEQ ID NO: 3348 - DNA, 3386 bp, Toxoplasma gondii
  source 1..3386: mol_type = genomic DNA
cctgtgtctcaactttggatttctctccgcccgctacgcaggtcaccggtgaggacgacgacggaattccttgtctagaagagggaaagatgtttccgttgtgggcgtggaaagacgaagtgtttgagttcgacagcaagtcgcaacacgctcaccgccattttcactcgtgagtggatggactgtcactaacacgaaatgcagaaaaattctcagtttccctgtctcacaaagcatcttcatacaatggcgaggagctgccaaagaaaaatggtatgcgaaaaagagtcgagacataaaacgaaaacatttcgattgtgcaaacaggtcgcgggtgatgcctactgtgcatacgggcgtcgttgctagaagtgaagagggctgccagtgaaaaacgagggttctcggcgaactgctgtagtgtggagagagtgatgttcccggcggataatttcttacggctaggcagtatgcgggtgttttttatggctcttgcaatttgcggtgccataagtgacatcgatcatctcgaccttcttgctaatggaggggacttcccgtagttgatttgtttggggctcctccgacaaactctcctcaggtgttcaagaaaataaattttcaccgtttcttgtgccataaaagttgcgaaaagcagcatactaaaccttggcgcacgaatcttacgcgtgtgcaaactattaagagcacggtttttgtgaagaccgcctggtccggccatcaggaaggaagcacatttccaagaactcgaggcagaaaggaaataatttgaacatttcttcgattggaaacagtttcattttgatcgcaagctgtagaagaagctcatcagggagtccactcgtgcatacaggcccattcgatcgtagcatgcgaggaaacatcagggagtctgtcagtggtcacaccaccggcaggcgagccacggtttcgaatttgatttgtttgtattgatgatagtagtgtatgacgcagtatccattatcatggaacccagtaatttcgcaaccgacagactgtaactccggacccccgcacaagctctggcagactggaagccctgcaaccgagaagtctgaggccgagacgtcacgacgcggttctttcaatagggaagcggagggtgcgtcacaaagaaaagcgtctttctatggattagcagtgcatagggcaactataatggctgggagcaaacctccggtacgtgttagtcatcattttcctccacggtagagtaagagacggcaccttgaatcatgaacacacgacattgaggtgttgcgagccgcatgggcgaatattagaggcgatctagtcacccgcaaagttttgacatgggaatggcaatacaacagttcagacaggtcctatatttaggaagtaatgatgccgagatcacgtaacgcttcccggtaggtacgggtggttcagcaggtatgggggagcatgggcagcaaacaaacaggtcttaggacccgtgtagcggagaatgtgtgtgaggttgtgccatagattctcatttctgcgcaggcgtataggctggctgaaccgctcaaactcaccgggtctctcgcaggtccctcggtatgttaaaagttgcatgcaggcctgctggtgccaagatgcacagacctgattgtgaactcttcgttcccttgaatactacatgcctatcatgcctttgcaagggatcttcttcccctctgcagcaaagtatctctcacaagaacgacgccaccccaagggaattccgtgcactatccgtgattttgacgcacgatatgaacacggcagagactttgtcctcaattatctacgatgatgctgcccactccgagtgaaatgtgtgtacacaaaactgcgaagaaggtggatccctcggtacactttcatgccattaagtgtagaggtgcttgtcccaagtttccctaagacgaacgtcgcgtcacagttgcgttttgaaacatatcaacctgaaacgttttttgttgagtccccactgttttcccaccatgttgtcggcggaagaacgtaatcgcctgtgggtgccgcctgaactgcaccagttataaacgtgttctatggaacgaaaaaacggaactctcagacgggcgatgtcttttcttgtcttggcgctgttgcacatacggtggctgtttttcaagggtggctcgctgaaagtagtgccggcgggtctgccgacttttagtggatttgagaacaaagtgtgatggatggaacgtaacaaacggtgtcatggcacctgccgcagcctttttgcttaaaaagagaaagccaactccggagaggaaacagatggcgcaccgttttttctggaatgggcatgccgacctccccatgtgctgcagttccccgtttttcgccccttccgatcgcgcgcgagtgacagggtcgtggtcgttgcgatacacgaacttccacctccccgagcaccgccatcaactgtgaggccccgcgaccataagagagaacagcctttcttccgcccaacgggctgccgattgcttcatcgaaattcttttggcacttgctctagatattatctccctttgcggacgtctctacctcgcacttcattgtccggcgttttttgtctttgggatctcgaaactttttttccaaggtatctttttcttgtccccctcgcgctgtctaaggtggacttggtgcaaacgaagggaacacgtcgcttaaacctcgtatatgttcacgcgagattgcgttttgacttgccatcattcttggcggaatccggcgattgcgcttttttttcgtagcaggtaagaatatgcttgaagcaagcagctattttggaccacaattcgtggtgcccggctcggacggtgtcatgggcgacccgtgacaggagtggcggtttgttggccatccaccttccgctttgttcccttactctggtggacgaatgataagcatccccaccttgtgcatttttttcagatgattccggagctacgtttctgtcgtttatttgggtgttttctgcgttcctcctctcccgggtcgtgttttctgttaccgaacgtttccgtgcgtttagtccggcaagaatgcgcttttccctgtgcaccctgcacaagtagtgtttataacattgatctgtgtacatgtcagttattcgccccaagacatagagagtgtacacacgcaacaaaagaatgaacctatgtgggcgcgtaactgcagagtgacgtagctggtttcatggaacatcgcgtggaaaactggttgtcatgcgcatttgcatcactagtttgtcttatacagcaggtgcaactgacttgttcttttgtttgttttcagctggcggttttaacgcttcaaga

SEQ ID NO: 3349 - DNA, 4466 bp, Toxoplasma gondii
  source 1..4466: mol_type = genomic DNA
acttgtcggactccgcttcttccattttcgcctccggagttagaccctgggccttggagttgtctgcttgcttatacgagaaccccagcgtgccggaacggtccttgcctccgttgaattcgctggactaaagcagatgaatttctgcacagagacactggcgtgtggcacactctggagcgcttcgcgctccacttcaaaaacggcagagtgtttcgcgggtttgtacactcttgagattttcttgtttcggcaaaacgcccacaagtgtcgaaccttacattgcttaatgcaacgcggagatggtcaccttggccgtccacataaaagcagaacggccttacagacgcgtatagcgaccgcagatgtctgcagcgtccggggcacggtggacagagcctcgcgcgccgacgttcaagagcacgtggccgccttgcgattcgaaatagcgactccgctgagtattttgaaattgttgatacgcacgaaattcacagagacagtggctcagcctccgtgctgaggaaccgcggcatcgcgcttcctcaaacgacgtgaccgccacacgcgacacaaagacttttacacagcgggggtgaccaagttaccacctgaggcaaggaaaatctccactacccgccgctgaactcgctctgtacagagtggaaaattcgacacaggaccgtgttgcgctcgagttcgccacaggctcgcctcggaagaaagtttgtggcacgaatccaagcgccgcagagagtgggcagagccaccttagtgcgacacaggcgcagaacgcctggcgtaagccacagaaataacgctgagagtacagacgtcttccgcctgaggaatccgtttggaaccgaccaacgagagggaaaagggtcacagagcgcatgcagcacggctgaaagggtcgtgaccaaccactgtcaaagagcccggcaactcaacggcgtttgacagcgttttctaaaccgcggcgttcttcgcggagagaaaacgtagacggacctgagagaatgtggaacaaacgtcgcgttccgtcgccagaagcggatggaaacaatgtacgaatttacagacgctacgaagccggcgaggtcacgagtgggagcagcggtcacgggaatgttgagagcatggacgcgacagagacgtggcagggaaaagaaccgtggaagcacatcggcgcgctcaggcaatgtcaagaaaaaatgtttcaaagatgcacgcaaagaaaatgacaagggcagcgcatcaagcgggccgaccccaaacttgaagagttgcgatgccgcaaacattggctacgagacccgaaacgagacacgcacggactgagaaaacgatttgcaggccaggaagtgaagactatgtagccctcgcctgcgtcttgaaaggcaaagaaatcaacgaagtcctcaaaacaagtcggttttgtccgccactgccttcagcctagatcgctatgtcgtcgtgcatgcgctgaaacagttcaaagtgcttccaaatagttgaacacaactacgagaagttacgggtaaagcaaggcagaacattcttctgttccttcatacagaagacattcccttctttgacgactactctgacagaacaaaccaggtccgagagttgaagaaaacgctaaacgccccgttacgcagtagcatgtatgtgccttcacttcgcagattccccctttacgccagtgcttactgtctctgttcgccgtccacccggtttcttgctttttcttacggtaataatttatccagtttggcttcattatgtacgtctgacaaccattatgaaaagctacaataaagtgatgtaacttcaaagaaagtggttccgccgccgcattctgtgagtcttcagcttgtggcgagggaaaaggcccttattcttttgaaatttagctgcggatcgactgagtatacgttgcgtgatacggtcctatgtctttctgtgcgtgtagacacaatcctgatgagcgaatcttagtcaccaatgcctcattctagagggatatgcgtgtataggtgaaacgttcgaaaatgggtgccgttgtcaggtgcagaaaaaacaaagcgtttggattacagcgcagtgttgttcacgaagagctaatagaacatgaaaaagacaaggctcagcaagaaaccgtaattagatctgaacgcagtctctgccatcgggtactggtcacgcgaaatgcggtctataaaactgcgttaggaccactcaccgtaatgcatttctgattgggaattaaacgagtagaaactgataaaagcatgcgcacgttgcgggtcaccaactggtcctttctccattgcacccgacaagattttacggagctcgtgaggcctgcaatttttgtgagaggtccatgcagaccctgccgtgtgcactgaccggacctctaacgttgcattgtacaagaagaatcgttgttaatgcatcttttctggcttttctctccgggaagcttgttatctccacgccgtttagatagggaagactagactgttcgtgccatgttacagactaagctgtgttgcaagatacacagacagcatctggtgtttgcacaggtgttttttctggatcctgttgaatcagaaacaagtgcaggctgaaaaagacaagctcaagtatagatatcaatacaacacgcagttatgcaagatctagtagcaggcggtatcgtttctaccggaaaatactacatatcgagaagcgttaagcaagttttttttccgctgaaatctcgacagaaacatggttcgttgttgagcacgtctgcatagtatctaattctacaaaatttccgttcaggcgagctcagcctaagcccctccatactctgctggaaaaggtttggaaacagtgacttcagaaagaagctgggcggttcatcgttccccgtagtttgtcttctctccagattcaaaggaagaaggtgttaaaatactccgggcaactcgatgaaactcctgttcaactacttaaaaaacatcacaatcttcaggcgcctttcttctctttttattgaatcttattccgtgattcattgtcgcttcctctcacgtctgaaaaactgcgtactgtctctgtagaacacagtaggtgcagatttcaacttggacttgtcgtttgctatgcgcccgtatagctgacggagatatcaatacttccacgatggcttaccgtggactgttttgcttaccagcggcgtttccggcgatatgaacgccgcagtttttcgcctcagacagagcagcggcaattgtctttgaccgactacgtatgcaggagacgcactgtgcacgtgagcgcctatgaatatctcgtggattccgttccgtaggtttgttctgatcgcagagtcgcctcttcgtgcttttctgtgtctgctctcagtaatctggtgtttcatgtcctgaagtatgaccgacttggatggtactttccgcacagatcggcagattcagagctcgcgacactcccgactatgttttgaaaagactcgaagctcccatcacgaaaatcgatgtccgttctgtcctttcgttaccgtctttccttccaaaagacctcacaagcgccacggaagtagacggcatatgttctgttctgtttttctggtcagccgagctcacatcggacctttgtctcggcaggtcccagtcaccacgcatgcgcacacacgacagcacggcggttgccgcgcagaacctaacgcctcgcttttctttctccacagatgctttccttgcgaactttaccccactccattcggcgcattcattttatcttttgacatctgttgcttgtgacaagcgcacgtttctgcctgcgttccaagagcatgcgtggctctgctcaaaacctcaattcaggacaggcgcatgcgcagacggcagcttcctggatgttacagaacatctcttctggagcagacttcttttctggtggaaaacgaatctgttcaacggagcggatgcgcacgaaggacggggggaaagaaacattcgatcgtggtcgccgtacgtctgtgcggcgttccgtacacaattgccagcatcgggaggcagcgaccactcgtaaacaataccgactccgacagcgtttgcaagacttagaagctccggtggggaatgtgttatgcgtaccgcgtttttctttgtttgttttcgttgaacggaattcgtgtgtgcacaaattccccctgggaggtggtttacttacgttgaattcgcttatgtgttcgcacagtacactgtgggtatctcgccgttctatttcggatttcactcacttgaatgaccatttcttcctgttaacttatgtcactttccctcgtactgcagtccagcgcctggtcgtcagcaccaccgctgcctacttcgtttgagtgacaggtcgtacgcaaagcgtgcccggtcactgcccgaaaa

SEQ ID NO: 3350 - DNA, 4764 bp, Toxoplasma gondii
  source 1..4764: mol_type = genomic DNA
aagaaggcagagcgggcaagagcgaaaacgacgggagacggaagtgagagggaagacgagaagcactggaggatgaaagctgcagggacagaacctgaggagatcccgcaacaaggaaaaacagagagatcaagaacccagtcgagtcggctgtccaccgcgttttcttcctcggaggacgaacgtggagatgagaacgaagaaacagagagggtaccattgtaggaagggggcggggatgatttgttctactcggcagaagaatcggagaagagagtgtctctctccgagaagcagatgtcgcgctctcgtcttctttccgaccccaaagaagtccgctcagtgaagggagaggagagcgaaaaagaaaaaaacggaaaaaagcagaaaaaacgaagaagagagagagaggcagcgtccatcaaagacaacagggaagccggaagagacaagagctcctctggcgtctcgcttcgctgttttcacctttcctcttaaaacgaaactttgtctttaaacgtctgatctccgcgtcttctcggctcgaggcccagggagagacgccggagaaaatacaaaaaaaagtctgcccccggcagcgccgacgaaaaattcgacgttctccatttctcggagccaggacggaaagtccagaccggaggaagagacgcttcacgcagagaagaaaaggtcgaacagcgacagccaccgccagcctcatgtgccaggctcaatcctccagacggtggtcgaaaaatacaaataacgagagcgattcattttgcagggacatgtttacatgcagacagatatttacctctcgtatctgtgcacatattatctacacatacttacatatacatatatatagatatagataaagatattaacatatatttatagatatttacatatatttacgtatataaatatatattatgcagtgtgtatgcgtgcgggtttttgtagacttcgtctgtgttggagatgggggttcccgcatatctcggttgtctgcgtctcaagtcgcaggtgcaagaaactttttaattttttcagaacgcggagagaacgaacgtcaggaatctggcggatctgtggcgcgcgcatgcaacgacgcaagacgtcttttccgcgttcgagggaatgcgctggctggacttttagcatttccgagaagctccacatcacctcaacgaagtgaaaacgataagacaggctggaaagccaactgaacttcgccagctctctccgcaagtgcaacgcagcagcgaaagaactctgccgaacgatacactgggagagaagaagtggagacaacgcggaacagcggcgccggggagacggcgagaagcgttttctcgctcggcattgggagaaacgattcaaagacacacatctcttttctttctatcgcctttcaatggaaagcaaggagaaaagccggcagccttcggcgagaaaatccgagacggactggccaaaaggaacgcatgtcctcgagccttctacagcggtgtgtggctgctgaaaaaagcggaaggccggacggggcttctgaatcgtcgccgtcgctgtcttgccgccttggacagttgaggggaatgtcttctgtcgagttcaaggaacgagcaaagtggacgcgtggtggacgtcgtttacccttttctttttagagctgcgtagtgagctagacagcacaaatcagatacgatgcgcaggagcgtttgagaccgacactcgagccggcagatgttttctgacgctggagcaggcgctatacttgcagctgcgattctcagaatgcgggtggcggtgacttctgagcctggagctcgtcacacacttgcgtcaagggggaacgacgccggtgcgtctcgtcttcgcgcaggcgtgacttcgccgcgaaaaagccaacgggaaaaggaagagccgcgagagacgacctcgctgagacacagcacggccttcgttcaagtcgacgttggcaccttgtttgccactttgtcggttcgatgaaagctgaaaaagatagaacaaggtgccttttttggcaacgggaggagtgccatgccttggatcgctgaattgcccctctcgttcgactgtccgtgacgtgcaaaaacgctttctttcacctacactttgcgcctctttgtgagcgctgccgcttcttctgtccgacgtgaggtgcaggcgcatttaatcgcaaaaggtctcaaagacgaccacagtttcacgtgtggtagccaggcaacagactctgtcgggagctagtgagagtctctctcttggctgagtacagggtgcaaccggctgtcgaaactgttagtgcgcttgcctttcctagagggccgccagagcgttttttgaaaagtcacttgccagcactcggtggctgaagacaaaccacgcgaagctgtcaccctctctgcctcacaattctctgaggaacggtcatcaacagaacgacaccgtccacggatgttgaaccagctgcgcggaagacttgtagcccggtctcgatgtcgcttgatcggacaaacggctgcaaggcagtaggagtcttgtcatcctaaactccggaggtctgaccggcatttaatcactaacgtacagctacataagagagatccaccaaatacacaaccatccacgatatgtgctgatctattagtcgattcttcgttgagaatcaaaccagtttcccaaaaatgcttgtgtaaatactcgctggattctgcaattcttcacgctcgctccacgccccttcccgtgcataagagatcggagggtatttttttcttgttcttttgtgacctatcttgcctacacccgactgtctaagagcagcctggaaaagtgaaagaggacctggttgcacttgtcctcttttagcatcgcctgctctctagtgtcagttgttgtcgaagggaaagatcgtttcagatgtagtgacacgaggtcgaggagcagttgttacctgattgtatcaaacctagacgcttttgagaagtacactgacagtatcgcggtcccccgatgcacggcaaactccttgaatctatgttgctcagtgcatccttgaaattcgaccagaaaacctcacaaatggtgagggaagtcggagatcccatgacctattgacgcctgttgtagcattgggatgaacagtgcgagcaaacgacttctccgatgttgggtattcaatcccgtgctctactacctcggaaaaatgaagcttagattttcacacgcgtcacctgggctcgcgaagaagctatgtgcacattttccgtgacctcattaactctcccctcacttactctcgcagatgaccggcagatccacgttcatggcattcttctgtttgttacgaccgcgaaacgtccccctttgtcatacttatgttgacagttctctgaacaagaatcaaaccccggagccaagtgctcgtcccccacatcctctgcaagttgcgttcgtgtttgtttttcatcaaggactcttttcttatgcttttcttgttgaaacaatactggttttaaaagttaaggggagacttttcaggcgtgcacaaaaggcgagggcgaaactgtcgagcgaggagaagcgctgggattcaaaagtggagaactctctctcgtttttcgcctaccgcgggagagttttcggccgggcgtcgcgacggggagttctgcgtttttttcctgccctcgaggttctcccgcaccgagaaaccggatgtctacgcggcgtagctagtcccgcgagttgccattcttgctcttttgcactgctgtctgtccagcacgatggcggggtttctgtttccgctgtctctctttcactgcgactttcgattagagaaaagaaagcagtcctaaggcttcagagcccgtgaccgtccagccctcgagaaaacgcgcctttccgtgtgccagagagggagccgcgtttctcgccaaaggcgtcgcgtctcggtgttttcttcgactgaaccgtcctgacatttatgcggcgcgtgttcctctgaattcgccaggaaaaaccacgtcaacgatggctttcttctcgtagaactcgccgtctgcggccactgacgtcgcggtcacaaaaacagaagcaggccggggtccgtaaacccagcgcgcgggcgggaccggttgctgtccgaggcagccgagagaggttttgtggtccgtttctttgcgaaggactccgaaaaggatcttcgcagagaagaattaaacacaggtgtttcgggtctccgatatattttccacgcgtcccagcgaagcttttcgcctccaatttcgccccgaagcgcgagtgtgtctcgctcgagaacgagagttatgcgagagagagtgcgagtcccgagttctctcccttctttggggatccgagaatggccgttttcaccgcgaaggttgtctcagagtttttccactttgtgtcaaaggcgtgtgtcttccggtttcccgtcgctctccctgcgacccgccgtgcggctcgacggccgtcgaaaccgggaagtcgtccaatccctgtctccaggacctcgccccgtccctggaacagctgcgtagcggtcagaattcacacgctgaacctcctgagagcttcctttctctcgcggtagtgaaggagagagagagcaaccacaccgtcggtcgtccactgagaactctgttcctggagaacctgcgggtactgagaactttcgacttccacgacactccaggttcctgcccgtcaaga

SEQ ID NO: 3351 - DNA, 3995 bp, Toxoplasma gondii
  source 1..3995: mol_type = genomic DNA
gaatgtttgtctgcgcacaacgcggcactctgaggcacttcgtttgcgctcgcaggcgcgcgtctggagcatcgcgacgaaagcggagagattctttcctccgctacagagatcctctcactcggcgacactccatgcatgtctcctcgagcagagacctctgcggaggctgcgggcgccccctcctgtcgggagtctgaagccatcagaaatatcgcgttggtcttgagaggcgaggacctgctagccgtggaggaggacatggacttgaacccagctctctcagtctcctcggagcctgtcaaaaccgagtgcaaagccgggagagcaggctcggagggctgcgacaagaaactgtgtgtctgatcttcggttctccgaaggcgcttcgacggagagaaggcggcgacgctcgacggcgagagatcggagtggcctgcgtcctctcgtgctgcggtcgcaggggccgctagttgggctccacggccagagccgacaggagacgaagaggagagtctcgcgagcacaggacggctgggtgaagaagcatggcgaagagtcgaagacgctcgagaaggcagggggatgagcgtggtggaggagacgccactggtgcccatctttgggcgagaagagcgaatcgcagatgcgcgagacagatttccggcttgtcctctgctgtctcctgcgcttgcggcaaagcgtttctcttcctcctctccctcctcagctgctcgccctctgctctcatctgcttgtcttccctcttctccctctctcgcgtccaaggacgagagacgcgggtgaggaatgccggagacatcggcgttgagagacggtcgtcgcggcaggggagaggacgaaaacgaaaaggacggacactccgcagcagacggcggcaactgtcgctctgtgccgagtctaaggcgtgactttgaggagagtggaaatggagaaccggcatcgtttcgttcgcatggagagacgcgaggttctcgcagcggagaggaagaacctgccgcctcaggggcaggcccccaccgcgggcttcgaacgagaaccatatcgagttcgaagtaaaaacgacaacaaggttgactcctgtttagatcttgaagcgctttgtaaacgaaacccaagttctacagcgttcgaaagtgacatagttgagatgacgtagactggggggaagcggagcagaaaatgaacaggaagagcagctggagtctatggaaaggcgaaacaggaatggcgctggataatgcgactgttctgacagacaagatgacagaccgcaacgccagagaaacaggaaaacgacagaggcagagatacctgtctttgggcgagtgagatgaagcagatggtgaaaaggggaaaacggatgcaaaaggcctacacacacgcgacgtgacggctggaaaagcaaaagagacggagaaatagggtgcccaggaacacaggggaaaaaacagccgagcaaggctttggcgtgagaggatgagggcactgagagaaggagcagtggaaaaaggtgggcggtgaagacaaagccgcagagcgtagagaaactgatgagttgggggaagaaaaagacagaaacacgagaaagggggtacagataccgcacaaggggaaagatgacaaagaagagagaagcgagagaaaaggccgccgagaaagcaggcgaaaaaacaggtacgcggagtaggcgggcgagggggaactctgcgtatatgttcgttcgttctgctccaccgcaagaaggccagactcaagacccacctcaacagaggaagttgacgtgtctggcagtaacagttgctttaatcgttaagtcttcttttccagaataccacaaaactacggaaagcgaccatgccaaccgcggcgaaccctcccgttttttctgtcttcgacggggtgtgctcgcgctcgcggcccacttatgttgcgcgacaccctcgtgtggaccctccacctcttgatgttcgactgtttcttgtggattttctctgctgcgttcgtgtctctctctacttgtgtgtttctttcagttttctcgcgatgtgttcggcggacctgcggtcgaagtgcatgtggcaatcgcagacagcaattctccacggtgaccttctccgcgctttctctggtacccctggcagctgtattattggcttcgcagatccgtttctcgttctttgctctcccgcgcctctatacacccgcactctcgcgaatccacaccgacttgcccctacattcgagggaaaagttaagaaaataggaaacgccttttaccacgtgaagtcccgtatactgcctaacctaaagtccaccaaacccctgtgaaaggtgccggggtacttatcatccgtctgtttacacatgcagacatgtgtaggcgtatgtagtacgcaacagagaaagtagagaagagggccccacgaaatcgaattgaaaattaagatttagcccgaggaacggaccatatcagacacaacagttctgtcgttctcgaccacgttactccagcgagacctcttttccacgttgaaactcttcgttctgtttcccagttccttggttgccgtgaaccggcgcaacaatgctgcagaattgagtagtggttacaggagcgtggtgctagtagatttgatctgccactgtaagcacacgagcagtctgtctgcccagccgacttattctctaatagaaccgcgtacctccctgtgtcttcagccttgagagttgttttcctcggtcttcaggcgtccccgtaaagccgaaatgtcattctcttttagcgtttgtgctctcgtcggttcttcctctcgctcgggcggcttcagctttttgaaggaagtaatcgctagaggttgtgtgttaaaccgcggtgtggccgcgcttctctctctctttcgcggtcccaggaggggcttttaagaacagcagacagctggaaaactcgcgtttaacggtctatcagctgcccatgtgagtggacaaacagttgtagactttggtttcgccacgaacagcaggcgcgagaacctgggctactctttgaaaacgaagcggcatggggtccgtccgtctgcaaaaatgctcgggaaagaaggtgaagggaaagagtggcaatcgctctctattttacggagagcctggcatgatattgttatggtcttagctttcaggcaagctagttatcgctgcatcctatacacactcaggcccgagagatatttttgcgctccgtatactaaaaggcatgaagctggaaggcgaatgtgcatgcggacatacgtggaaactctgtccgcctgtgatagtctcgttatctctcggacactgagagagagagacaactgctttcttctgcaacgaccctcttaacgccgaggacggacatcacaaggacgggcaaaagaaaataacggagcttttctgaacagaaggacccatcgaaatcccgttttcgtctttaaatactaatgactatatttgaagagacatttgtatacatatgtgctcaaaactatccttgacgtacctactgacgtttactccacaggtacaccatgagcatagatgcacatataacatatatatatatatgcatttgtttgagaaatggacgaaacaaaaagtagtgacaagaaacgcctgcagggagctaatgttctcacgcgttcctcgggatgtagtgcctatcaagctcatctgcataactcttgttgcctggcttagggagtcagggcgccgttgttctctcgtcttacgcgggagcccacaatgtggtgaaatttgcggcttacggacgcaacgttgtctctttgttttctgtgtttgacactccagaaaagaagtctggaaagaatcgcagttctatcgaggttcaggtgcgacacaggtcacagatttagcgtcacggcatgtcttgcggttcctcaaactgtgcctgttctcttacacgtcgtctccgcattccacca

SEQ ID NO: 3352 - DNA, 4210 bp, Toxoplasma gondii
  source 1..4210: mol_type = genomic DNA
gctgtcgttttgggtctgtgtttcttcttgttattcaactcgacgcgttcttccatgatttttttcacaagctcctcgacggccgatggtctgtaccgcaaaacagggaagtcaataatatcgtacagcgctgtgtacggcgctactgcagtacggccaatagtgttttgtttgccctataggtggctgaagaggagcttctgacaaaatatttccagagatacatttctgggacgtcccgttttcctcgctgtcattgctataaacaaactgagatcgcaataacaataaagatggtaaagatgccagttttagtgactgcgcctcgcaacgtgaccgcgtatacataccttcccattgtggtctggggagaagcgacgtggaccgtgccaacaggtgctcctttgacttttgacacatttttcgccgtagtgaacgtcactgccatctgctcactttttccgcggcctttggagaagtagcatgcgcagtcagcggccaactgcatatgatgcttcgtcggtttccacgagcacccctgaccgcgtagaatcacgtgagctccaggaaagtcccttacatggaaccacaggtcggtaggccttgcaacgaccaagctaacacgctcgttctacacagaaaaatcacattcaaagaactttgtatgttgtgttccatcggagaagtcgtcacacagagcactgaaggtccggagcgcttgtgaacgtgtaaaaccaatatgcggatgatgctttcgtacggagtatgtgggacccgctgaccctctccagatgggtgagaactaacgctcttgaatcgtcgagattgcatgttcaccacgtgtccggcggagtcgtgtcagataatctgtcatcgatgccgtcctcattgccaaagggtagaccctcgtgttctgcgataagttttctgtatggttttagcgttcaaaaaaaagagggatccaccccccagtattcagaaaacgtgggtacacctaagccaaacatatttgcctctgcaaggaggtgcattaactttagtggactgacctgctctgccgtccgcccaattatcaacgtcgtccaattaccgtcatcctcgtcaatcttcagtgttagcaggccccgctctacacccgtgtctgttgtaatccatcgttggttcgactgcggactcgaaggattcgaaaaacaagaaaccagctcagcctacgcacatgggtagcaaacaccgggtcgaaggcgtattctttctgtttctgtatggatgcacctatgcaagcagaaaactgtcgcctcagaaccacgcagtctggcaagcatttagatcacatgatcaaagcatggcaagtccgctcaaagaaatgctccactttttatcagaagaacggcacttttaaatcggattccatggtgtgcgcaacaccgtttctgctgtctaaacctctccgtaccctgtgttgtcccactatcggggctgtcagctgtgacggtagaattgaaaatgctctcgggagatgatgcctctgtctcttatttgcctcacaatggtccgctagaaatggggaaatctcacagaaatgagttcggtgcggagtggcctccactcctgttgaaacaaaattttgcaggttgttccaggacgggccggaggtaccctgccatgcgggggtgtaccgcgtggagaaggcactgggaaacaagaagttagccgtcctcagcaatagtggacgatgatgccgcatcgcataagcgttagaaaagtgtaatttcataatacaagttgtgacaatggaagtgataaggatcagaacgccgtggcggtcttgcattcgggacccccgattcacgacttggaagcgccgttggcatctcaaacacgcacatgactccagtaagctttgatgctttcagatatcttaatgtattcaaagcaaagttaggacacttttcaaattagccgacacttccatgtcgagaaccggcggcagtttcctggagctcaaagaatgcatgcaagactcaacgatggacgaataagcgttggtacctctgccggtgtgttcgttgcaatggaggcggcagtcctaggagctatctcgatggtgggcggcttcaccttgacttggacgtcagcaggtgacgtgccggtgtcttttgtgatcctaatttcagggggatccaatcgaaggcctgattcgggcgatgcatttgcctcatctcttgcgtcaacagtatgtgtctgactcccggtaatttcttctgtgtcacgacccctccccagaggtgattctttctggagggcggcttgacgctgcgcttccttcgcccttttctcggcctcctcaatctcctcgagttcctcttttcccctctctgcggccacctgggcctctgtctgttgaacttcgcaattagctgcctccacttctgtttcagcgtcggcatgttcagccgacttcgagtcgcttgagttctgtccgggtttctgcgatctttgcggtgcgaggctgcgcatgtggcggttccacggacattgaaaccaagataggaatacgacacctcttaccgatctaacgtgtcctcgagcctggtgaacaatttctttgtcacgtgtgaccagcagaaactcagtgtcacggttacctcttctggtcagtcaccggctcctctgaggcgacatcatgcgcttgttcgctcatctaataagcaccagtggatataatggtctgactgaagcctttatttgtacgcgacacaccgtagatggtagttcttctcctgcagaaggcggtgcacaaggaatgtgtgcgcgaatgttctgaatcgtcctctccccatgatgcgcctttgtatgagccacattgagcatgtgttgtttgtgtatggcgtgttcatgctctattctccagacattgtatctgtttcgttagtctgagatgaatgttgcgcaaggaagatagagagtcatactttctggcgagctcgttgtcatgctcctttcgagaagacagaacatcctcggcatgggagatggcagcctctaactcgtcgattccgatatataactgaggaaagcgtttttctgaccacccatgcgaatgcgcagttgcaccgataccctacaagcaaatcttgggatgcgaacgacgtacattttccttccaaacctgattttgcccacctgccgcaggcgggttggaagagatttcccgcgtgtcgtctcatatccctggacggtgacccacagaaatataaagagacttagaaaacgcaagacaaggaatcccattttgtcactagattattcagcggtgcctcgttactcttttgaagattagaagcgtgggcggctaactggagctagacagtaaataacagtcagttgctgctgtacgtactcctcacatgagacatcaactgctgtacgaagctccttttgctcgagatgtcactttaggactggtatgcctcagaatacgaaactatctgtaatctttcaggctctgtgtgtagtggtgtcgaggtcagatacgctccagtgtgccatgcgtgggtggtcctcaacactaaaattaatgcagcgctgtgtcccaagcatcgcgtgtgaaatgcagaggaaatcagtttgcgtgcgtaaattagatatggtatggggcaagtattaggtgatgcagtaccttcctccccttcttttccaatccattccccactctttggccctacagtgtacacctggtatacctggtttttgtctgatcgacgattctgcgcattacgagacaaaatcccacaggcggtgcttcagtctgtattaggtaataaagcagcatcccctcccacggcagacagcaactgtcgccgcattgttagaaaaacacctgcattgtatgcagctccagtgtttcgactggtctttctgtgttgcctatgagccggactgtatgcatacctcccagcggccgagcatgggtggcgggataccctggcgcaggctcgcagctcactgcagtgattatagaggcagtctttcgtccttcgtaaacgatgaacgaagctaactagattagcatggagccttcatagccattaatttcttcctagattttctgctgtagaaaggtgcgtgcgtgtgtatattgtccgttcgcggcagtcatgcagtgagccctgtgtcatgggtaatgattggatataacttcggggggaaa

SEQ ID NO: 3353 - DNA, 1940 bp, Toxoplasma gondii
  source 1..1940: mol_type = genomic DNA
gtagcagggtacacggcagtcagaatctactctgttgcctcttcaaggaagcaagcagttgacggcgtgggacaactcattgcgcacgatcgcagacaagacgtaacttccaggaagagggaatttccttattttgaaaacacaaactctctgcgtttgaggtagtctggactaagtgacagcattcgagcaaatagtgacggcggtgaaaagtggggaaacatataaaggctgcaaggtattccgattaccgctcgctttcacagaggactcaggagactgatgcgtctttttgttccactgtttgcaaggaaattgacaaactgttttccatcctgtgtgcttagtcagcggttttccgacgctcatattcccgggtccaggcgctgacgctcccaaagtttatctcacgattcactcgattgtgaccagtccaatagttacgtattggatcgtagcgaggcgtttctagcccatgcaaatctcttctatgaaggacaaagcacttgtcgccacacacttccaagatgctgtgtctcgggcgtttcgttatgcatccacacggattgtatggccgtcgcagcctcgagcgttcgcagacctacggttccgttgagcttcttcaaatgcgtgggtgtccctcgatagtcaacgacgacacttcttactttcacagtcgtcaccccactgcacagctggcacgcttgcgagtttcctcctttctcttagattgaaacgagtcaagaaagtgcacgatctacaaacgaattccccagaactcgagtctgcgtttcccgattccccactacagtcggactttctgacgctcttctaggaggttttcgccacacattaccgccccgccttttccgctcgcaggcacacatttcctgttttggatcaagtgctttctacaccgcacaaaccagaagccgtctcttgtaagaagattaatccaattaaatatgatagctgtgatgtaaagaagcataggaaatgctgcacaccttaattgggcggtaggaaactccactaagacgatgcggattagtgccacgagccggtcggccggtattgagtttctgccatgagagacagacgaccaagtcctttgcgagtgctggacaccatcgcacccctggactgctaaatacagctatgaattctgaaaaccacgacgctacgacatttaggttgttgctcatcagttacgttttttgccttcctaagatgccgccagtgccgtttcggaagagaatgttggatcgtgcaacatcgcaaccatgccggtggttcttctctatctagatgttggctgctagcaaatgcccaagatgtccctgaagtaatcaggaagctcgcgtctaacaaattcaactgagtgtcaatttagatgcgctcagacgcacattaatccttgcactcttggccgcaagccgatttccaacacagattcccgtcgctgcatttcttctttgcgaccagagtggcgtagacagaagcgaacagtgtccgtgaggatggtaacagaagccgcgtgatctgtaggggataaccgcactttatcccgaacttgtgaaaggtcagtagatcttggctagggccgtgctcgccacaaacgctcgttgcatgcaactgaatacgctgccttcttccgggacttgtccggcgtcgactcaagaattgaaaatttctttttctcacctatccttctccttggtgtgtctgcctgcctataggcgtcatgtttttgctgaatgcgagtcacaaaggcacgtttttaggaaagagttccctcaaaagtctcatgtgcatgcgcaaaccgccgtcgattgagtagctgtcgcggcagccaggtgtcgtggcagctttaccagctgctttttttcgcccgcgtttcttccccattaattttcctctcaactccagaaacgtcctca

SEQ ID NO: 3354 - DNA, 3467 bp, Toxoplasma gondii
  source 1..3467: mol_type = genomic DNA
ataaggacagctgtcccgcccgaagttctgtgcaccggctatctacagaggggcaaacgctttgctgttttgcttcagcccatgcgaacgtcgcttccacggatgtgtctcgtccttgggctgattcttacacaggaaatggcgttcaaatggttacacgcaatttgtttggataagtttttgtgtggaatgtcgcgatgctaacctaccgccttgcttcgaccccgttaacagaggtattctctgtctcaacggagatccaagtgacttttttcccagagatctggaaaggaccctcacactacttcatacgttatgtagcgtcaccaccatcttggcaacagactccgcagatattggaccaagacaaagcggaagtcacacacgacgttcggttagacatccttttggtaatgctagcaatggtagctctgtctgctttctcagcgcttccagagcagaagcagacgtgtcttcgggggccaacactcccggcattctccaacaaaactcactcaacagaccggaacgaagggtgatatgaactcggcaaaaagacgcgcaggaatcgttgtaccagtcgtttccgtggaaccttgtctcagattgcgactgccgcggatgtgtaggtcgccacagaatcggagtttccttgaggatgtctggggcgttcttctctggaacggcgttgggaatgctttccacctctttctaatggggcacgacgtcggatggagaggcaagccaggcctgcacagaagctgctgttggcgcgactgattaagttcctgcggagggcataaacgaattcgcttttaaagggtttacggtttaggagatgggggaaaagatcctgtatcagttgcgtagattaatatttccaccgagacgaaaaggactgccaaacaggattcttatggcttccctcagtattgtccctgtttgctgtttgccactttgttccccgtggctcgccattgtagtgcggaaatggcttcggtcgtcttcaaatcattcgaggatactatttgtgtctagtagattatctgctttttcaattcactcagtcccacctttctctctgaacgctgcacagaaaaccagactcgatgagaaaaaagtaccgctttggcactcgttctggttgttccgtggcattgttcggaagcgtgacagattagcacagcaaatccactaccgaaacagaggtgttcatcgctacacttcaaagttccgctctgttcactctttttatgtttgtaaggtcaaaagcgaagatggaggttcacaacattcagcgagtcgccttctaaaggggtataaacgaacacagttgcggctctgccagggacagcctgcagttgagggtttcgttacagtcacgtaatcattaatatagagattatgtcctatgacacttccatagtctctttctgcttaagcgttaattgaccaacggccgacactctgtagcttggagaagagcaatttaaccgcctcgaaagcctctctaagcagattcgttaccacgcagcacgtgcctttaacataccataaaaggacaggagctcttgaacacccaacaacacaatctcagagagtgctacgagggattgcaaatcaatgtacatctacggaacgactagcttgaaatagttttgctgacaaaatgggagttatccgtgtgacgagcaacaataggagcgatacgtgattcgagtatgtcagatactgtgggtgccagagaagtgtaagagatcgtgcttttcgaagaattacgaacgcgtgaggtctggaagcctgcacggtcgcccctttatttgctgaaactttcaatgtggtaccacctcctagcttgccagcgatcaacgcttcgactgctactctggaagacggtagtcagcagaatgatactgtttctgtcagcatacgatagatgctttgggtacttcaaaatccttacatcgtatgcttctcccttcggcgtgtcatctccccacctccgaaaaagtggccgcagcctgttttgtttttcgggcattcgtcgtatcaggagtactcttgacatcattgctggcatcctgactaccctaagtggcttgtattccgcaccaaaatcaaccgatgactttccgatgtcaccaaccggggcgcctgcctttcaggagaaaacaggaacaatcgtgaactcctcgtctggacaccatcggtccgcttcaaatgcccgtgtccatgaggctcgcaatcgtgaatcaaaatccttacaactcggctcccttgcttttcacagatgcaacgatagtccggagaacaggccccgcgtggcctctagtgacctctagtagaagcgacttgtagtgggaggtattatactactctcgaagaaaccgtcagcagcgctaaccgttcagaagtcgacggggaacttctcccctctctttttgccctatgaagtgcgcctgttaactattttctacattggccctgcaattttcgtctagaacttttcagttctaagttctgcctcagtttggctccttggcggagaaccaccctgttcatcccacacaatcgttgtctcgctgtgttgtgggatcccctccagcgttgtctgcggaaggcagagctcgttcgagctgcaagaagttttttcgaccgcgggagatattcaagtgagaagccgctgagcagccgcgaagaaaaccggcgagtgactctttgaggcaaaaatccttcgcggcgggtggctccttccgcgtagagtgagcaactggaggggggcgttctgggagttgcggggtgccacgcactcctctcactcgtctgtaagagacagatggggcgggaccagggggaaaagggttggaaggagtcggaattcgggtgggatcccgtttgcgtcgcaacctgctgtgtcgctctcctctagttcactcgatatacgccgaggagagaggaaaggacggggggtagggggacatcgcgcgcgtgggtcaagaggaggggaggcagcacgggtcagagaaggggagggagcaccgaagaagtgtggaaggcgggggatggcatcctgggttgtttcagcctcgcgtcgcgcggcgtgcctccgcctccttcttctctgccctctctgctcgtgtctctgcgttgccgctcctctcatcatttcctcgagggttccgaaggacggtgtaacaccgtggggctgttgttagacgttttttcgtggttttcctcggctggcattttcgagcacgagacttgtctcgcccggttctgccgttgtgaaaacgtttttcgttctcccgccacccgaaatctcctccccacgcctgtgcaaccctgctctctccacacgttcgtttggggagactttgtttgcggagtaagacgcacttcttgcatacttccaccaggaattcttccggtggtttcgggacatttcccaaaacctttgtgggccaaaa

SEQ ID NO: 3355 - DNA, 1473 bp, Toxoplasma gondii
  source 1..1473: mol_type = genomic DNA
catcaacagtggctctcgtattggcgtgctcagttgagtcacagctgctccgtgagaagtcgctctcgagttctttcaccatcattttagagttccttgcaaagggccgcgtccactgccatttgtgcagggacagattcgtccgccattccgctgttctgaggatagaaacctctgcgggagatgcgcgcgcgactctagtggggtgccttttccttccacccccccccccctcacaacgtgtctgcaaaaacacgaaccaggtcttttttttcttgggatggcctcttcgaaagcagcaaaacgcatggtgccaacgtagctacgctggcagactttatgaagaaatcacgcgaaaatatgaggctgatttctgcacttaaacgcggaccacagagggagaagcctgtctgcacacgtgagcaagtccattcatgcgtgcagctgaggaacaaggaactcgaacccgtgacatggaagacgcttgggttatttagcctgcggacagaagacacttgtcatgtcgataaagttctggtctcaaacgctgaaatcgagcactttcagctttctcctgtccggtattctggaggcttctccactgccctattctttcttgaaagccatgaaattcgcgttctgagcggcagtctcggactccgctacacatttctttgttacagagattgcgagcagaagagatcgatgcctttccatttcacgggctcagtcgcaggaacgcttctatcccgagtcgccctcaaaagctctccatacaagacctatactagtcatacactcggaacactctgcagttcactggtgtggttagcagcttcaaagaatcctcaaaccaacacagacgttccgcttttgccagtacatcacacgtcggtgactccacacattatcttgacgtgctcacaccagccacttgcaccccacgtagaggtcgactaacgtttctccttttctgtgtttttcctcagaacaaaacacttccgtgtttctgccttcttccttttctgtctcagaagcactttcaaccctgagagtctgcgttcctctctacccgtcctcagtgtcctttcgcaactttgacggagacaggacgtgtcataggagactactccttggaggcttcgaccccctttgcaagtgtgattccccgagagccgacgagctttctacatgcgttgaagtccccgctacaaggcaagaaaacctattttccagagcagctgcaagccaatttgcgttgcagtgccttcagagtggcgtccgtgcatgcgtgccgttgcacaagaggcgggcaaaaaagcgggcggccgacgcggcgccagcgttcgcggtcactacggcttcccgttttctcgttgttttcttgccctgtctctctgtctggcgtttgcgccatctcgtctgcgaagcagaggaacctgagaaaggaacttggctctccccgttttcaca

SEQ ID NO: 3356 - DNA, 3667 bp, Toxoplasma gondii
  source 1..3667: mol_type = genomic DNA
agtgttcagcactgtcttgcgtcgttcattttctaccctcattaccacatgtgactgaagagctaccgtcgatcttgtttaagtttccagatcaatgagttatgactttggcttaacattgtctgtttcttgaattgttcgggcataccgcctccatcgtcgaaaaagcattgagaacggtacagttcccggcagctgcgttggatggaggaccctgcttcgatggcaaatgaacctgttttgcatgcaagacatacaccgccctttcggaaagagcgtgcaaccgagaactccctctaggtggtgctttgcgccgaaaatagctagcgttcttgtggtagaagttgcactgtgtacgctgtgcgactctaagaggaaactgggtagttttggtcgtcgttatgagcgaaatcggaaacgctctcccaaacaaaaacgtctttttgaaaaaggtgaagtctttaaagttcctgcacaccagctccgcatactcgacgggcgttgggtacgttgcactttcaagtttcactgaggccgccatccgcaaacgtgcggtcgcctctcgtgtaagttcttggtaccagaggtggcaccaccacgagacgacacattaaaaagaaaaacgattcaccgtaaagacgccagcaaccgctctcaacgcacacacgcacgttgcggggatacttccacttaaccgacaacacgagtgcgtatcgataccctgcgggtgagatgtgcatgatagtcgccttctgatccctttagcaaggaacacacctcgttcagagcaggatgccagctgcatcaccaaaaaccacaaaaacgttgtcacaccagaccgcctgactctgcaccacatccactgtgacaaactcgcacagtttccccgacatatatggtcgacgcttcttcccgcagagtataacaagcggtatcaatagtaatgccaagaaaattcaagtagataagaatggggaagagtgccaccataccgttgcatccccttgaatagctacgagtttcgcatttgacatagtatgttatagtatcgcatttacggactcacatgttccttccaggtcgccggagatccggaaagacatgtgacgtccagtgcagaactttcgaaaccgccacggacgctgctacccaaggtgacattacgtgcagcgcatttatccgacataagtgcagaataaacggaaaacgcctgtacatgttcacccccgaacacgcagaaagagcaactcgccagggtacacggggggcagtgctgcttgctttaaaaacacttttaacgaagagacaagcagttgcactaccacacacaatcaccctgtaccacgtagaacttcaagggacagttaactcttttaagccatggtgtcggaagccggttttgcggtgcgagagcacacggcagaaatcgcctgtgagccggtcccgcaaacacaagccggctgtcatcgtcagccgtgacaagcgaacgcgcagttcacctgaaaattcggaaactgctgcggaagtacaacttccagccaggatgttcatccacctctggctgccacagcatcggtgcgccacatagcgccagggtcgccacgtgttgtggttttatgatctacacagtggtgtggttgtgcactgttcgatctaggcacctgttgtacttttctaaaggagtgtgtcaaggaaagacaagtcaggaatggggattttctcgagcgcgacggagagtgcaaccaggagcatgcttgacaagttgacgtcttcgagtttagcggagtcaaacaaccacctggcgcccttttgctttgcttcgcgtaactcgtgagacattccgcgtcgcagaaacctttgtccgtcttcattctcttgcgcgtctttgttaggttcggccgcctcaccgccgactcctgcttcaccggtcgcgtcgcctgctcgctcctccgtttccttcgcctcgcggcctgccccgttttcgatcgcgacttccagcttggaaagtaaggccttcttcagatctactcctgacggaactcccttcgagatttccttctcttggtcgcgagcgagggcctttccggccgcctttagcgcctcttcaaactcggtgtccaacacaccaaacacagtctccgcaagtttcaggtaccggctcgcgtcccagaacgccggatccacgagctccaagtaatcgtcctcgacatttcgttcctcatctgcggacggtttgtggaaggagaagtacgcgtccattgtagacaggccgtcgaccgtgtgccgaccttcggcttcctgtctgctgctcgactctgcggcggcagccgttctcgagacccacgcgcagtgcgtcaacacggctaccgagcaaatcgaacacagtaagcgatgtagaattcgagtccgcttcatgatgatggcggaacaacagaaaagagcacaaaacagcctcgaggtgtccgcatggatcgcggatgaggggctcccgacccccacagcgtcgactcaagccctgcacgctccgccgatgaaacctttttctttcccttgccagccgataaattttctccctcgagctctgctgaaacaagaaaagtggcaacagaatcgtgaactgttcgcggtccaagagaagcagagggagaaactggagtttccgtaaaacagggctccgcctgcgctgcttggttttacctcccagccgccgtgacagcaatcggagaccgtgagatcgtggggctctgtcaagttcgttaaaaaaactgttttctgctaaggcctgcgacctctcggctttcgtaggtggtgtgccgtgcaaccgttccgtccactcggtgccgccctcgacagacagggtaccgatcggggtgccgtggcataaagcaccccttgaacccgcgcactgtatcccatacccctctggcgccttctgagctcgagtaagcgcttgagttgcggatttcgctctttgcgacttgtttctccggtggaaactgacgttctgcacgatttccccatggttttggcacactgcggttgccaagcagcggtcgagaggccgcgatcgcatgtcttagcagtttctttaccgtttccgcgtagtcctttgtggcgggagttgagtgcgcgcgcaacagagaatcttacgaaaccaggccacagggtcatgcatgtgacgtttttgcgcatgtgcagtgtggcaagtctggatcctcaaaacggtggcagcacggttggagaatcggtgtctcgcgtctcgaacgcaccgcttcattctgcactgtgacctgatttgaggctcttatcttttgcaccttcggtccgtcctcctcagactgatggcgtttgtgttgtgattgtcgcccgcgcaaaattgtcttttcgccggttcttgacgcgcgttgcgagcaaagcgcaccgccgccgcgttccgtccttgccagaggagcgaacgaaaaattgtcgcagcgagttgtgtttcgcttccactaaacccggactgggccagccggacagcgacaacgacgggactccacttcttccggccaagccgttgtgcggcaagacacccaccctgcattccgcagtcaccttgtgtagctgcggcggtttttggcaccgccttcaggcaaacgcttctttttcgcggaacgcgactccacaa

SEQ ID NO: 3357 - DNA, 2288 bp, Toxoplasma gondii
  source 1..2288: mol_type = genomic DNA
ttcgttgcagacaccagtctccgagtcacggagtgatgagctcaagcatgagccgaccggagaagcagcaatggaagggacagtggaaacccggaagcgatagcacccctagttccgacgataccagacagcgaaggcgcaagtttctctctgttgaggataacccacccgtggagcggtggaacgaaatactccccagtgggttttcacaccacctaacgcgaattaggacaccaacaggacaacaccataaggaagacggatgttactcagaagaacaaacgggaccacgcagagaggaaaacgggacatccctaataagtagaagttattcgagaaattctcaggcagcgccagcaagcccctttctggacaagcgctgttgcctcgcatgtgaaagaaaccatggaagaaaaacgtcggatgagcacactaaaatacgtcgtttttaccaatcaccagactccaaaaccactccgggtggctacaacactcaacggaattgtggaaacactgctgttcaagtaaacatctgtaagattcaaaacaaggcgctttcgagactggatatcgatgggcagtcggaggaggtagcaccgggtcgaggaaaaggtcaagcaattgctcctgacagaagaagtggacaaggcaattctaacagaacagccaaaccactccaccacctccatcgcagagtatccaaagcgagagaacaaaagagctgctatcaggcggatgacgaagcaagaggcgaagatgcggatccaggtgggaagtttacttgtgcagggcctagcagttccaagaatgcggtttcggtatccagaccgaattcctcaaaatcgccaaccacgcagaagctgacagagaaatatcgacggcgcagagctttgagaaggaaggaaaaggaaaccgtcacgggcgacgggaacaacagcagggacattcctcgtaattcggtgtgctcacatgaggaagcacatcagtccgcagaacctagacgacgcacagagaggagagaggccaacgatacaccacaatatgaaggagaccacagaattcacgaagagatatactctttcactgagcgcagctccagcggagaggacaagcagaaaagggtgtgcaacgagaggagggttttacacaaagaaaaatctctctgctgggaaaggagaacgtggtggttaccggaaccggcatctcgcgaccaaagaggcagctttctatgcgcgcgaagagtgagcaaagccagaagttattcactcgcccacagcaattcctgcgcctcctactgcagagacatggcagcgtgcgtaacgaaatgcagtgacactcgggaagtgtcgcagaggagcgcaacgacccgagaccattccgctgcaccaccaaatcgaccagacgacgaactggggacgtgtacactttactcacagtcggcaagagcgcctaccgacccacgaactaacgagacgcagagccgcacgagcccccgcgtatcggcaaagagacccaacacttcatctaactctctgttggacgtgttccagattgaggcaacgtcgttcgcccatgcacttcgcacgagagcagtaccgaagcagagaatcaaagtctctttgctgacaactagacaacacacggatccggtccaggatcgtgaccaagcaaaatagagctcgaacaccgagttcgattcggcttcggcgtgcctgcgggaaatctgatgttcagcgacgcatagccgcttccgagggccatgtagacaccttagttaatgtacgattccgttcacgttgtcgtggctttgtgattaaacgtacagttatcagatagacgagggctgcaactgctgtacaactagattcatatgttgcgatgcctttcctatctctgttaggccggacatcatggttttgtgtatgttgctatgccagtgtgcgacgttcgaacaacggccacgaaacgcacgacgtttgataatgaatgaatcttcgtcacagagcgagctgaatgaaggagacgtcagctagtactgggtcactcgtcgctactgccagatgacgatgtgtgcaacgacagtagcgatttcgctgaacaaactggccgccgcggacgcgttacgtcgtgactgtgcatacatccgaatgtagagaaccaacaaccctactttcaatagcaattatgagcccattgttcgttctcaatcttgttgagctcgcaacgaagctgacgctgaccatgtcgcgaagagttcagtacctcggggaagtctcccccaggatgca

SEQ ID NO: 3358 - DNA, 2925 bp, Toxoplasma gondii
  source 1..2925: mol_type = genomic DNA
gatagagaacatgtttctcctcgctctcgcgacgcgtacccagctggttgttctgtctgagctgggcccggctcacactcggcctcgcgcttccacgcggtgaccgcgcagtcgcgataagtttcgctggcaccagaaccctccatgttgtcgtctgccgaaagcgaggcgattcccgcgatacctttgccaccgtcgggtctcgagtctcgcgtcgagacactgtctgtaatctgctccaagggacgggctgcgctcgccgaaaccggctttacagacgcttgacggagccactgagacgcagatgtggactcgctacggaccgcgtcctcggaatccggagaagctacgaacgccgctgttgcctccaagacccccgctgcttcatcgtcgagaatcggaaggtgcgaggaacttgtcccggagagcggggagccactcagcgtggagttgggcgctggaggagacctcgccacactcgtctcaggggaagtacagggcagcgaagcggacgcaggttgacggctaccagagaacgcaggagagcaacacgcttggttcggagtctcaggagaaaggacgggagggaagggagaagacgaagccagcagcacacgctctattggtgtgggcgaggacagcgatgccatcgtgggtcctcccgcggcgcccgaagccaatttggtggagggcaaatctccccgaatcacagacggaccttcggtcccattgagcgaagacgagacgcggaaggcggagacgactctccggccaccagcaaaatggacaggcggccgttccggaaagcgtccgggacgcctttgacggaactgatttcagggcttgacaatctcaaagagacacatgcgaaggaagaggacatatcgaacaccgactgaaggaggaacggaatgtgcgtgagaagcttcgggaacaaacgggagagacaggcagcttctagcaccaaaagaaacaggacgcagaacgggcagataaatcggcgacacggcgaatccaagcagaagacagattggagtttatctttgcagttcgtgatcaaagcgttgtaaagagatccaggaacagagaccaaagacgagagacggagccacaaaagaaccgaactgagacacacagcgagaagaccgacgcgtaataaactcataaatagccgaaatagaagagcgccaggcgccgcccttctattcaaaaaaaaacgctttgcttctaaggagcggggatggtcgttcagtctacaataagtagtgaatgaggagccgaaagacaaagtataacgacttcgattctacccaatggagagggaactgaacaggattgctggcgtcccactggtgcggtctggcggacgatgagaaggcgaaaggaaaaaacgcactcaactggcagaaaacgtgggaccacgtgaggtacacaacgaaaacagaaaccggagagactaaaagctttttttagccagacgaagaactggctcgtgaaacggcgcggaacagcgacagcgagaggcactgtgtttcacatgaataagaaaaagaccgggtttctgtttcagttctccgtttgagaggcaagccaaggggcgatgcatgagtttctcaatgcacagcagacaaaaaacgaaaaagtcttgaggaagaggaaagacaggttcccctgaggatggaaacaagaagggaagaaaatcgcactacctgaatatcaaattgttagtgaagcaaaagatgaaatatatagcattcacatcaactttcccgttcagagcatcgtccgctgtctctcttgttcgctttctcccccttcggctcagtcgcgtttttacagactcaaactccccatctgccccctagtgtcgcgcgcgataccaagaaagataggcggcagccacgaggaaatttgttttcggctagtgatgtgagaatcacaacggccaactgtggtgattagggggccaacaaagcaggagcgacgaaaaagaaggtacggggaacactgcgaagaaaagcaatgtactcactctttagacagaaaagggatttagaaaggcatggcacactgcctccacagcaaggagtattttccctccgcattttggatactttctgtgtaccgctgaagacacaaggatgttcccgccgtttctacgaaggcactcaggaaacgcctttctcttggtctctgcagtccgcgtaacagcttttgccaagggttctcgccacacagccagcagtatctcctcgctacaccaccaagcgccagctgacatttcctttgaaaataagccgaagcgccaggtcacaccccagcagagctccgggcgtcactgcacgccgcgaggtatggaacggtttaaagccacaaacaatcagccagccaggagacaagacctgttactcgaacccactcatttgcttaggtctcccttttcaccatatatgagtcaaaacactcttccgccgtggtgcttttttttaactctccgagctcgtcgaggtaaaacgttcagttctagttgtccggccgttttgtcttgtcggggtagcttgctgcggcatcccttgtcttagcgctctgccgcgcataacgagctgctgccattctgcatcatcattcgatgcagaactcgaaggccgtattgagtatcaggccagtgggaggtctcgtggcgaaacgagcagaggcatgtgttgagcgggcaaaatgcgtgacgggggcacagatgcaggacgagtgtgagagggtcatggcgggagaggcaggcggtcgaccaagtcaagagtgaccgacagaggcccacacccagatcctcacgcattttggaactttagtcaagtgagtcggctagagacgaagattgacctgggagacggctcctgagggagccacgaatttgcttgtttgatgtatgca

SEQ ID NO: 3359 - DNA, 1901 bp, Toxoplasma gondii
  source 1..1901: mol_type = genomic DNA
gaggcagttggatcaaatccgtctttctcgtgcgagtcctgccaaggcgaggcttctggggatgcgcgcgccgctgtcagtgacaaggagaccgaagaaggcgactctgaagagagcgagagagacgaagaatggcctgtcgactccgtcggtgtctgtacagaaggcgaacagtctaaaaacgaagaacgtttcgagggtgaaggcgcagaagagggcaagagagacgaagacactgaagggtatcctgtaggcgaagacggagttgcaggagtcgtcagagactccgagggaagcaaggagacgttcgcctcgggaatgtcttgtgaaggaagaagaaagggataccgaggaacgctgacgctcggagaagagaacgagtcgcggcgagttgcagtgtctccagtctgtgagagctgcgaggactcatgttccccaacgggagaccggcagtgcatcatgccttccatcatttcctctcgtacaggcgaaatttctgcttctctctgcttccttcttctcctggtttctcctctcttcctcttcttctcgtctgtcttctcggctcgcgcctagggcagatacacgaggcgcagggaggcggagggaagaggggagggtgcgagggaaaatgagacgcgtacggagaggaagatactctggccacgcgaagaggacgcaaaatgaaggactggggacctgcgaggatttttgagcgaaacatcccgctgcttgagactgtgagaagcgaggaaccacggcaggtgcagcgctgacagcaaagagagaactccgaagaaagccgatgcagcgaagtggacgcatgcggcagaaaactttgctgttctctatacgaaggaagctgtggacagggcaaacatatctccgctctcttcttcttgctcctcttccttttttccaccgttcttctcgcgctggagaggtcaggccgcctccgtctgcttctgtcctctgaggcaggacagaagtcgcggaaactcgccgtgaacaagttgggcgaacagcaaatgcggaaaaggggaagcaacgcagcgaaggcgcgaggagagccttgcggcaggctgtcggaggagaaggagacagaaagagcgcctgccttccagaaactgagaaatcctcgacagacatcagagttgccgacccccgccacacacctctgttgcgaaagacggaagaacaattccaaaattcatttgcgctgcgtctgacggcgacctgaaagctcgacagacaaagagcgcgggcgggtgccgggagagcgcttgcatgcgcgcagcttcttttctcgctgtttcgacgctttgacgccggctcagagaaagaaagaaagagcaaatgctccacgaattcgcgttcgtctctctttcaatacggtcctcgttgaatcttgtcttgtctggcgctggagaaaagcagagcgtcgttttccttcctctctcagactacaccgaaactgtcgaacgcttcttgacacactgagtcgagtcttcctttcctctccttctctcgcttttctcttcttctctccgtctgcctctgccgttttccgactctccttctaagacttctctcggccttcccttctcttctttcgacctcagtcctcactgtctcctccgtttctgctgctctcttcttctgttcgttctcaacctcggagtgccgtctcatccttcttcaaatcgggagaggcgaaacctttcgtctctcctctctctcctctcccctctctcttctctctcctctctcctctctctcttcgctttcttcttactgctggcctgccgtcgagacgaagaacgcgacagggagagggcgcgagaggaagaagacccgttcgtctcgattcggcgctcccagcatcccctctggaccaacca

SEQ ID NO: 3360 - DNA, 2377 bp, Toxoplasma gondii
  source 1..2377: mol_type = genomic DNA
aaatgcagagttctttgtttcatctacatgtgtacgcctgcacaaaagtcagaatttatatccatatatatatatatatatatatccatatatatatatatatatattcatatatatatatatatatatccatatatatatatatatatatattcatatatatatatatatccatatatatatatatatatattcatatatatatatatataaatatgtgaatatatatatgaatatgtgtgtgtgtgtgtattttgagacagtcttttgcgttcaagggggacggagagaggggcagcaagccggcgaggaacaacatgaatgcggcaagccatgaaaccacgaaggttgtgttgcattgcgctcctcagctatgggctggaggtgtacgtcctgctggaacgttggattggcgagtgaagttggaaaagcagaggaaacacaccaacgttgagtgtgatagtccttcgcaaaatacggcgaagacagggaaggattgtgtagaagaaggcgtggaaatgacagtgttgcgtcgtcaaagagagtggggagatgtgaagagggtttgtgcgtcggttttctcggatttctgtgctgcatttcccagacggtcggtcgcagaacttccaatccccggatgtttttcacggcccggtcgctgcgtggtgctgtgtctcgttgctcagttcatcgtctttgtctacctgtttctgagtctgagtcgacctgtttcgtcagtttttctgcctttttcgcctcttcggatggtccagatgctttgcggacattctcgcagcgcccgcagaccgcggaagcctctctttgttctcgcctctcggctcggtttcctccgcactgagagtgctgagagtgacgggcacttttcttgcttttttgcgatgggcataggcaagcagagtcgacgcgcgttgttgcgctgctgcctctcttggtgtgcgaggaagggagttttcaaccaaaaaccgtcgttttcttgtcgttctggcgcgctgcgacttccggctctttctctccgcgaaacgagacgctttttcgcttgccgccgggcactttaaccggagagagctgtcggtttgtgctgtgcatatatatacacatgggtcgaccgcgcagatgcgtcctcgcgcgtccacgttcgacgcacaaatagatagatgtgaaggtcggcagaaaggcacttgaatcacggggaccggctgcgagtgtcaaaactcgaggacgcgtgtgctgtttgcgtgaaagcgtggacaggcttcttccactttctgtctgcaggcgaactgcctttctgcctcgctcgtgtctcgcaacttggcagctcccggcgacagtcaaaaacgcgggcaacgcgacggcccgcgtgcgaggaaaaggggattttcggaaaggaaaacgctcgctttgtccactcgcgccgccacaaaattctccgcccgccgtctctccctttctttcctgtgttcccccctccttcggcctccccggacaacgggagtcctgtgtatgtacacctcacacgcactcgcctgcaaacatatttacggcgaaggcaaatcggtctctgtgtttttgcgcccctcgtctctttctctcgacttctttttgtgttcctcgtcgcctgccacagacgaacggcctgagccagtcgggcagaagtaccgtagccacaaaaacgcagagtgccctcatgaccgcaaggattcacatgcaccctcgcagccagactgtgttcggtgtctcagtgcggtctggcgacggtctctcgagttgttcgcgaaacgcagacgctggggtcccggacgtttccgttctctctgccttttagccgacaaccgtctggcctgcggggtgtagagtgacgctcgagcttctcgcgttgccgtcgcgcctcgattgacctcggcgctgtggccgctgcttcgtctttccagctgcctttctgtcttcctctctggcgcccctgtcgcctcttttgtaccagtctgctctcctctcatcgagaacaccctcggtttgtgtcggtcgcgtcctggatctcccgatttctcgttcgaggtttccgtgggttcccttgtttttctctgtcacggctctcttcgtgaacctcttccaggtgctgtctccggcgccagctcgggggttgcgccttcttcggtgctgaggccagggagaagagtcgccagtcagaagcctgagacagcgggaggagacgctcgctatttttttcacgaacgcgtcgtcctgaagtcgaagacacagtcggagacagctgcgtctgcggctctggaggtggttgcgcgacgctctgttcgttaaacgaagcatgtgtttgcaaagcggggaaaggcctccaaga

SEQ ID NO: 3361 - DNA, 1789 bp, Toxoplasma gondii
  source 1..1789: mol_type = genomic DNA
tttttaccagtggttttgcttgcgtttgcctaggagtcgccaaaaaggacgcatgcactgtttctgcattcctgagtctgagccttcgcttcagcttcgggaagagatgcacgaatttctgacctcgctattctcgaggattccatttcagtttgtgtagtgccccgtttgcttcgtgagacaatgccgcacgtgatagtctggccctgatagcacggcattttcattcccaactgcgtcttgaaaatggatgctgaacagtgtcttctgccgttactgattcctgcccctacagtagccccgctgtacctaaacctgattcaagaatttgcgcgccagtcagtaataagcggttttcccgccaaaattataataacgaatatgaatcgatagaccaacgagcaacggtgaggcttgttgcatgtccttgccggcttacgcccataccttcgtccagcatgaatagaccgcgatacacacgtttgtttttcgaactcagcgaacgcagcggcctgatcggtctccgctactggactgaggaaatagagtaggtcccaatgtttttgtcagtgggcggtatggagtagaagctatgtgcatgtacacctctctacgactatccaaatgcaacatgtagcaagctgcaatatcgaatgtaatacagtggttctaatgtgaggtcagatacgcagtaccctccaaatgggaaatgtaccgaatatatggtattatcctgtggagtaaggattcagactagctgcatcaaagagacccatactcgtcactcctttcaagggagagtgacgactggtgagagaggaacatgcagttcaccaccgtggtcaccagtttcttgtacccttttgcccgtgtaagaaagtcgttcagtaaccagcgttctgagaagtcgaatgcttgcagcctttcagttgctctatcgtgggaaagacaataaaaacactgcagaagacctgcttcttggacagaagctttacgcttggtagcgccaatttctaacgatgggagagctggcccgtgtctgcgtgaccctcggacttccacgcccactaaaaacaattgaaacactttagtcaacgcgtctgaatgcattcttcgacagaatgcacccatgatgaacgaagatggcaaatattaccgtcagagtgtgtaaggaattaaaatcctgtcaaatgtccctggaaacgacacgcatgcactgttctagtcaacgcactacctttaccgggtacctgcgtgtccagctcagaaacacggtaccagtaactcagtggctcttttcgcgaaactcgtgcatcgaagcaagctttgaggccaagaacaaactggcttagagggctccactgggaacggttttcttgggcttcttcggacaccacaccagcctgcgtttggactgactagaaccgaagcgtccgcgaatgtgttttgatcgaaacctgctcaagaggtcggttttcgagagaagctgccacgcgctaaaatttgcatgtgttgcatccaaaaagggaaatcggcttatagtcgggcaccagccccacaagcggaaggcgcatggcgtggcggtgcgtgggggcagaggctcctttcgcgaaatgtcgatgggcgttagagaaattcgccttttttgtcacgtcgtcgatttcctgtcgagtgggggcgtcttcgccactttcattgtaggatccgtggagttttgcggccgcgtggtatttccgacgtccggcagagcgtgccgtttccgtggctgttttttcttttctgtgcacaa

SEQ ID NO: 3362 - DNA, 2823 bp, Toxoplasma gondii
  source 1..2823: mol_type = genomic DNA
actgtcacgcatgaatgtgtaagagtaccctaggttatagccgaatgaatgatcctagtcctgcacagggcgctagagaacggtcaatttcacagaacaataactgcaaagagttatgtctactttcgggaacagtttttactatccttttgcgtcatgatccaaccctcgaactgtctcgtggttttcgagaacactggggatactggctgacaaaaattgtcgcctactcctcggtagaactgtcaagcctcttttttccaatggatttcgtagaaaacctaaaaatcgcatatctggctggcatttagcctcatagtttcgtgcggcttgtgtctgaagaaaattgtagctttacgccgtgcagagtggtgtgttttctccggaaccgccttctccattcctaactactagtatacgtactgtaaaggtaatagcccgagtgtagaacactagctgttttagtggatggattattatttgcgtttactgtatgaagcccttagttgtacggacgactgagatgcgattgaatctttctttggcacagcgggttcttctgcgtgtcacctgactgcgacagagtgtcagacgataagaaagaatcaggaaaaatcgggagggaaaggctttttaggggcttcctagtttccgtacgagaggagcatctttttgtaggtggcgacctgtgggacgacgcgtgtcggtagggaagtgaggacaatggtgtgatgtttgtgtcttgtgaaagaatcaaatgtgcccttaggagcggataagcaccccatagatgtttgcagaacaactccatttgagcaggatgatcagactcacatgaatgacttgactctcgctcgctaagcagtttgggggccgtccctgtctccgcttctgttcgaatcttctttaaactccgcaatcttttcttcgcccgtctttctcaactcccctaccgcatccctgtatgttttcccccattctttagcgcaccagcatctttgttttttctcccttttcctatgcggaatcagtcgctgttgcatcttcccgaatccatcttgctaaaaactctctcgcttgcagcgtgatgggggccttctggcagaaaaaaaaggaaacgacaaaaagtgaccagtccgacgagaatccttaccatcttggaacttaaacgcccacgggaagttcaaacggcacgctgaaaatgaacgcgcgtacgtagcttgccttttcacttgaaaggacaaaagattcccgcgtagaactgtcacgaaaccgttctagaagtacgcgtctcgatacttgctgggctaatccttactgctgcatgacagtgcggcttccatgatacaaaagaatcactcaaaaaatccaaatttaagctgacccacctgacgatgcggctgcgaggaacgtcacaaaagcagggcacgccgtaagagaagcgaggcaaacatagaggacagccacatagagtatggtagcattgttgacgcttttagaactcgtgcatttgcggttcttctcgttcggagcagcctacaactgcgatcgtggaaaatatggtcggttttaaaaaaaagccaagagtcgttttaccgaaatatcagcttggaatgggtcgttacagccgcccgcgatttccatcacgtcaaactccgcttttcctcgtgtcgcgccgtgcggttgtgaccataacgacagcgacgagttcctacttttgtaggcaaaatatcgaccgtctgtgcgagcctagcctaagcgccagtagagacgcgttttactctgggtgtgcgctgtttcaactcgacttcgacttccttgtttccctcctacgctgtcccctcgtcacgatgcttgtgatgcacataggaaacggtgcacttcacattccatgtttcatacttcgtggttcgcgtgtctgtcgataaccggactatccgttaatggcccacgggaccacagccgcacattcgcggctctataatcaagtacagcactcgccccgtttgttttcgtggtccggttgctacgaagttaacacaagttcccctttaaactcgctgatcaagatcggcagagaggagctgcaatcccgatccgaacgtcggccgccacgaacgcgctgagacaacgatcgacatcgaacgaaagtctcaacttcctgtctaggataccatgctcacctgagctgtgcgagacctagcggtcgggactgaaccgctagcgacgattctctttgacgcgggagtttgtgcgaacgcgcgaccgtcggtcgcatttgcagagttgaagtttcgctttgtaggaatgtggttcccgtgcggaatgcaaatctgagtttcgcggggagaaaccatttcgattttttggaaccgcggggattctttgtgccgccgatgttcgtgtggctcgttcttcccgcgcgcaaacgatcgggtcaaggtcggctagcctcgtggagtctgagcttcgagtctgctttttcgactggacttccgtggttccgtgttccgcatccagagggcttccaactcatttctacctctctggcctggtttttttcggtgtgtccgcaagcggcgcagcagtccccagtatcctaaaattttgctcgtgcgccaacgactgagagactcgctgcgtcgtgaggcctgcaccacccttttgcacccaaactcgcttttcgtgtgcttgccattttcccttcggaaatggccacctgaaaactacctacctccgcgcgtgccattccaccagtccaccgcccgtccaccgccaccctgcccggaaaccgtggccgtcagttcgttcgcgaaaccacca

SEQ ID NO: 3363 - DNA, 2828 bp, Toxoplasma gondii
  source 1..2828: mol_type = genomic DNA
tcaaagatttcaatctcttcccagactctcgttgtctgcttcgcacttagctgcaggcactctctctctccatatatatatatatattcatgtgtacggaactatacatacatatatatatttatatatattgcgtagatataacagcggatgaactgatacgtacacagagattcagagcggttgtcgaccgggggaacaaagtggagatacaagtgaatgcgtgtgtctgtacagcgaaagccatactgggtgtgcatgccgacttagttctcattgcgtcgtgcattaacatcctgacgctcaagctgagaacgttacatgcgcatctgcctagacatattccacttttcctcagcactgtatcgttacaggtatgtctttatatgtgtggttcctgcctataaatataggccagcagagcatccgtggatgtctacgtaacgtggaaaagaaaagctgatgtctgtccgcccttttgggtctggacttgtgtgcacgatcgcgacatgccgcggagcccaagtggatttttacttgtgggactgtgtgtgagcagtcgaggcactcgactttgatatttttcgaaattcggaattcatgcaagtaagacggtcaggaaacgaagcaagctgttcttctcgccgttccgatgacttcagagtatcagaagtcgctgcgatctctacagtgtcgcgtgacatgaggacgaacctgcgaaagaggcatcgaccttggatgtttgtctgtcacctgaggcgacaaaaccgccaacgaacttacccctccacagcttgcaggtacgacctcatgtttgccgacgagaggggacagaccacaaaatcgaaagaaggcgcaggaaaaaatttgaatgtcatcaacagagaagagaacctggcagacaggaaggagatcgttgacagaacacacatcctgcctctctctctctctctctctatatatatatatatactggatatatatatatatatatactgaatatatatatatatactgaaatatagcgggtgtacggtatctaccttggacaggagtaaatacaaatatggacgtggttctgaaggaggtttctgttattcatgtagagatccgcagacggatttccacttgcccatttaggtttttttttgtgcgcgaccgtttcagagcgagtgccgtgagtcagtcgactgcgtggttgcgcgccgttttgatcacagaggcggagcacccggaagagcttcaaaggatcacagcggcgacaccagaaaaaaaaggagaaaaagagaaagtttctttttttaaaaaaaagctgacgacgatgggactcgaacccacaaccttctgatccgaagtcagacgccctatccattgggccacgccgcctgcgaggctcttggggccatcttcttccctcggccttctccagcgcaagacaatcttcttgcctcctccggtcctctcgaaaccgcttcttctcttctcttctcttcctccgagaagaaagccttcactcgcgcgactccagggatcgggcgcacagacaaaacgaagagaataaagccgatgatggcgaggatgcgtcgcctctctgctcatgaaaggggggggggtgctgtctctgtgtgcagcaacgccagtgtacgcgcggctctcaccgtatatcctggagtatacaaacgctacaaggcaaggtagacgcttgattttcgtctttgtaaattgagaaaatctcgccacaatcaggctgcttcgagagctgtgtcttgggtttctcgccggctctcaacattttgtctcaatttttcacgcaaattccaggatgagacacacaagaagcatgagggccgcagcgcgcgccgcgcgaagaaacgaaaaagctggcgacagaaagctggcgaagactctcaggtttgaacgcggacagcgagcgctgtttctcacgaacggcagagcaaaaaatggccgcgcgcgtggaaacaatgaagatggtccagaagaaaacgaattcctggagtttgcgcgctttcgttcggcgtcttctttcttcgctgcggtggccctgacttccgtggattcttcggggatttgctgctctggcagacagctagagcacgtcgtttttccggatggttttttccagaaagaacatcaaaaccaacaaacggaacgggtgaaagttcgccagactctcgccgtgagtgtcgagactctctcacgcacactgacgcagacgttttcttccccgccgcgccgtgtagttccggagaagaacgcggaacggaaagagaggaaaagaacgaggaaggtcgagaaaaaaggaactgaaggggggcgagggcgaggctggtctctcttctgtctcgtctcttctctcgcgaaaaaaaaggagaagacgcgtcttcacactcccttcagttcctcctgtctttgctcaccgcagcttgtctgagaactgaaggaacaagggggcactcgaccatcctcgatatgtcactcacgtcatttcttcttcttcctccacagtctttttttctctccctttctcccccatcctgctgtattgtctctctccccaggcctttctccttctcctctttccccaggcctttctccttctcctctttccccaggcctttctccttctcctctttccccaggcctttctccttcttccctcgattatctccacagttgggttgtctcgcttctccgcagtttgctcttttctcttcgttttcctcaaccgtttctccgcgcgttgcctcctcacagtcttcttttcttctcactctgctctcgtcgcttcgatccactctgtttcacga

SEQ ID NO: 3364 - DNA, 1541 bp, Toxoplasma gondii
  source 1..1541: mol_type = genomic DNA
aactcacactttcgtacttaagttgattatcacagacacactcccacaaactcaaccgtatgcagttgagcacgcacatggacagttatatccatatagaatatacatatacgcccatatacatatatcaatgcatatctgtatctatctatctacctatgtatacacacatatatatatatatatatatatatatatatataggtatttttatgattagatgagtagatatctcggtcgtatttctatggaaagaggccggaagaggtgccatatgcctctctcgggattttcggtgtacatacagctgggtgaaggggcgtgaactatgaggaactttatctgtgaggccgaaatcgaaggcgaaagcgccggaatttctagcactcaagggacgaagagacacggggagagcgatggctgtcagataccaagactcagggcgcaagcgttggagagagcgagaggcttgagggaaagaagaggaggaaggaaagagcagggatgatgttgcggggagtgacaccggcttttcgcagagtagctgtcactgcatgcacatgcacgaagaaagacccttgcagaaagactcaccgctggagaaagaaagcagtctggcacattgaaaggaaaaaggaacagcctgctctcgattcgtctccttcgttcttctgccttatgcacggaggccgcaagcgctgcaagaaaacaacggtcggccgcaggactacggagagcagcctccgcagagaacaggagcgaggtacggagggaggagagagaaacagactggcagaaagagcgagatgaagcggaggcggaaaggcccgagagaggaagaaaaacgagcgtcggaggagtgacgtcgaaaggcgagagaggcgggaaatgcgagaacccacaaaacgggggaaagtggcagcgagacgagattcgtgaacgtgaaaaaccaagtagctcaaaaaaaacttcaatcgaaaactcatctccctgtatccgacgcgaacgctttgcatttgtttttctggagactcaccgcagaaaggcacatgcgcgttgagactaacgcgaatgcatgcacgcgactttttcggctcgtcacttgtgcacggcgaacagacggtccagcacatcgcgttcggtttctgttccagacttttctttcctgttctcctgcacatgacgctgtttctcatgattctcactagcgtgactctcctcgtcccttccactggtgtgcgcctctctggtcttttttgcttctttctgcgcatgcccgctccatcctccctaattcgtctttccctcgtcgcgctgtctttccgagattttttgcgtttccggtctctcgactgaggtgtaggtacccggcgtgtttcctcaagatttatcgagtcgttttcgccaattttccgttcgtctcgccttcctgccgttctcgcgttttcccgctggcctcgcgcctttccccttccgtccggtcgttgcgctcctcgttttccgccaggctcttggggttcccggcgccttctccagcctta

SEQ ID NO: 3365 - DNA, 3506 bp, Toxoplasma gondii
  source 1..3506: mol_type = genomic DNA
agaatttattgtcaggatgataaactaacaaagtggagccgagttgggttgtggagaagtgggagcgttggttgtctcgctgcggatcgcatccggaactgttggcatcctgtcccctctatccgagataactccagcaggagtgtggagcacatcacgtcagagaagtcactggagataatgcggtgtgttttcggttttctccatcgtgtttgttacaggactccgtgagggggaaagttcacatgatcttgggggcccttaccccctttttgcgagctctcgccaccctcgagaaggagatctctgtggcactcggaagcgatgcggcagtcaaaaacgagcgaaagctggaagcgaactgtgaaggacagtcgtgcgcgtatttccttcgcgaaattggcaacaattgagagcttttcaaaagaaatacgatgctgcagggtgcagtgcaacacttcgcgtagttgtggcgaagggtagacaattggaaggcgtgcggaagcgtgaaagcagttctgcagcaataaagtttagtgagtgtggagtgcgaatggtacagtaatgaattcgaaaacccacgaggagttttaacgcagtggatcattgtccactgacgtggctgccaaaagagaaggacagcgacatacctatgtggttgaaggcccagaacagggtagtttgcttttccgtcgttcccgagaactcttgaaatacacctaaggaaagggaactatttcgcggtgatactggacgcacaggcgaaaggtctactgatacggcaccgtgaatccaatgcgcgggcgcgctcatctctccgtgcgagtagcacctaacgctgttacggagacacagatcaagtcatctttttcttgatcacttcaattggcacagcattaagtaagaataaactacgggatcaatatcggaaacgtatgttggcttaaatgttcacccgcatcctgctgaagatgcccagtactcgatgcgtgtaacagaaaagtgagccagttggattgaggaaacccagtcgtttactgtgtgatctaatctgatgcagactcaaagcagaccttgtccacgctgtgtgaggcctccgctctgcacgtgggctccaagtgcagcgtggtagcaggttactgtctccgcaagaaacagacagaggcactgtggaacgggcactagaggcaatagagactgcgcaagatgggcagcgacggggtctccttctctgtattgtgttgccagggtacttgtgcaagtgaaatctccatttcaggtatcatggtagtttgaaaaatcggagaaggccaacagttaccttccacttttgttgtgtgtgacgttccaggtatcgacggagggcgtcacgacctcactcctcagccgtcagttgccacggacgggcgccgagataatggagaacaggtcaggtgggtttgccagagtgttcgtttcttttgcaacacacttccgtcccgcatcaccatgaaaggtggtcaacgcagtagaagggtcaagaaaaaagagttggctggtggccgttcaatgcgacaccatggtcagggtattttgtgttgcggctgttttcggcctgttcggcgcaactcgtgtgagtggaagcgtcgacaacgggggtcttgatgatccgaacgcctcacgcatggctatccaatactggcgtgcttgccaccgggggagcgggtcgctggtcgaagacattaatattccttacgatattgcggatcctcctgagctaccattccctggtgccgagcttcagtttgctttagtcgctcagcgccacggtacgcgacgatcgcagtatttgtggtcgaagtcgccgtacaacaaagatactgtgactggtcagttgtcgatttaaggcgcttacaagcaccatgtgtcagggattgaagtccgtcgctactttcagatgtacatgcaccacaatttccttgagcgcggggtgagtcgatgccgcgacaatgttcttcgtgaggtgtgtggtttgcgaccttgagcgcgagtgacagtcgtttggcctcaaaagagagaacgctacgccttcggggtacacacacggacacacaaacgatactctgcggcgagaatgttacggaaaggtgaagcgtaaatggattagaagcttcaaaacttagcgagaattcttgctagtgtactaggttctgtctcccgccacgctgctgagaaagaagaatgctggtcacacctcccatcaggattatcacccacgacagagtgctccgctgctctcgatgtttcccaaaacagtttcacggaacaggtgagatcgtaattattgcagagtgattgtgtgtcatccttttgtatggcgtttgacgcgtgcgtctttgtgaagtcagaaaaacaaagcagcaggttgcgggtacttcgttggttttccgctctgtgagtgtgaacaccgaacagttttacgatgacactggggggtcgagtcgtgtttctctgggtgactacagtggacaccgcaccgcaacaagtgagaacaagctacgcggtaaacaccgagaagcgtatggtggttcacctgttcagtcacaggctgttgaagactccatctactcggtgtatataacgaaaagatgagctagttgaattgaggactctgctcctgtaccggctacctaccaccgggaacgacgaatgtaaactaaaagtcgtccttcagcacattgtgtgaagcttcgtcagggtgttgactcctgtggctcattcggattcggttgtcatcatagtgtgaaacggatataatacaagactaaggcgccgtgattcgggtacgggaaacagtgaaaactacacacggacaagcttgtgcaggaagattgacaggaaagaaagagacgcccgccgcgtgtaggttgggcgttgcagtggaaacgcggatgcaccggcagtcagcaaccgaaaccccatagtctactccggtagtaccccgtccaggctactggtggcgaactggtttggcgcatctggagagctgttactacgcgtctgcctcgtgatgatccctatcgtttacagacgtcgtcgagactgcgtttcccacacctagacgatgcttcggcgccagacgcagtgttgctgggcgacgtgtgtgggcagaatgtctccccacgtggtcgtaggtgcgcgtatcacggtgcgagttcgtggggtgtctctatgacggtggttgtcaaccagttttataatttttgcggtgcgtagattcctgaagtacgttgaagtcgtccgccttttttaaaaacattttaaccggcgtttctggactccttgtactcagttctcgctagtgaactttcgtttcactaagtatctatcgagtcagtgcagtaggggtttccttcaagtagattgtgttgtattccggtaacatctttgcgtctcgagtgcatcgtcttgagagcatctctaattcaacacagaaaataccagcgtggttatttacagcggaacaa

SEQ ID NO: 3366 - DNA, 1204 bp, Toxoplasma gondii
  source 1..1204: mol_type = genomic DNA
tcctccttcatcctttcatcctcatccctcgaaatgaccaaaagcatacatataaacctatatatctatatgtacatatatatatatatatatgtatatatgtgtgtgtgcaccacataattacaggcacagatcacttaggtcttttacaactctgtctccataaaatcaagcaaagacatctatgtatatatatatatatatatatatatttacctgatggctctgttgagcattccggcgatgtgagaggtgcagtctcccgcgtcgttagtgaaatttccgaaggaatttccatctcgaattgccaccatgaactggtagagcgacatggaggcgtcgatcgcgatgacacgaccggtgaagctgccaggctcctgtcgcttgattgcgcggggcgcaaagtcgccgacgaactttccgaggcctttaatccccatttttttcaggaaacgctgaaatgcggtgacgcgcagaaaccgaagatcctcaaacactcaaggagcggcgaaacaacaaagaagcgacgcggtgctcttcacagactcatacacgtacttctacttctacaccctccacctcctctatagaaatagacatgcatacatatatatacatatatatacatatatctatatatatgtatatatttaaatgcacataaaaacaaatgaatctacatagagatgtatgtgaatagaactccggcgtatgttgttgaatctctctgtagtttgtggctgcgttggagagacagagtcggaggagtgaggagtccagacacagtggctggaaagcaggcgagcagttgcacaaaagacagagagatgtgcagggagatctccctctggcggaaaaaaggcaagagagaaaatcgagagagggacaaagacagaggcagaagacgaagaaaggagacaaagagagacgcgaaaagaggaaacgcgaggcgaggaagcgcgagacaaagagagacgcgagaggaggaagcgcgagacaaagagagacgcgagaggaggacgcgcgagcactgcgtttcgctgcactcttccgatacgaaaagagaaaagaagactgaaagaaaaagaagagggagaagagagaagaggcagccggaatcgaaaaggaaaaaagcgaggagggaaccggcggcgtctgcccgcgcgggtgggtgtggcggggagaaaagtcgggggtgtgttca

SEQ ID NO: 3367 - DNA, 2065 bp, Toxoplasma gondii
  source 1..2065: mol_type = genomic DNA
gcacagttgtaatctaagtccagacggtgagggttaaaccctatgcatgacgtgcctcggaacgtcgaaacgtcagatttagcctagttcctcagctcatggcatcctctgcatcagttcccgcaaatacgtttggtgtttcttaacgcgttagacggtcagaggataccgcagcagtctcctgtgggaagggaagcgttggaccagtcaacaggaggaacacgctgacgacaagcacgggtgcgctactgttgcttcgcatgtgactcctgcagcagctgccaacttcctacttcaaatcgcagtaatggaatgtaaatcattcgctggtgtgtccacgtgacgacagatttaacattgtagagggtggcatgttcaagtgtgtgtacaccagagagcacgctgctaggaacccgtagctgccggctgaccgcagagcaaaggtgatcctcgtttatggaactctcagcttattcgtccacgagtatagaactaccgccccttaaggttatttgactgaatgatcaaacaatgccgcggctctattcgttcgtcgtcgcatgctggctggcacaaagttcgcgttcggtggcccacccagtcgatgatattgagccagaagctgagcctcccgctgtggtttatgagacctcggatccccacgagtgagtcatgttcatgagcggaattggctaagcggaagttcaaatgaaaaaactgttgtccagcacagcgataggctcgatcgaggcaattctgaagcagcaagtacaggataatgtggcagcaaacaaccgagatttctcactatcctcagggggcacaaccccttacacgggcaatgcagcagctgctgccgatgaggctctgaagcaaatactgacagcaaatgaacagaagaaagctcgtgttgctgaagaacgcgaccacatcgacgaggagcgtagtcgccattcacgccgtatgatggagttggaggacaagctccgccaaagcctagacaaacttcaagaaagagagaataacatttatgcgtcagagcataagcttgaatcacagctggagaagggtgaaaaagaactgaaaaatctcgatcacagagcggcggaaggacgtttcctccacaagagaatacacaaaagtatcatcgagggagaagaagggaagctgaagtcgaagtaccatggtcgaattcaccctcatcggcatgaatttgcgaaatagaaatagtcaaaagtgcagcaggaaatggtatcaaaaagggcctttgaaactcgtggattgttacgtcaagccaccagtgccatgtgcatcgaaggcaatgagaacatcttgtatagtgctcgcggttatcacttatggggcttcatgaaacaaagtgactacggtggattgaggtagacaaaggacctgtctttttttctgttcacatggacctgctgccaccatgttgcgccgggctgcagacagtttcagatcgctgctacctttgtccgtcggctgtctttattctctggaggatatctaattttccttttttctgtcgctggccggaggacagcacgtgtcttctgcgcgaatgtgtttgcccggagataagggtccacggggtcttagcgtcgtagctgcatggcggacggcgcaaactctgcacgcattctactgaagaaggaactgcatgcatattggagagagctgttcgtctggaaactaaacgcatgtgccttaactgccttcaacagagctccgcaattctatacgcataaatagagatggcagacggagtcagtcagtttgactcaagccatcgtaggtaacgttgtcggccgagaatccgttcatgaattgaaaaacggagaacacttccctggtgaggcagcgttagtcccccgtgtgtctctacggatagacgtacaatcttcccacggattctatactgttttctggatcaagcaggaatttgtgattgttgtcccttcgtcttgatgagattcaccccaaacggtgaagcatacatccaggagggtcgtcgcatctggggggttgactggcggtgagaagagaa

SEQ ID NO: 3368 - DNA, 2006 bp, Toxoplasma gondii
  source 1..2006: mol_type = genomic DNA
caagcgacttgagcgattaagagcacagggagaaacgaacgaaattccactgagatctgcgcaggaaaaatccaggtttcttactcaagaaacttgcctgttcaacgtcagattcgccaccgagcaagagagctccggcagacgagctcttcccagacgcgggtgtgacggccgcctccgtggccaggcgcctcagaatcgtcgcaggttcgcgaaggggaggaaacgccggctctgctcccgcgccttctttggcagccaggagcacgggaagctccgcctgtacatcaaaacattagtacatcgaaaacggccgataagacagagcacatgagacatatgtatacataaatatacatacgtaaataaaggcggaggatagatctgcaaacacaaattggtggattacagctgctattatattcgtggatggccggatgcgtctataaagcaagaaaatatagagggaatagtcgtacagccgatgcacagtgaggcgcacttttcgcacgaatagtggcagtgctaacagacctcttgggctttcaggtacgccttcgcctcattgccgagaaagcagagggacagagagagcggcggctgtcgctggaggagacacggctgaacatagcgagccaagaggacggtggcgagagccgcaggcgtcgagtcgtagatgagctccatggtagctgagcgaaaggcacggccggaacagagcgcacgagaaaactgaagagaagaggacgcaggagaaaattcaggaggaaagaatgcaggagaaaactgaagaggggtggacacaggtgtcaagagagagagggacggtgacgcaggagaatgctcatgtaacacgcgagcgaagaccgccaaagaagggaagaagcgcctcgctgagcaaaaggatggcaggaaccggaggtgacgatggggacggggaggcagtacgcgtctgacgaggggagtagacaccagcgaagtcgcgaagctcaacccggtatccatgtctggacgatgccgggtctcctcgactgagtgtttttcttttcttacgggaagggaaaaaggtgacgtccacagaacaaggtaaaggaaaactgccacaggagcttggctggtctctcttgatgatgcggaaaggaccgactgatggcagcgcgcgccaaagctgaaagggtcgacaaagaggaacgacagacgggtagagaatgctgctttccgataggaagaaagggatggcattcgaacgcaaaagcgacgcactttcgtatgttgtaatgctggtgcttccatcgcactcggccccatggttccagcccgcgcatgcgcatgcgcaagacaaagatgcatgcttgcgaaaatccgccagaaaatgttgacgaccctttgaggttaactgcccaaagaagaccacaattgatttcgtcctcgcaaacgctctggctcttgatccacatctctgttaagtttatcgctgtttattgcctcccatgcggcaagtctgccccacggggactgccttaaccaaaaagttcaaggataaacaaggtgtgtccgattcctctggttttcctctcgttcgtttctcgtcctggaaggttcctttaggcgactggactcactcactgcgtatcattccctcccattcagagaatcggttgaggtcagaaatgtcgtattcgcacggcgttgcgcggtggcgtgtgtggtggacttaaaaaaaggatttcctctctgttctccgtaactttttattcacgcattctcgcttctcataggtgtcacattcatgtttcaattggaaacctggataaggtaagctgttactgcatcgacgtttcaggcactattcgtaaaccgtcgttccacttgtgttgtaacccgtaatcccacttctgttttcgagattccttcgtatagactggtcgtgctgaaggcggtctgcgagtcaattgcctcctaaaacagaggtttgtcgcattttgttcacctaccgtcttcttcca

SEQ ID NO: 3369 - DNA, 2673 bp, Toxoplasma gondii
  source 1..2673: mol_type = genomic DNA
tttcttgacaagtctggctacagaaacgcaggttcttcacccttcatcgcgtttttttgccctctcttctgtgtttttctggtcgctcgcactcacggcgacccgacttctcagatgttggtacgacccgtgtgtcatcagcctggggatgatcatctgaaacaggccaacggggactaccacgagcgtcttcctgcgagctttccaccatcaatttagagcttcgtgtttctctccctgacttcgttgtctgctttctcaccctccctcgacgttgattgcgagtttgtgcggttgcacctctcccccaacttcagcgctgatatctgttccgtcctctggggggagagactggctcttctcatcggagggcgttccacgccccttcgcctcatgcagttgtcggtgtattttcgcggcttgttcgtcgtcaactttcgaatacacgtggagatacaagcgctgtcgcgggcagatttgcttggcatccggggcgcgagccggggccggcccgctggtttctttggcaagcaggcagtccaggggaagcgcgtcgatcgaagccgcgaggaacgtcgacaagttcacaaagaggccgcacggcgacaacggactgtccaagctgagaagacaggcgaaatcacgaccgcggctggcgaagatttccgtttccatgaaagagtgggactcgttcagcaggcgtttctgcatctgggtagactgcacctatctgtacagccttaacaacgcgccgctcgggaaactacccgtgaattcaaaaggcaacaaaagaacgcaacaatccgctggcagtaccatagctattcacgcgctcgtctcgatgagcaactcgtccgctgcttctgctgttctccgtaaatgtcttttaccgagagcattcctactcgccttctgaatcacggaagagcattcgcccgcgcaggtgtatatccccttggcattcgctggtttcctgacctcaacggctcacttatcgggtgcacataattaacggaactgggcaagaactgatcttgtggtcgcaactacctgcgtgcctcgaactgtcaagcggctgttcacctgtatgtacactgcgttttgacaaccgtgtccatgcaagtcgccacgcgcgcgtgtcccagtagagtccgcagttccaccagaagatcctcagtggcatcttgaggcgtcgtttccgcaaatgcgccaaagtacggggaaaacgggagagttgcctccccttggggacgtggattggccattgtggagtcgcgttccgcgaaaaagaagcgtttgcctgaaggcggtgccaaaaaccgccgcagctacacaaggtgactgcggaatgcagggtgggtgtcttgccgcacaacggcttggccggaagaagtggagtcccgtcgttgtcgctgtccggctggcccagtccgggtttagtggaagcgaaacacaactcgctgcgacaatttttcgttcgctcctctggcaaggacggaacgcggcggcggtgcgctttgctcgcaacgcgcgtcaagaaccggcgaaaagacaattttgcgcgggcgacaatcacaacacaaacgccatcagtctgaggaggacggaccgaaggtgcaaaagataagagcctcaaatcaggtcacagtgcagaatgaagcggtgcgttcgagacgcgagacaccgattctccaaccgtgctgccaccgttttgaggatccagacttgccacactgcacatgcgcaaaaacgtcacatgcatgaccctgtggcctggtttcgtaagattctctgttgcgcgcgcactcaactcccgccacaaaggactacgcggaaacggtaaagaaactgctaagacatgcgatcgcggcctctcgaccgctgcttggcaaccgcagtgtgccaaaaccatggggaaatcgtgcagaacgtcagtttccaccggagaaacaagtcgcaaagagcgaaatccgcaactcaagcgcttactcgagctcagaaggcgccagaggggtatgggatacagtgcgcgggttcaaggggtgctttatgccacggcaccccgatcggtaccctgtctgtcgagggcggcaccgagtggacggaacggttgcacggcacaccacctacgaaagccgagaggtcgcaggccttagcagaaaacagtttttttaacgaacttgacagagccccacgatctcacggtctccgattgctgtcacggcggctgggaggtaaaaccaagcagcgcaggcggagccctgttttacggaaactccagtttctccctctgcttctcttggaccgcgaacagttcacgattctgttgccacttttcttgtttcagcagagctcgagggagaaaatttatcggctggcaagggaaagaaaaaggtttcatcggcggagcgtgcagggcttgagtcgacgctgtgggggtcgggagcccctcatccgcgatccatgcggacacctcgaggctgttttgtgctcttttctgttgttccgccatcatcatgaagcggactcgaattctacatcgcttactgtgttcgatttgctcggtagccgtgttgacgcactgcgcgtgggtctcgagaacggctgccgccgcagagtcgagcagcagacaggaagccgaaggtcggcacacggtcgacggcctgtctacaa

SEQ ID NO: 3370 - DNA, 2559 bp, Toxoplasma gondii
  source 1..2559: mol_type = genomic DNA
accaatacatggaggcagaccacgttccgtcttggccgagacaaggcacctcggctagttttctaacgatgttgctctctgaggacgaaagggcggatagagtctcaccgtactgtgtactctttctaaactatttgaaggccggtcgtggcgcccaagcagctagaagacgtttgtgttcctgtgacaggaagaccgttcctgtgaaactggcgttgacgggcagaaactttaggaaccaaatgagtctctgaggtgctgcagtcattacagaccggttttataccgttgccgtttatagaacaaacaactaaaagtgttgggtttcagtatcatacgacagcaaggctactccacatcagtcgcgttcttgatataaggcaaactcgcaattggctgtggaaaacaagcgatcgccgccatctccacaaatgaacaggaacagggaagtagtggattcagccggcggagcaaagaatctacgctgcccgtgcagagtgtcatggacgaaacaatttcgaaggtatttggcgtttcaatttccagaagccgcgagaatggcatgtgttgagagttccacagtgctctataatgccgtgttccccggcttctgactgtgattcgtatcccacagtactggcgtcagtgagaatgtaaggctcacagcaatcgccacagatcgcttccgaagcggtacgtttctcaaaagcagccaacgactttgctgaaacggctttcgttcccgtaagaaagccgtaaattcaagcagatgaagcgtgcgatagattttctcaagaccgctgtgttcagctgcgacgctgatggctttgctccatgatgtgcgtgatcggtgtgagtgcacggagaatataatctcctccttaccatcattattctgcgacgctgtctgagaaatacagaccagtgaacctgcgtgtgatgccaccctgttgagtctgggtattttccaccatgtactgtcgtggtcgaatcgaatgaacagactctagaagacggaggttcctgagtactctcccaccgcgagagtgacaacgtctgcacttcggagtcgtctgaaaagactagaaaaggcgccgaggctctcgatgacaacacgagtctagcagcacacctaacggattcgatatttcgcgatttaagttggattctcgtgatcgaaaagcagacagcgtctctcaggagagaccaaggcaccatccagttgtgttctgcagattgctcacaactttgcgaagagaagacctaactgtgtgtacctggttctcgggcgattctcatcgggtggcattaaatgttgtgtcgttactttccagaggtgaggctatttctgtgcgatggttccgctgaaagcgacgaaattgacgctgcaacgaacatctgtcctcgccgttctccagaaagaacaggccttgttcttttggtctcgtcttgtgtggagaggagcccgcttttcctgcacacctctaagagaaggaacaaaaccgtgcgctggcctccgttctttgcgcgttttcagtggagaaaacaccccgtagatgcaaacgccacggatccagctgtgtcttttctcaccttcattctatttctaggaatttaccacacctttttccgtgtttcagtgactttacgaagcttcgtgggtgtttcaccccgggatccgacacaggacaccgcttgcaacggatccttcgcgtctatctctcgcctgttgcttgtcgctgctcccgctaacttggcacgcttctctgtcgggtgctgatgatatactgggggatgagaatcggcatcagctgaaaaggattttcgttcgagttctgtgtcttttctccacttcgtttcttcgctgctggaccacgcaaagtccacataagtgcacgtattggaccggttgaaatgcccggcttaacagttgggcatctgtacgtgaaaacgctctgtgcgcgtgacaacaccgacgaacatctgaagtgtttgaacgtctgatgactgataattctggagtgaacgcgctcctctgagatctctggagaaaacttcccttgcgtttgtcgatctagatccaacctctggggaacgacacacctcgtttttgtttttctttcttcgaaaaatcagtgtgccctccatgtgcaggtgcctttgtttctctcctgctaccttcagcctctcctacattgtgtccctgtctttcttctgcctcgtccaccaagaggtttccctgcgttttgttctccatccccgtccactcgctgtcgccacaattgccttacaaacacactttcctttgggtttgaaaagcgcgcctcgctcattttcagtctagattcacacaacggctcccgactccgcgacgttccttcccaagcccattttctgtcgccgtcgttcccccgatatcaccgcacgcgtctaccttccacagaacttctttgtgttctcacgtctgaacgcggatctgacttttcttccagacgcgacggagaatccagtgacatctctagctcgacgcagccgcttttgctttctcactcgcgacaa

SEQ ID NO: 3371 - DNA, 3018 bp, Toxoplasma gondii
  source 1..3018: mol_type = genomic DNA
ctttcccttcagcgcctccctcccggaagtcctctttgtccttctcgcctgcggcatctgtcacggcgccgacgtccaccttactggctacgcggccttcgtgttcgtccgcgaggagctgctccttcgtcggcttgggcgttgccgccagcgaggccgagctgtcgagcgacatgagctgatcgctcacgcggcgtccgaagcggctcggcccgtctgagtccctcatcgttctctggggtgaagttcgcgcaaaaacgcaagccgcgggcgcagcggagactcgaggaccacggagtgcgacaaaagcaaggcactggggcgaggagagactcgcggcagcggcaggcgaggaaacaggcgatgcaagcgaccgtcggggagtgaggtctcgcaaggaagagaagtacgggagagagccggggaacgcgagggaggaggcggtgcacaagacaaggcggagaagagggcggcaggaaggacctgaagaagagaagcgaggaatcaccaggggcaagggggagaggggcaggtggggggcgggagatgtgacgcagcggagaaaaggagaacgacgaagagagagaggcccaaaaagaggagagagacagggaaaagcgagaggggtgttcgaggtagggaagaaaatgaatggaaaacacgaggctggaggggacagcttgcctgtgaagaagatgcagaacaagagatcgggtagagacgtttttcggtgaaggccacagacgcgaagtcccctaaaaacgggggggaaaacaatctgagggagaaactgccagaacggagtcgcagacgggaacgtcactgcccgaaggctaccgatgaagagtcaccagcgaggtcagcaaacgcagaaacggaggaaccggcgacggaggccgaccagaggcgatgcgggaggaagcggcgaaaaggcttgtcaagggaattccttgcgcgtgcattcagaacggcggaaaaggcagacctgctctcgtcggcttgcgttgtggggcatggccggccaacacagcccgaaagctcgaaatcggcgcgggagggagacgaggagagacgaaggaaatcggaaacaggtcttctgatcaaggcgaggcacggcgaggaggtggagtgaagacaagaggatttacgaagcgtaaaagtgggcatcaacacgcagaggcgcgacacagacgaggcgggacgacgcggcgattcgcggcggaagaaatggcggaaacaggtaccagaggaacgcctgacaagaaacgcaagggtgaacgcctacgaaaagagtagggaagacaacagagatgtggcggcgccttttctctcggtcctccacgacttctcttgacaggcacaggacccccctacactttctgcgctcgctgtgcgcatgcggcggcgagtcctcgcgagacgtcgcgctctgtgggccaccgcgagttgacgcgcgcgcggctgcggtccgcgaatctggcggacgaaacgcgactgggtttagaggaaacgacaggaatctgcatttcttaccgggcgacatgtcgccaactagaagccagagtgccatagatggtcctctcggaccgctcaggttgcggaggcctgagaggccgtcctccagggggcaccctcctggaacacgaaaaatgaaaagacagacaagacacacctgaaaaaccaactcgcctcggccgcagaacgcgttctgcctctcttttcagctcggtgtgagggcctgcacccggcgcgagccacgcagacgcctcaagaacgaaactgctctctggaactgcagcttttgagctgggttttcccctgcgagcgcgagtctcgccgctccgcaaaccccagtcggcaccgagaacgcctttggagccgaaactcgcggcacaccagcgaacaaagaacgtttgctgctgtgtgtggcggttggtcaaactcaggcggccgctccgccaggtattgtcgaggtgtcgatacaccccaggcgacgctgcgccgaggcggacgagtgagctctccagcccgcaaagaagcgcgaagacttttcagagtttgcgagacttttcttgccctgcacgctgcatgcgcgaactgccaaccgtttcgtccaaagaatgcgccacgaacggagaaccaaaggaaggcagacgtcgaaaatcgaaccgcagcttacgcgacggtttcgtctattgggattccagaagggaaccgtgagactccgcgtttcgaacgggaaaacggcgcggacccctcgcgcgcctcttgcttccagagccccaaatcttcgagagaagtcccgctgaattgccttacctcgtgatcagttctgttcctttgccttttccaaggtcgctctttcaatctgtagcccacttgccacggccgtcgggctgcgggtggccgaacgcaacttgccgggagggcgtcggcccgtttcgcctcggtcgaccgcaagactctctagctcgagcagttgttgactgttttccatgtggactcgtgagtccagaaacgacgctcgccgccggaattttgtcctcgtttcccgcgctctccaacgacagtcccccgttctgtcaacccaagaaggactgggccagacaccacgcactgccttggcacgcggcgcgcgcacctctgagtcactctccctcgcgtgtagcccgcgcctcgctctgagaaaaggcatttcgatctctttcgtcgcggaaaggccttccgatcggcaggttacctcgtggactgtcttgcctttcttccctcccagtcttagtcttcttcaaagcagctctcgcacactgctgctctgcgcctgctctcctcgtcgccccgactgctgtgtagaggcttgttggagtactggcgttcttctttgatgccgactattaaaagactttgtggacaccgggcagaacagggccaatgaaatccgcttcttcgtgactgtttctcccttgtttagctggctctctccacgcgttcgaaggcgcgtctcctcccaacttcctacca

SEQ ID NO: 3372 - DNA, 1983 bp, Toxoplasma gondii
  source 1..1983: mol_type = genomic DNA
gggaagagaggacaggaagtagagagaagagcaaacgaagagagagacgggagagtggagaggagagcgacgacagggggaaggactatacaaatccccccgtcagttacgagaggaggagcaggaacgcgtcctcgacacttgctctccgtgtgaagacgcgtagcgcttcctcttcttctccgatgttgcgtcatcggcgccatcgtacaggaagcatctcgcactgcggtgacggttccccaaatccttgtgtgtattccggctgactcgtcgtgatgagggacagtgtcaactcgcatcacgcccgttgacaagaaggccctactcaccagtcggcacatttccattggagtctgcgagagggccgctcaaacgctgcgtgagctcctttatcagttgctccttctctgcaacttgctgcggactcaggcgctcttccccgccgtcgaagaggagaggcaaatcgacaggcttctctttctcggccttgtcccccgggtgtgcagcctccccgggagacgcaggcctgccaggggtcgaggagaaggcgcaagcgagtctgagagagaagtcggatccaccgtcgcccactggcagagacgaaacggaggggaaagcaagtgagtggggagcgtcacagaagacagaagcagaactcgacgtcgtcaacagactgcgccgcctccacacctcatgcctcccagtgaaaccaacagacgcagagaagcaagacgaacagaaacgagtagaagagacaccagaggcagagacacgagaggaagaagaacaagaagaggaagaagaggaagaagggaagaggagggtgctcggaggagacagcgaagaagcgaagcgacggccggagacagcgcgtctgaaacccaggaggacggagcctccaggtgctggcattttggcgacttcttggcagaaatccggggagacacacggggagaagacagacgcgagtcgcgggaaacgacgagacactggaagcggaaggagatgagagtccgaagaaaaagacaaacgcgcgtttgtctctccctaaagagttctcttcgttgtcgtttgtcgtgtcacgatgcagtctcacgacgacgagactaggaaatccgctttatcgctagcatgcaacagaggggtctttcccttggaaacgccaagcgtcagaaaggagagactgcagtctgcaccggcggcccgcgtgtggaggagccgcttcactttcttttgcagagtcttttctgcaaatttaagcaagcgtcatccacaactcggggggtacagagaccagagaggatgcggagaaaggagttgtctcttcggcctgcagagcagccttcgacttttcgcgcgaaagccccacaggcccgtcagcttgccgtcgattcttctcgcgtttcttagtttttcggagaaacctctttccttcgtacttttccaactgtcttgtgcgtttcgcggacgcaagaagcaggagtgcggcgccttgcatttgtgatttccggtcttttctcgaccaagtcgctgctccgagtcacagagaaagagagagaaacggagacccagcagcgcgagagcgtcgagagcgccgattggcttgtcgctgcacagtcgagaaattctggtcacttcataaaaacctatttcaaagaagaacggggaaatagaagaagaagaagaaggagaagaagaagaagaagaagaagaaggactgaggagacagaggcaagtgtcgagggcgaaagaggctcgttgatggagacagaggtcataagaaaggcggagtcagagtggcacaacgagaggagctgcgactatcttcttcggcttcccttagatttgaacggaacgtggaacagatcctcctagacaaatccttttgaagtcccaagaccctttcctctcaacagaggagacgcgctgctcagtggcggcaaaagcactcgaagctcaaggagaaaaacttttctaaaa

SEQ ID NO: 3373 - DNA, 2097 bp, Toxoplasma gondii
  source 1..2097: mol_type = genomic DNA
gatccactcactctggcgtctgcagatcagacgaaatgtgcaattgctggaaccacggaatcggcgaacgttgcgcttctctctttccttctccccggtttagaaaacggaggagcccccgtggaaacgagcaagaatcacactggaatcgaaacatggccagcaaaagttgattcggtgaaacgcatgtagggagctttgggcgtgtgtgtttcaccgctgcaactcgcttcaccgcgaagcggctacaggcgccgagatccgaagacagcgatacctccagtcctttctaagtggtgaaggcattcactcaaagggcagtgaagcattgccgaggttggagttcactcgagcaaagctgaggtcgaatccgcagtttttcgcaaaggaatgcaaacaaatcagcgaaaatgccataaacaagccctgaacactctcgtcgagtccacaaatgtttagatacattgatacatctatcacacatctgtatgataaatatataaattcagatatatatatatatatgtatatacatctgctaattgtctgtaatatatatatatatatataattcagacaattttgtatgtttatattcgtttggcggtataacgttggtacactgggacgggcaagtgaggctcgttctccgtgacagccgctttttctgttagactggcaaggacagggagagcgaggagaaagcgtgaagagagtggtgggctctcctcttccgggccatcacgttcttttcaggcgcccccatgtcgatgggtttcaccgatctcggctccggttcagagggagaaagcggcaagagtcctgaacgttttttcgaccaggcagtgccgaatgcacacgaagtgtgtgtatcaccgttcttagtctgctgagatccgtggtacagcgctgttcttccctcatgtttgcggtgctttctgtgaattttttggtttctcttgccacgcaaagagctggaaagacgcctcccgggacatacacctatctttgaaactaaatagatttccatagacgatccaaagcttcatcgaagggataaggttagatttgtctccattcgccgtggcaatgttgcctgtgccgaagttgagacaggacgttctgtctcctctctcacttgtctcttcaacgtaggtcttcaagatccttcgttttaaatcccccgcgcgaagaaaagcatgctcttcgcagctttctctgtggctcctttcctctctggatctcatgacgtcagtctgaaagaggcgccaaggcagttaccttttgcgcagtacgggagaaacctggacagtttctagagtcgacttcgcgtcgtctcaacccagcgttgcagcctcgtttcgacatggcgacacaggccagatgcaccgtttgcgcagaaccgtctgtgtcgacgcatggataaatagccggggaaaagcagagatttctcgcgacagtagtgaagtgtcgcttcaacgaaaattcggattcctggttttcttcaagaaaaaacgtcactctttctcgttcccgctgaacccagatgcgtgcacacacacagtccacgtcgcgcatgcactgcctcttgtgtagacccggccgtcgcttttttgcagctgccctgaaggaaggaaatcggcatgtctggcgtgagtgaaagtgcgactgaaagaccttcgtaagtcttttccttcatctgaactgcttcgctccctttcatctttcctcctcgttgtcctccccctgtcaagtgcgaatggagaggccgctcgccgtctaccgcacccactagtggcagactggaaaagacctctttcgatcaagtatttacgttgcacatctgtttctgttttttcgatcatctcttgatttcggctttcttcgtctctgttttcttcctcgtttcgcctctccgtccgcctgtgtccgctacggctgcggctcccttttcctcagaaggcttcgcagcccccaaccggggaagatgaaaacgcttcgcccagagtctctttgagggttcgcttctctcgagtccctcttttccacaattatttccgcgtctcttcttcttcctctctctcctcgtcgcagaaa

SEQ ID NO: 3374 - DNA, 2723 bp, Toxoplasma gondii
  source 1..2723: mol_type = genomic DNA
tcacacttcattcacgcaaacctggacacggatattctcatcagtgaacaggaagaagaagtggggtgcacgcgaaagccagaagagctgtacgacatcatcgagcggttttgcctcggtcgccgacgcatcgaactttttggccgagactggaatcgccgagctggctgggtgaccgttggctgcgagttcggcctgaccacgttcgatgccaagacgtaggaaaaatcggggagggaatgaggaaaaggttgtgtataacaaagacgcagaactaggaaagctggtggaaatgcatgtgttctgggtcagacgaaaggcgttcgccagtcgtcctcagaagcggaggtcgcgcacgcaggtctggggaaggtgcaggcgagagtttagagagcgtggatccgactggcacaatttcggcagccaaccatacggattttggcgacgtctgctgggagtctgtttttcttttcaggtatgcatcgtatttcgatggcgacgtggcgtggccagaagcgacggactacatgggcggacggtacgttggaacgatgcctgagattgaacagctgcgcccgaagtcgccgacgaaatttccagatcggagtgcgggaggcacttaggggactttgaccggtgaaacgtcttgtttctcctaaggaagggaagccgaaacaaacaaagttcccgtaccctcgcgcaacgccagcgtcaagaactaaaagaacggagctagaccacggagccaccgagaccacaaggtgtcacattttcgacagtccttgacgagaatctccaaggcgcatgacacaaggtgaaaacaccgaagaaaggtgtataaaaggcatctgtcaaggacagcaatgaacttccggaagccgagctctatcgtcgcatcggaaatgcgaatgcacgatactagcctgtccagcatgccacacggatacagttgtgcaagcgttagaacggacaggcggtgtttgtcggagatagtgtctaacgggtttacatgggcacttttcgttagtgatcctctcttgctgcagcgtaccccggtctagtcaagttacgaaagtcccggcggtacgcgtggtgacactttgctgcgaataaagtgtacgctgaaagtgagaagtttcggacgaaatcagtcactgagacgctggcttcaggtgtggacgctgcgtgctatccagacagtgtctctgtggaaacgcagcgtttctctctcagcttctcttcgtacacggaaatttggttttcgctgaacaggtgtggcttgttcacgagctacagcaagtccaccaaacagtcgcccacggcagcagcttctgcctcaaaggttgaaacgtctcacataaactctgacgcttcacagaggaaaagcctgtgaccgaccgcacacttggcataacaacgtcgaatagagcactttgaggaaaaaattggtaaagttcaggcaggcaggaccaatcagacaggtgaagctagactccttgttacacgtgatatagtgagactcctaagcttctataaactacctttttctggggtgtcttttgtagtctggagaaaaaggggatctgcggggtagcacgtgcaaatttgtacaggcgttgaacacccaattttctcctgcctagaccacaaagtatcacacaactcattcactgtctcttcttatcgcacctgacgccaaatacgtcgggcgccgagcgactccagcagtaagaaattcatgttcggaattctgatttaccgattgtgtaagggccgagtcgcctcccctaccgttgaaagagattcagttagaaacttagcctctgagagacccatacgagcgctcaaaatgtccttcggtcagtttcttatcgaaggaagagccacattcaacaaggccaacatacaagaaagaaagcactacaactgctgcgagtgaaacgcctgccccataccttgcccgcacaccgttgttcggggtcggcgtttgtgcttttgaaggtagcctcgtcgtgtggttttccttcaggacactgcgtcccctcccttatacagcgtgtatggtctatcatgagtacccgcagcttgtgtcgcttctcgtttcctgcagtgtctaccgtagtcagctactatttgtgtatacggttagtcttctgaacgcagcgaaggatggctgcaccacttcaactgccgtcagcctgtgttctgctggatgtgaaactccgatgatgtgcgtttacggactttttttctcatgcctctcctttgttccctctcccacttccctccctctgcatatcgccgcacaggggcagcacgttgagtcgcactgtgctgccattgcatttgaggacgcggacgcggatccgcacacgtacaagcgggcacttcgtttccgtctgtttcgcaatgggctacaatgtaagtatccaaagagcaccccatcatccgataccggacgcggtgcaacccatctcccaagaaacgacgtgaacgctgatagcacgagctacggtgcacgtcacgcggctgcctctgccgactctcggcacccggttacgtgttagtagatctctggaaacgccccctggacgcggaacggcggtcgcatgtctcatttgaaaaatagggtgctacgccaggggtggtcctcgctcaagtgccccgcatcgtcccagacccaccaggtgtttctgtggcatcggtaatcttgtgggagacaa

SEQ ID NO: 3375 - DNA, 2571 bp, Toxoplasma gondii
  source 1..2571: mol_type = genomic DNA
gtaacgcaacttcagagtaagacaacactttgccacttgaaagagagccttccggggatatccttttatggaaaactgtagagaatctcagctagcctttacttccagaacgagcgactctgtaccatgtgtaccactccattcaggagcttaccgttactttcgatgactatgagtgttcttggtgtaactcaaatcgaagaaacagagaacccggccgctcgtaatacttcttcaagcatctttacccaacaaatagagcgggcccttcatgtcctcactcgtctcccccaagcaaacagacctgacggcttttcggttgcctgaaacgatccgagcagcgagcactacgtcgtgtcacaggcttcactgtgagcagcgccgctgagttacttgagtacctcaaccatatcgaagggattagagccacgaaaaccccgctgtaactcgccaatatccgtaatggaacacccttatctgtctgtccgagctacgttggtacgcgttgaatgtctggaaaaaaaggcttcagccgcaattcccgctgtctcgtgcctaggaagtggtaaaaacgcctgtcctagatatgatcctccctgtacggtgcctctggtcgcacaccggcgtctgagtaatcgttttctttcgctgttactacgagggaaaacaacactccacttttatttgcccggaccacaacagatgcggctaaccccatgagaagagaacgccaagcttgacaaatgctgcttcctctcatgtttatcttggaaattgccggatgctggtgtgctgcgaatcatcaggccgacaatgacactctccttgacagaaacatcaagctccgctgcttgcccctacaattgttctgcccatggcttctccctctgccggagaagtcgtgcacaggcacttcggcaggtcatgcgtgcagatagaaaaccgacgacacgctgacggatgagtttctttttttttctcgacaagaatagcgaacgcccgcagggacaccctaatggtttgcccgaggtccgttcttccgatctttccccccgatctcttcttcgcattctttctcttattctttttttccgtcttcggaccggctgagaacgcaggagacgtccaccgtttgtttctcacctaataccacatggcggcccgccacgtgcctcgttccggacacaaaaacactccatgaaggagcttttttcccggttgattttcgttcttgacttctcgcttcctatttcttcgtctggtaacagttcgttacttcttgcggccttcaatctttgtcggtggtcgttaatcttggaaggaaagattggttttcaggtatacgctggtttctgcactttgcggatcgcgtagagcacaccgagatgcggagactagacagccgggaatatcgcacactgcgcgaaaaggttgtatctttcttctacacgggaagactttgagaaatcgatgtccttcctcctttctagaaacaagacacgcatcttctgccgctgggcccctttctgtcgtctgcttttccttcgaaggcgacttttcgcgcgggtgtcgtcgagcacacacacaccacgcaagcggcagaaactcctttctgcatcgattcccgtgaactctatcggctgaagggtctgaatttctttttgcgacgttcctcgttgacagtagtggcggcggaaaacaatgaacagttctgtcttgcatcaagcattcgcgtgtcttctgtctcgatgggtgtcaatgccgacagaggcacaccggaaacgtctccggtcttgcgtcagctgaaacttttcacacacaagagggactgaaactcgacaaagctctggacacggacgccttcttcttcccctttcctcgcttttccccctcccaaggatccttcttcttgaaggacaacatcaagcgacgaaattgccccagaaagagtgcctggttctacaaatgagaagaagttcctctgcgtaaatgcaactgcacaacttcttgtcaattgacccatatacagtgtccaacaaacaagcatatctcttcacacattcctttccctacggtacatatgtatatatgtatctgtctgtatctctgtgtatatgtatgcgtatctggatatatctacatgtaaatatgtacatgtagatgcctgtattcggtatgcaggcctgcgtctgtaggagtgtatgtaggtttgaggactctcgagcaagacaaggaggcgcaggtgaaacgcagcaggatggcagcatccgcgtgagcgaggggtgccgagacaactgagagaaacgaagtggcttttctgtggagtctcgccgacgcgttcgactggccgttcgcggctcgtcctgggtgcccggacgcaggaagccttctgtcatcatccccgcgaaagagagaccctgtaacaccctgaaccggcgatacgcaacggcggagagacgaacagagtgcagatgcgccgagccgcaactggggacagctgcaaggtcgcaggacgttgatcgcccagacttgccgctgtttccaccacgaggcgaggacggagggcaaaga

SEQ ID NO: 3376 - DNA, 4738 bp, Toxoplasma gondii
  source 1..4738: mol_type = genomic DNA
agacagttgacttcacgttgtcctcgcgaatgactccttcgctcctctctcgagcgcaggcggctctgtctcgtccatcgccctgtctctctggcgccgcgctaactgattccttccgccgagtccaccctgctgagcttctcacagaccctgcgtctccgtggagacagccagcgaccccacacgaagcagagcgagcttcagcagcggggggagattcaggagcagcaggagattcagaaacaactagagattcataagcagagagagacttagagactgaggacagacaagcgcctgcagagccaggtggcgacggacgctcagaagaagatacagaagacacagaggtggaggtcaaagtcgaggatgggccaggatgcgggagatgtgaattttgataacacaaaggagtgacagagttcgcgtacgagcaagtgcatgcaacgggcgtcgaggacgcagaaccagcggaagaagactccacagggaacacagacactggcgacacagagggagacgaggaggacgaacgaggagaagaaagagggcaagtgagagggtaagcgagaggcgcaacgagaggagaagagggaggagagtggactccagaggcagcagctgctgcaactagcgccatagtgacggcaggtggagccgaagtcgaggcggcacagagaggatgggcgaggccaaaggtagcgccgtcgcctcgagtcgtgaaacgcaatcgcattgaagtcgtgtacgcaaagtagacgcaaggaagcagtggaaacaacagagggaagaacggttcaacgacgagatgatgacagaagagatacacatgcgcatcgagagacgaaaggaaagggaattggaaagggcgacgctggagacacaggaaagagaagaacgagtcgggacatagaggggacaaggaattgaattgtgagctcgagactggaagacgcagtgggagacggccgggctggagtcgcaaagaggcgctaatccagcgaaagaggacagccacaagaatagaggatcgcagacagggtggaaaaagaaaacgtggaaaatcgaaaagggttaagaagggaaggagccacgaatgaagagagacaaaagagaaggaagggagcgagaggaaagcgagagacggccaaacagagacacagcgaacctagctgcttgcagcggagagcaggggatacagggagacgagaaggaaagtgggcaagagaaaacaggggattaaagaagaaaaaggcaaggaagaaagggtccagcaaaaaagggagaagtagaagcagaagagcctgtgagcgacacaggaatctcggcgggtcttttgcgcagcgctcgtgcaagcgcttcaacgaagaagaggggggatctgtgccgacctcgcaagacggagaaattgagacagactgagggcgaaaagattagaaaagcagaaaacacaaaatgaagagcatacgaagagtcacggggaaacgtcagcgaccgacttgccggacgaaagcgctcgacacgccggggttttgcagttgtcttttgcgtcacgacaagcacgaaaccaatccggcgaggaagccaggatcgtcaaaaacaagaaacaaaccgaggagacgttccgagtcaaatgcgagagacaaaaagctttttgccactggaaaccgctctgacctcgtagcttgcgcgtgtcggctcggcagcgacagctaatgcaacgtttctgcgcatgtatcaaaaagtggaacagagtggaggtaggaaatactacatttaaaacccgatcatagatcaaggaaatgctccttaagaggcaaaaagagacccactaccggctgcagtcgagaagagaagggcaaagaacacccagactcctcattcagctccgttcctgacatggtacattcaagagtaaaacgacgatctgccgtcggtggtgcaaaaacacggaattccggctccgccaagacggtacgtttcacggatgaagacccacgaatgcaagcacagagagaggtagcaagagagtaagaatctggagtggaaagaaagtcaaaagttgagggaggattcgcaaacccagcacacttccctcagagcagctgcaggaaacgaaacgggtcgcgctcacacaacgtcccagaagtttgccatctccagaaatattcaagcgcgaagagtggaaattcgccgacaaccttaaaggggacccccagatagcggaaacctctggcaaacaagtactcctttctggaaagcttatccgttctgcatggtatggtacttggaacgagcgccgcctgctgtctggtagtgaagcacggtgaggaccgttcagtttagaaatatttgactgctggcagacgccttcgcacgagtttatagaacgcagcgctttcttgtgctcgttggcaatgagaaagagtcttgccaagccataaacagtagtacctgtgaaacagatacacgcatccccctcgcggacgcgtgtactgctgaggcaaaaactccaacctaagttaaagtagtgctactcatttgacatgttgcctatacaaggtaaacgaggtcatgtgactaaaactaaatcctggggaactgtggattgcgtccatacgaatccgcattttgcctcgttccttctacggagttgtttgttgctaggctttgtcccctctttcgaagcaggagggttccagagagctgtttcatttgtgacctgaaacatccaactaatgacactgtctttgtacgtctacactaacaacaagggtgctcacgaagttggtgggctgcagagagctgtattccgcgtatcctacgctcataggcgctgaggtcgttctacctgtgtgtgcctcgcagactgcgcaggtcaagaacctgtataacatatcttttgcctacacatgtacggaacgcaaaaatacccaggcaaagaacttgatcttctgtctgaattctgcaaggtagacaccctcacggaaggcggaacaagcacttagatgctctgaagtagcgcacccgtcggtcggctcttttgctcatcgccactggaacagacacaagctttcgccgttagcacgtgtacggactttaaagaatgaagaatcatggcaaatattgggcaaagtgcaggaaagtatgtcagatgcagaacgcgttcagggacggctgctactgcgagtgaatcgcctcccactcagctgacttcttacggaacatagggtaactttcctgtaccgattgactggtaaagttttaaggtcgtttctacgcgatctcccaattcctagtaccataagcgaactatttacgtgtcatctgaagtacggagtgttctcctagaaaggtacacagaacttgacaagcagactgtgattaagcggcggaacacggagtgcagctgttgtaaaaaatcaacactgtatactggcaatatcacagtagatgtacggcttgtgtctaagcttatggcgcagctgaaaacggagaagtgcgaaatgcttcctgggcaaaagcggtggaacaacgttcccagccgaaaagtgacatgcagcgactgttacgaggcttccgactccaacgggaagttatgttttgttttgcagccattaccgcgagtccttggctgtccagtttcaattgaacatgcaatattgacaaccaccggaacggactctgtgttggttgttgaacagcagcagattcctgctgaaagcgctttgtgtcggcgtttttcggagacagcagagggggatggtccgcttctttgtgaaaacaccaagagctggacggtgtgaccgcctctacttgcacactccccggggcttcgcgagcgaagcttgcgcacctgcaactgcgcctgggggcggtccacctttgtttttttgttttcattccttgctcctgttgagggcgccggggtctctccagcgcccgttttaaaaactagaattcgtctgtacgccacgggaggtgcctctctcggcgccgtttcccgcggtttcccactgcagtagacgcgaagtagcgcaccggacgccttttcgtcgtgctcagtcactccccacaccgcggaccagaacgttcgccggtttcgtgcctctttgctgcgttttaagcattcttagactccttaccagtttcgtccttgcattgggagttcgaacttcgttgatcctgtctgtccgtgcttctctgagggagaaacgaacggatttgtcttcccccaacccccgccgccacagcgcggtccctgagttttcttgctgtctcttggttacattttccaagcaccgccaaaggaatctcagccagcgaattcgagggaatgccaccgaatccattgccatagtatgaatttactcctttgatcttccattcaccccccgccgtcgtcgtgcacggtccccgacttgcgcaaaagttcctttcccgcacaaagctgcttcaggtaagcaaacgttcgctctctattgttcggccgacactacacacctcgcgaaactgtgggcctgtctgggatggttccgctgttgctgcagtcactgtcacttccgtatttttcttggtttctcctcctgtttcctctggctactcctgtccgtgttcgccgcatggcgcccaagctttcctcgcttgctctgtttcgcatccaaccgggtgagacaatcatctgtcgtacttgtctgtgccattatttttgttttcaatggcagtgcgtcttccagga

SEQ ID NO: 3377 - DNA, 2726 bp, Toxoplasma gondii
  source 1..2726: mol_type = genomic DNA
gtttttgttttagcacgtgtatcagccttgcgtaagggagttacccagaaacagctggatcgtgttggcccaggtgttgtcgggataatgtaggcgtacttttttttaagccggctgtgcgtcagtggacacgcgtcagggtgttgcacaactgcacacttcagacctatgttttacagctctttcgatcgaacacaatgggaaattttgcagggctccactgttagcaccaacgcagccactgactccacgttcaaccgggcgatgtgtagcaactttttgcctactcatgcgctcaacgatcgctctcgcagtagacgtgccattgtgcgtttcggcatggcgtactcacagagcgcgtctaacgcaaggtattgataagatttaccccgaggtcttttggtctgggtacgatgggatctgtctgtcaagcgagaataatggacgaaatctagtagcatttctctgcgagcttggcaacgcctattgaggattagcgggcactatgcggtgcatcgccatcgccttcctcatgcagattttcccttgtgaccgcagctagttcgaggtggaagggtttcagttacacaggattggacgtgctggtaataacctaggtacatattcgctagagcggacaaatgtctacttgcatgtgtgtcgtataacaaagacaccacgaacgggcacccgccttcggcagcaagcgatgattgtcaggtgcactggaccgctttcatttcttcgggcatctcgttgaatctgaagcagtattggcaactgtcaagagccatcactgcgtggaacagagccagtcgaggggccggttggccataactggcggattcaacactgcctgcgcgtagggaaactgccctttcttccccaagaagacattcctgtctgctgcagagacattccgtcactcgctgaagagaaaactgtcaccaggctatgcactagagacgcggaacgcagcttcggaacgtgttcgtgccgcgaataccaccggtgataccagtaagtctgcttggcggcgtcttgcgtcctggtatgtgactccccactttggcacgctcttctcagtcaacgacgagtgcgttctaaccacatgtcgcgggctcaagctcatttggtagccgtgcagtgactttcgcggaggctcttgatctggcagcaatagtcattgtcctgagattgcaactctttggttgctttctcttctagttcggggtgaagagcaggagaggttgactgaccgcgaaggcgcacccgcacgcggttggctcttcagctgcgcgaagacgtcctggcgcattcctgggattgcaagcgtttgaaactggaatttgtcacgaagtggactcgtctctatgtttctcgagagcttcgttctgctacgcctgacggcgtttcaatgagctgcgaacgacgcttgaccgtggagtctgcgtttgtacattgccgtggtagggggcagaacactcggctctgcggagtttgcgggacctctcgactcactctcaaaaatgtgagtcatgctttgctttccttcttgtaccacgcattccgctttattgtgacttgccgtttagctaggaacggaggggagcctcaccgttttttcggttgcccctgtgcctgctgtgtgttcgccgttgccacacgaggccttttcgcatgcggcaccgttttgcaatgagactgctgcatggttgaggagagagccgcggcgagaatgaaccaagaaaggaacttgtgacaggggaggtttgccggcgtttgccgctgtgtctcggatttttttctcatccctgtagcaccctcctgttttacctctggaagcgtacgagaaacccccggccggcgtcgcaaccggatgtccgggcggcgccacacaaatccgcggttgtcggttccgtttaagcaggcttccctctaagtgaattcttttgccgtacattttcacagggccgctgtgcctgtgtttgtgtttcttgggtgtgccagacgtgttgttggcgcttgccacagaaaattaggattttatcgaaggtgttgaactcaacgttaagttgccatcaggctgtccggtgtcgaccattggtcccttttgtcgagtgtttgtgtcgctcctcgttttcgactgaccccgaaaaactgtctgacgcatttcaaaagcatgaccacgtacaccgtgaacctaagcttcgggtgcgacgctagctgatgtcgcacagctctttccctgtcagttttgtgctttgacatttcctctctgggttcgtttcaccatctgcgccatgaagacgctatcgcctcgttttcgagcctctctccagcctgtgcattctctgttctccgggtttccgttgtccgttgcggagttcccctttgtagacgcgagcacgcattttaaatcgcgcctttgtcgctgaaaatcacagctttagattttctggaagagagccatggggctccctgcctttgtccgtccactgtagcctcgcccacgcgcactcgaaccttccccgagggcaccgccgcgtggatttccttgctttcttccagttttcctctccggtcagctcatcgcgccttcttccgaagttgtttggtggcgttcgctccagagcgacgcggaaaattccatacgtcggcgctgtgtcggttccgtccaactgttctgcctgctccggaaccttcgccgctgtgcctggcgacga

SEQ ID NO: 3378 - DNA, 1991 bp, Toxoplasma gondii
  source 1..1991: mol_type = genomic DNA
gactcactggaagccagaagttcccgccctctccagtgtagagaccgcgcgcctgaactggccacgagccgccgtgagccagactcggagtgtccccgccagaccgagtagccggcatgtcgcaccggaggttccgcgccccttcctgagcacttgcagaacacgcaaaagccgtgtatcccggtgtagagacacctgggagagccccgcaggcgccatcggcgctggagagctgggcgggaacgaaggacccgtcgctcgacaccgcggcatgcgccccgtacggaaacgccgcttgcgccgtcggtctgccagccgcgtagggaacctgggcatgaggtgcagagcagaacgaccagaccagcggctcggcagaagtcgacggcagctgccgggaagaatgtccctctgcatgcattctgacgaggagaggcgcccggcggtcgccgaaggcgctgacacacgctgaggcgcccgcaagttgcttgaatcgcggagaagccaagtgctgcgcaggaagtgaaccgctggggacgcgaccaagagtgagaagcctcacacgcagtttgcggaaagggaagtcgagggatgttgtcttttggcgcctcccagagagagctggaaaatgcgcgactccgggacggactctgacagttgacaacagccccagttccgcagttctctgaagaagcggaacctcttttcctatatagacgggatgacagcggaacaggaacaagaaggcgtgcagatggctagaccaccatcggatttcggcgcaggtggcgggggggggggggttgggcggggggactaggcgtgtggcgttcacgtgacgagcgggctttacagcttcagacaacgcgcatgagctcgccgacagcaattaagtttgcggtaaacctgggaagcgaccacctggaagccgagctgtgagtcgcctgaggacgggctcacatcgagtcaaagaatcccgatatctcagcttgccagaaaccgtgcaaaagacagtgcgcgaggccatacggacacagtgtggaacatggacggttgagaacggacaagagcacgcagacgaaagaacggggatagaaatcagaaactgggacgagagttcgcctgttgtgcgcatgtgcagagtgcggcacagttggaattcgaacagccagtgtttcagaaaaacggacacacgcccagaaacacaactcgcgcggatgggataaatgattggtaccctgggcaaaggcccccctcggatgttggctgaggcaccccgtgatttgcaggatacaggtcgacgtttcgcgcacaaataagcacgataaggcgtgtgaagttcacgacgggggccggccgaaacaattcgatacggactacacagcaatggcagcctaagaagctctgcttttttgcgggaaaagagttgaagacagcgtagcttggggggacccgacaacaattacagctgtttgagcagcacaggcttcccaagggcgggagggaagctacaggactctaaggctggaaaacggaaaggcttccggaaattttccgggtggacagaaaagatcgcctctacaaacgcagtgcgcttgctaaggggttctccacagacttcataaacgaaagaaatcggaacgcgaccacggggagaggctgacagtagaatgttggcctctcagtcggcagctgacggttttctcgattaccccccttgcgttgtgtggcacttaaggcaggaagacgagcccttactttgtccaccgagaaacgaagacggaatatttgcgtttcgtatgccgcggaagtgggctgtggagacggggacacgaaaatacttctcagtgaaaacgagtcgtcgatattgcatgcaaatgcgcctctggcgacactcgcttggtcagcgtcaccggggtaacgtgagttttctttgttgcttgtaaagttcgctggagcgtgagaaccgtctgaccaaatttcaagcgcgccaa

SEQ ID NO: 3379 - DNA, 2622 bp, Toxoplasma gondii
  source 1..2622: mol_type = genomic DNA
gaccctgtcgagtgatgaaacacccgaaaacgccaccgaccatcatcgtcagcgaagcgaagggaagcgacggagaaaggaagacgcagcgacgaagagcgctgaagaacgggggaggaacagacagaacgaatcgccgaaacgcgaacgacggacgaagacgaggaggggaagaagaaacaatggaagaagcggaaggcgcggcgagtccgagaagcagcaaggagagcaggggagaaacggagacttgaacgagggactggaacttatcaacatgtacgaatccttcaatagtggaatgcctcctctccggcgagttgctctgcgcgtctctcgaaacggcgtcgcgagaggcgtcacggagacaaaaaatcctggacgttcttcagaagtccgcaagaagaaacggcaaaggcgtggggagatcacaaagagaaaagacaagctggagagaccgagcagaagaaatcttccccgagaaaaagagacccaaggccggttccgacctcgacatccgcacccgcttctcccgcgaatatccacctctcccacagttccagcaagatctccacaggctacaaagagcggagctcgaggaactacatgacttcagtcagactgttctcctttccctctcctttcaccgtgcacttgagacggcgcttgcggcggcgctcggccgacctgagcgcgagaggcgagcgcgagaaagccaggaggcgatcgaccgagaggaagttcgcgtctgcgaactgagaggacaaagaaaggcgcgtgtgttgcgcgcgacacccgtttagaaacgcgcctcttctcgcgtttcaccgcgacctctcgcgtttcaccgcggcctctcgcgttgggatttgtggctggccgtctggactacagcacgcgatctgagaggcagggattggaggggacggacaggcgtcggtggtgcttgaaaaagaagagacaacgcgagaagttcctgcgcgaaacagaaaaaacgcggaggtcggttgctggctgcgcgcgtgggtgtctagacagcgtacggcgcacagaccgggagagttgtgcgagagagcaaaagaacgaagtagagaaaggacagaaattcgccgaaaggcttttctacaccttggacaggtggcgttccacaacgcagttgagaaacgagaaaatcacagacaggcgcagcagatacgtcgtgatgtccccgcgagcgcgtagaatcctcgccacacacgtcgttctttaaatcgatttctcgaggaatgtctcaacaaagccgactctccactccgtgtttccagacagaaaaaacgttctgcaactacgcatgcagctggcacctgacacacgcagctgcctcccagccgcctagcggtgaggaggttgcggtctcagaggcgggtgcggcgccgggaggaaactttgacgaggagagggcgaccgaaaaatctctgaatttcgagctgaaagagcctcttagggacagaaaagagttttccggagagatttagggaacctgaggcgcggaacgagctcagacagtcgagagcacccttcggcattgcctgcgctagatcaccggctccagcgtgtggattcgggcgcttcacgactctttgaaaatcacgaggaaacttgagagatctctcgactttcttcgaaacagagacaattccttcgagaggaaacccaacgtcctttcggtcgctgaaactccggacagcaacacagaacatcacgcgcctggctagtcgccgccgccttctctcggccggtggacttaacatgcgacacacgacccctgcatgcacgcgagcgacaggaaacctgaaaactctcttctctcttcctcgcggcctgtctcttcctgtcgcagtctttctttctctgtgcttctctctgtctcttctgctcttgttctgccgctcctgctctgtctcttctgctcagtctgctatgctcagtctgctctgctctgtctcttctggtctgtctcttctggtctgtctcttcagcgctgtctcgtccgctctgtctcttctgctcagtctgctctgctcagtctgctctgctgagtctgctctgctctgtctcttctgctctttctcttctggtctgtctcttcagctcagtctgctctctctgactggcgctgtgtctcgtcgtctcgtcttgctcggtctccagtcctcgtttcagtatcctttttgcttcctcgtgagaaagaaaggacctggcgtttcctctccgcattgtttgtggctgagacagccgcgtacacacacccgtcgcggcgctcctgcaggacgtcgctcggacgcagtggcggctgtgctgcgtcgacgcgaggactgctcagccgtctgtcggtatcctctgacagcaggccgtcccctcaaaaagtctgattagtaatctgttcttccattgtttcgagctcgtctcttctctgtctcccattcttcactccttcttccttctcttctctccgcggctgtcttgtccctctcctctcctctgccctctctctcttctctttctccttcttgcttcttctctccatctttctcttcctgcctttctcggcgcgtctcccggagtgactcgtgacttttgtcaaga

SEQ ID NO: 3380 - DNA, 4475 bp, Toxoplasma gondii
  source 1..4475: mol_type = genomic DNA
tttcaggagcatcgaccgttcttctgcgttcctccagtgagccatgcagttcgcgaggcgacccactcgagcgacacaagccgtagaatctggcgcagctttcttgttctcccgctgtcggtgctgcacggactgaccttacctcatcgacgagcggctgcgcatgctgctcgaagaattgttcctgagacgtactgacaggacagacgccgtcgaagcggaatactttgctgctgttgctgcctgcggcgttcccttgcggcctagccgcgttggcgcttgctgccgccgaccctccgaggctttgattttttccagaagccccggcgccgccgcctccacgcaaacgaacgatcacttcgttccgctctgtacagacatcgactacgttagtgctttcgcgctgctcgacggccgtcatcggccgacatcggacgacaactttgacgttcgtccgacagtcgccgcccgcgctgggcatcttgcgtggcgccagacaggacgcaatgcttctgctgctgtgcgtcgagttcgaatcggcactcgagggtgacgcgattttcgtccgcgttgaagaacgggaaagcgacggaactgcggacgctgcgactcctgacggcttcgcatggccaccagcagctgtggcttgaggggctccactggcagcgtcgccgcgacgtttcgccatctttttcttggagttctggtcggtggcttgtcgccgcgccagtgaagctgccagaggtgtgtgcaggtggtgaacaagaaaagaaggcggagcagcggccaaagacgcgtcccgcgcttccacgaaccgcggcgaatgctgaaagtcttcgtcggtaaacacgctgtacagtgcagcgttcgggtcgctggcctccggttccggaggactcgaagcagccatgtgcacgaaggaaatgctaaaaatcacagaaatgtgcggacaagcaacggctcaaaactttaagagagcctcgaaacatccgcagctccacggcgaagcagcgtctctcgaccattgtctggccgcgcgtcgtccagcacgcctaactgcacataattgcagacttacttaacagttttcagacgggtgagggtaacaaagcgatttcatgcaaaatgcgtgcagctgtgctaaagaaatgtgaaccggcaggttccggctgctgaaaaatagctcttccctgaggaaccgagcctcgtgtgtctcgtagtagctgcgactctaagaaacgaagaaaggcagatgctaactgctttccacggtggctgacgcttccatgtcgtgttgtagaccgagaaaagagcaaacggatcgagtgtgtggggacgagtttcttgtcgaggaaacaggaatcgatgtcgcaatattctgaaaaaatgcatgcagtgacgcgtcgctgcttggcaggaaaagccgcagggagttgcggacatccgacaaagtctgcccaaatgtgcttggctggattcttatctcagcggcttcgtcgttcctcaaagaaacagaagaccactaccagtgagagaaggagccaaatggcgacatggcagcctgaccgcacaaacagcttttggactgtgaggaacgacaacgcaagtagtgacaagaagaacgcggacgaacaggttgcggaagtcgaaatgcagcagactgaccgcaacagcgaaatgccaacacactatagaagacaacatctagacggattcttacgcttcttcacatgcaacgaagaccagctcaaagacaagaccactagagccaagaacatccttggggggtgggggtgggggcagatagggggttgaacgccggtgttgaagggatatgaagaaacccgtcaatttctagtggtattggaagccaggtggtaacacgataaatgaaacaaacgggacacgaaaaaagtaacgacatgaatctgtcctaaagcagaaggagaatcacgcgtacgcctcagctctgcagtggactacaggcaacgaccacgcgtggcgttggtcagcacacgacgccagtttctctgctcacttaacgtcaaagattttgacgcagcggcacccactttcttttgtactcgctttgagcgcaaacagatagtagattactcccgtatagcttgttaagttacacaggaactacgtgctagaggagccccgaatttgatacagggtgttccccgggagacctgaagacgtggaactattgtgccttcatacgctggtgtcatgatgccagaaaatcctgcgttgaggaaatcagtgactttcctgtaacaaccaatcctccgtgtataacatgctattcaccatatcagcacctaggcgatcgcattgcaacaaccgagaacacgtctcgtaactcgagcacccagggtgaacagtgaaccggtgatttatgccgtcagcctgtcaatgcaatgtccataacgataacaccttttttgattaacagagtagtgtagaagtttaagttgcattgcatttatactggataagtttgagtattaactcaacacagaacatgggggccaaggggagcttcatgtgttgctctgtgcggcatgagtcccagaagttcgtgtgaaagcagctcctcaagctactcaatttatgaaagtacagcaaagataaccgtgggctcaagtcgttgattccaccggcgaactgtgttgcgcacgttaaaagggctgtctagaatggccgtgaactacggctgcccaaggtataagctaactaaagtgagatactttgcccgagaagacaatttttccctcgccagattattctcttcgatttttcgcagctctgaatagcaaaacgaatacggctcaaagtgtcgctggtgtccttagtcgagaggactgtgacgtcaaactcaaatgctttattgattttgacggttgttttgcagctggaatataaattcacgctttgcagtagacacgtcttagaagctttttctgaatcgttgtttgccctggtagcgcgcctctccattccctcgacgggaggacggtctaaagcctttcgcggctgcaggatttttctttccgacctgtaaataacacctgcggactacgacgaggggcgtcagtcccccaaaacaaaaggctcgacattcgagtgacagaaatgcagccgcttgccactgaagggcgttcctgttaatgagcaactaggacctccgccgtgtatgcctcttcacacacgctaataagctatctctgagaagacggcaccagggatagttacggtgtttgcaagtgtgtgatagagggaagtaactgcacatgcagttgcaaggaggcttctttctcaaagtgcggcatctatctgtgatctcgctgcataggctgctcttttacaatcaaaggagtacgccgtctaaccatatttagaaagtcgttctgggtaagtgcagcgcggcacaaccggcagtacgacccgagatgttatttatcatcaccgaccacaccacgagacagttacacataattgagtaaatctacttgcaacaacaccagatgacacctggtctatcagctctgaactgctgccagatgcttgttccgatggaaaacaaggtcccggtcaccgtgtgcctgggataacgttgtcccgcgatccctccttcattgtcttctgtactccgtgggtgtcaaacggatattctcgaggtcaaaaggcagtgcattacgtcttcagaccctcccatgcgaaagagcaatactctgtcctataaaacaccttttaccagtgggttgccaggtcgtcgttatttaggacactaattacaaacggttcttccccactgacttcgccggcggtcttgaggtttttgaactggtgggtgaaaccaatggaaaagaatgaggtacaaagttgttttgctcacttattctcaattatgtcgttcttcgcgtgatcccggtgctaccccgtgagcacagagagagacgaacccactcgtgactctgccgcctccccagcgcgtttttcgaagcaaactcgtttttctctgtgttggtcgctagaaaagggtcgaacagacagctgcaggtgactccctactgctggttgcagcagtttcctcttacgagcgtcctgtctcgtgccttttgatacacgtcgaacaaagtttaaccgctcgccaagagagagtcgcccgcctccagcgtgtcgagcaaccgctgcagtgtgagcctgtcttgtgcctgaagtagcatatagttggaggacaatgatgccgcgtcgcttgggatgttcctggaagtttgacatattaccttgttctcgacttttaaataggactgtagaatctttgacgtggcaacaacatcagcgcatgttctccactcgaggaggtcggcctggacttgtgcgctgtctttgtgtttagctggcaccccccctcaaccagacagcccttgcggtctcgtcgaatcctgagcccatttccgggcata

SEQ ID NO: 3381 - DNA, 3834 bp, Toxoplasma gondii
  source 1..3834: mol_type = genomic DNA
ctcttcagagagaccgacgagaagaggaaagaagccgacacgcatggacgacttcgcagatgtctccaacgggcgctgcgaatccactgggcgttcgtcgccgagtccttcctcgcgggagccggcgtcgtcgctcggcagcggcagcgaggcgatgtgcagaagcgagatgagagtctcgaggtcttctaccgattcctcgaagtcagggcgaagcaccgcatgcagctccttcgccagctgcctctgtggggtatctctgccctctggcgccgcctccgccccctcccctggaccgccaagcgtctccggagacgcccgagaggcagcgagggagaagagcgacagcagcgccttctgcgtcgcttgcgcggagcacaagtcggcagggtctgcggaggcggaaggcgacgccgttgccttgtgtctgaccaggagcgcagccgcgagaaggtccataaaaggaggcacgaagaagctgctctgcgcctgccttcggggagacttgccagagggcgaggcagagaggggacgacgcagatcggaggcgcaggaaccgacgtcggtcggccgtgcagggtcctcgcgtctcttggagaaaaacgcaggcagatcgaaaaccgcagcagcagacacaccctcggaacagccgatgagaagcggcttctccgcgcagacggtctctccaagtcttagcgggcgctcgcctacggcagccacattcaggaagtctccgcctgcaagaggaaagcagaagggcgaaccgaagagacagcgaagcagtgaggtgtgcagaaggctgaagaaaaaagaaaaagagacgcgcggagactcagagagaccgaagagggtgtgtgaccggaccccagtcactgcgaagaacgcgggggacagcgagaaactcagagcccagttcaactggcaaggcggctgacgcgcgattacacctgcagtggtacttgctggaaattgctgcgacgacaacgtttcgcctctctgcccggaaatcagagatgcgaaactcgacacgaactcgacgctgcgctccaggctctttcgcgccgcaagcctcacgaaccgtaagaactgtgagtggaggcatgccgcgtagtgcacatggagctgtgcagatcctcacaaatatacacagagatagagacagacagagatagacatgagagggttgatgcaattctgcaaagaaggaaaggtgaacgatttcgaggtgtcgtggctaccgaggagagcaacggagacagtggtacggcaagcgacgaagacaggcaaaaaaaaactgaagacggaggggaaacttcctctccgaccgtacctcggtcttcctgatcctttcttctggtgagttgcaaagaaatccgcggcctttcgggtgtctgtacacccgcgaagagcgcctgctccagcgccgcgtctccaccggttttctgtctcccccagttccagggaaaggaagcccatccccaaagataagaagagacaccccaagaagaggaagacgcagacgacgaagatgatgcaggaccagaggaagaagcagaggaaggacaagaagaagtcgcacatagagacacagagaaccgcgtgcgactctggccgttcttgacgagccggtgtgcccagagacgtcggtttttcctctcggtcttcagtccgagacagactgtagaggatcgacttcctctcgcagttttcacttgagtttctccctctctctcaccactcgcgagccaaggagtatatacaccccgcgtcggctgcgagcagcccccgacatctttcgccctgagtctgtctccaactgccctctgtctttcggcctctctgagtccccgtaaaagagcgcctgcagacggggatcgcaagcaggaaacgagagcacttcgacgcggcgtgtctccctcgcagagtctcgtcgctgctcccctctgttgctcctgccctttctgcctcgctgcggcttgcggtgtctggacaccgctgtccgcctccgctctgaagagaaaggaaggcgaccaggcagagagcagcctcagagaggctgaagcttgtgacattctctcagtgaaggagagggagacggctgcaggaaacgttgaaacgagctgtctgtgcagcaagtggaaggcggcgactctgttgaagacggagagagaatttggggacccagcgaccttgaaaaaaagagagtgggggtccaaggttcctccgaaaaatcaggataggagtcaagagaatgcttcagagaacgcgttttcgtccagctcttcgcaaaaattgacagggagacaacgcaggcaagtcgcttgcgagacacacacacagacacactgaagcaactgcatgcctctcaatatcattgaagatgcagattcacatacaaaccctgtgtatacatacacgtctctgcaagtatgcatacgtgtatatgcgtaagtgtagatcgtgttggacgtaaaatccagcacgcagaatacttggggacgtaacggcgtagacgcaggatgcataaaattaaatatacatacgtatatatgtatatatatatatgcataaatatatagatatagggatatatatatatatatgcgagcgcgtggagtgaagagcggagaggactgagtgcttcagcgttggctgagagaaagggatctggaacaatttcctgggtcgaccgccgccgggcgctgcgcgcagcggagcggagacgaactggtgccggaagtcgaggaaaaagaagtcggagaggacggttttcgtaaggaaaccaagcctttttctctgacttcttgctgagcccttttggagcccaacacgcccgaaaggagaacggggacaccccactggtgtgtcgaccggcccttccggcagagactaagaagctgttcttttgagacggcgcaagcgacaaggcgaggccaagcggcgagactcagaaaaaagatcttccttcgccgcagtttcgttgctctctctgagaagaaaacgcgtcaaccgaaagaactcgtttcaacaaagaacattctccgaccttgtctctcaaagctgtcgccgagatgtccaggaggcacaatctcccgaacggctgtgaacgcatgcaagggcagacgcgagagaagggagagagaagcagagaggaagacatcagcaactttcatacagtttcacgaaacgatctctttcgtttgttttttctttgaggcgggcgcggcgtctccagaatgcggagtttctcggagtcgactccggaggaaaacacgacgttaggctccgtcgtcttctgccttgcggtcaaaagtgtgaagatcaagactcgtcactttcttggttgtgaacggaaggaatttcgtaccgtaaaacggcctcctgagtagacatccgcctgaacgtctcttctctctgggggggagaaggcgacgaagctcttctcttctccccctcctttgtcagcgcggtgttctctcttctttcttcgttgttttccttttctcttctcttcttccctttcgcgcttccttcgtcctttattttctgcttgtcttgtctcctttcctctgcatcttctctctcaagagcgcaacaccccttcctgtttccttttgtccgtcgcccttgtgtctcctgcgtctgtacaccccgctctcgtctcttccgtcgcttgaatctctcctgaattcgctgggggtgccccaacaaagattcgacgtcagatctgccctcacgcctctgaaggattttctctcttccctgtcctctgctccatcctcttccctgtcctctccccatacccccctccttttttcgtcgtcgattccaaaa

SEQ ID NO: 3382 - DNA, 3176 bp, Toxoplasma gondii
  source 1..3176: mol_type = genomic DNA
tcggtcctcatttttgagatttgtaagggagctttaaagcatgacagacaagttctctgcctgcatgcttcgacttcggggcagacgagacgcagatgtcgaacgcagcctggcttcgctggagaacgccatcaggttctgtcagaaaactcgcgcgtgcctagcgacgacaccaagcgcgccgccaagcgcgccgttcttgtcaagttgaaggcgcctttcagtgcgcagtttgtctattttctcggccgcgcagaagatccgtgcctgaacggatctcttgcgggatccgtgtgcgagaaaggcgtgagttccacgttgtcagtgttgagaaaattcgccgacctcccgcaccagacttcagactgttgaggcggcttccgtcgcgcgcgttttcacctgtttgttgaccgtcctggaagaactgctttcgctcagtgatccatgcgcgctgcgcgtcgaaagttggtcagacgcctcaacactccctccatcgaatacgcggaaagcagctttttcttacctgctgctctcggagcagaggcagccgccgcaaacggacgagaggcgctcgacccctgcttttcaggcgttctctggaaggcagagtttttcctgttttcctccttcggttctccttcagagatgtcacagcacataaataccacatacacacacatatatatatatatatatatatattagagagagagagagagacatctaggtcgatgagaagataaacctgtgtaacagagagagaccgaggtgtgtcgtgtgaggttttcttcgtgctccatcgtcacagattctctgcagcggccaaaggctctgttagactctcgccaggccgttctctgaaggtcgagacttctttctttccttgcaagttctctgcagccggtgccactgaattcgagaaacaatctgcctttgaactccccaaacgtacatcctccgttcccttgacttttttgctccagagagattgcacgaggagcatgtggaggtgaccatttgcagagagagacgaacgacatccttcactttgctggaatgttgagttctttttcctctggggagaacggagactcagtgtccaacgatttagaagacatgccgcggatctccgccctttgtgtctgccagtgcgtcaagggtatcacggaggatcgcagacaccctcatgttttgtgttgtgttgcaataccgttattcatggttctccgtctacacgaattcttagcttaaatagatgctgcgttgaaacagccgatcttgaatcggtaaacgaagacctagaagatcgacatccgttgtccacctcgtcgtcctaacaccccgaaattgaaagcctttgtttagcggatccgaaaaatctcgttctctgtttgcatatggtatcgaggacactgagcacctttacaagtctcgcctgggtgcaccgtgtctttcatttcgttgtgcgcttcacacctcgccaaggacatccaagcgcgacgcacgcgcggcgagcgtcgtttgtagatgttcttctgcagcacctgcgcaaaagttcattcttcggccagaaaatgcacctcttccttgcgcgggaattggctgactggggtggttgccgcctgtgcacccatggtttccgtttgtctgcagagacgatcgttttgcatgagttgagaagtcgccactttcgtgtctccatgtgtgttggttctcgcgggactctcggagaatgtgtaaatggagttacagctattcaacggcagctcagtatccaaaacggtggtgtctgcatgtcggtcctcccggctaccttccttccccccgacgtgagacgagcgttggcccaaagaaagttactgcgcttgctccccctcgttgctcagtcgccaggaaacgaaccggtcaaggtgtctcgacctccgtgttgaaagttaagtttctgaactcccgcgctcgctgctttccttggaactaggaaggcttttatcatctctcacgcgtggttgacggccaagggtcgacagaagtggaagctcaaccgtgaaggactcttcttccaacacacaagctgctttctaaccggcacaaagtggacctctgcgttccccaaagcgcggctgtcgctgtctgtaagggagacacaacgaagatatctccggtgtgttcacttttcgttttgtgtcactgaaggggagttctccactaaccgcaccacgcgcttctctctgctgaagtttccacctttcaccaccctttcttttcagcctcgcccgcggtccatgcaacaagcaacgaagttctgtcgaacggcgtctcgcaggacagccggaaatacggcgtcttctgcttcatgaggaaacgcgccctgtggtgcctcaaaaacgacttcgttcttcgtgaggctttccacggagggcacggcggcttctctgtacgagccatccagggtgttgggaaggcttttctcaagtgcgaacgccatcacgtaaaagttctctgtacagcgagccattttggggagactcaatggtcggcaaggctatatagggaagcaaaagggtgaaacggtggcgggagacacgcggcgacttttcttcctgaatctccggatcgatcccccttttctctccattttttctcccgttctcctgccctctccttcttttttccacgtgctcgcgctaggtgccgcgggcagaagaggaaacgctgaggaagaaatgtcctctctgtcgtcgcttccggcctttcgcgagagagagcagctggcaggggcagcgcgaaggcggaggcgagcaagctctggggaggagcgcgtgtgagtgtgttgagtatctttcgcggatgatcgcctttttcagcgtctaaatttttgtcaacaaacttcccgcagctttcgcgcactactagtctgtcttggtttgtggcacactgctctccgcccccaccctccaacatcgaggtcgccgcgcgtaccccacaagcgccgaccgctttcttccctcgcgaaaagcaggcagctcgcgactttctcttttccccagaacttcctttcttcttcgggacttctcttcaacatttacgcctcccgttttgccgattctccggccaggaactccccacttgctcacaagctcgttttcgccgcgtccttcgcactctcttctccagaa

SEQ ID NO: 3383 - DNA, 2013 bp, Toxoplasma gondii
  source 1..2013: mol_type = genomic DNA
gtgagcatttatttcgagaagttggctgctgcggtatcggtaactcatcctgacagagagtttttgtgccagcgctctacaaagcgaagttttgcctgtaagaaacatgtgcttcccaccagcaagaaagatgcgttaagaaacttgcgcacctgtgccgggagggccatggagtagcagaagtctgttccagttaattagctgcaacggagtccctcagaccagtgcactgcacacagctcggcggcgattgattcaccttgtcattgattctgtggtcggagaagagcatggcggaagaggcgtactggagcagggtttttttcacgttggtgtcgaaatgaagactatcccacaagccatgaaaatcctcattcggcaatggccagtgctgacacgcaggaactgcttcctcctgtccgtcttcttgcatttctgcttctggcctctctgaagagaggtagtataggaccacttggactgtggcgtctatgagtggtacgatgattggtgactcctccatgcacgaccatttggcgcacacagacgtttcgggtagaggaccaacccctacacaggtgcccataggtgattccacatcttccggaagagcgtactccacgttaatttctctgcatgcccgggacaatatggcattttcgacgaggcgaggatcgtggcgtcccagtgcgatagtaaaacccgacgatgccagccacgcgtagccctgttgccgaatctcctctgcgtcgacaagacattcgtcttttatgcacagttcgcaacagagctgagcctttctgccgctttcaaaagggttgttactcctggcctgctcagtctttgaactagtcgtgccgcagctgtcatccacagaacacgagaggtccatatttgcttagtgtagtaaatcgcttactcacgctaaaactgacgtcttcataagcggtcctcggatcgtgcagaggagaaccactcagttcaggactcggagctggataggagtttttgtagtagctgcagatactacacggtgtacagacaccggattaacacagggttggttcacgttcggagtgtaagaggaagatacagaagactttaatgctgagcataaaactcattaatatcttactttgtgaacgcgagttgcaaaactatttccgttcttctcggcggggaatgaagacgcgccaactgattttagttgcctcggttccccattcttgccatgtgcagtcagagcctgtctacatggctacaactcgctaaagattctggagactttgttgctagaactatgctacctgaagcacttctaattcttacccaaaagcatgctaacagcagatggcacgactctctcagcaatcggtccttgcggctgccgcgaaatgcagtgaaggtattttcagcaattggcagcatgtgcagcagaatgttaacccaaatacatttgtctaagcagaagttctgcaaggaacaatcgcggtagacgagtcatcagttccatccgttagcagccaagcgcaagattatcatgctgagatgtcaaacaacacgtctaggcctggggaacatagagtgatctaccacatccagcttgtggggaggcgccacggcaaaaattccaccgtgaaatcaaatcagatacctcgggcaattgaaattcaagatcactttgcgtttttctctgattgggcttgtttgcttgagtgcacccgcgacatacccaactgagaataaaacgcatgcacctacaaatcgacactgccgcgtccgttgcatgctcgctggttgagaggtctttagcggcccactcgacactactgtttgccgctcatttttgaaaaatacgcgtggtcaaaatcttgtcatacgcgtattggattgtgtgaatacttctaccaagaagcagtgtgactgaggctgctgaggtcacacagcacggtacgtgcgtcaacttttccccgccccccgtcaggtatactctctctcatcataagggcaata

SEQ ID NO: 3384 - DNA, 4098 bp, Toxoplasma gondii
  source 1..4098: mol_type = genomic DNA
ttcattacttcgattctttgaagtgccgcaacacttttagagtgcatccgtctcattttcttctggggcgtgattgcactctttaaatttttccaaaacaaaacggataagcagagttgaatggcctgtcctcttcttcgctcagaaacttcctgtacggggaaggaaggtgcgatacattcgcgggatcctgtgcgtattcgatcacttttaccatgtggccttttccaacataaagcgcgtgtgaaggagcagcagtgcatgatcaaacgttgcttttgatatgtcgcgagtattttgacgcagacggaagagacgttggtgcccctcctctagtggagggcacgacagctcacccttaaaaattcgccttcctgactcacttgtcgagctagtgtactcaggtagcactatgcagaaaacccacatttttcgcaggtcactcagcatcatcatagtacgtgtacgagtaatacaacagcaagggaaccggtaaaggccacggagaggccacctgttccaccatatcattcaaggcgatgctcggacgtcccgcgctgtccgtgatgacgccccgagttgccatgcttgccagtgcatctgtggcctgcctggagaaacctttctgatggaactacagagatcccgataaggcatcgcttcaattgctttgccgctatgggtggctcttcccacgtcattgatgcgggagtccactgaaccagcggctttcctttgttcctcccttcgcaattgaatgacagcatcccgcatgggagcgagacttgagaagatcatcttttgaggaatacacgtcgtgaacgcaaacctagagtccaggggaaatggctcgaggtgagggacgatattgtttgtaccacgtcgcagtagaggcgccttcaggttcggcgattaccaacctagagcgcgagcatcaaactctcctgaccgtcggtggtcacggtggtttttcagggaaccatccgttcagtttatgtattcaacgtactttcaatgacgagcggatatatgtgtggtgacgtgatgcggtgtgtctaagcgacggcactaaaagcacacactagtggcacttctctaatgttcctttcagctcaacggcctcagcgtctccatcctgctgtgagatcatgtgaacgagactgcccgtcgtctctcgaaactctccaagtcgaactacctgattaaaggtcctttccatgcttcacaggagcactcgatgacaaaaaagaacctacctctttcggcttagaacatggaagaagcattggtgggcttcttcgacagatctgtctctatgtctcttctaggaagactccagtgacttcaacagcaaacatacaccctcgtttcgtccatcgaaattgtctctagcctcgccgctatttgatgggctggttccaaaagaagcctcccccctctgagcacacaggagtcatctgagaatgcggcagctacgataacgcagaagacccccattcgacagacaccaccagtcgtccttgtaacgcgagcagacttccgtatttctataggcttctcttagtctgcagcaaatgctgccgcgttcactggatatacctgagaagtgtctcggacgcgactcgataccgcattttgcgtcagtgtcaagtttactgtcaaccgacattgccaagtttgctcgaatgatgtcaagtcccgcatgtgcggaaccaatgcccagctatttcgtgggattgaagcagtgatcctactgaaaccggacgttgacctgatacatcggcttgaaacatgtcatctctgactaatagaaccatcgaaaccattactcggacagcaacttggcatgaccagcggagtagcacgatattctgcaggatggctccgccgaaccgtccgtagacggtcgtcttgaatttacaaccaaatctccaggccgctactcaaattgttgtgccgcatccgtcggctaccgttcaattgcctccagtaaacgtgcgagagcacagaacaagacactgtatctccaatgtaaaacaactacttctagttccctaattattcacggtcgaagcgtactgacgatgctgcagaaacgccgccgttcctagacacggtttatgagagtgcttaatacgaacgcttcactgcaatgtggattgagtactcagtggaagctgcagcgcgaaggatggcatcttctggttttaagaggcagattagtggcccttcaaacctggttccattgatggcaatcgcggcatatcgcctcaaacgtttcagtttcactggtggaggcaagcatgtcgctagcaagaagaaaaacccaaactttctgtgagaacatcgaccatccccatacgtcacgccccccgaaccacgcaggggtaactgcagaggttgtgacgaacttttgtttgcggcaattcatgctacaagcaatttagaacatcgtgtaggcgaagcgaggtagccgactgggtgttcgggctaataattggtgcaaatgaggaaaatttcgagtgctttccccttctgctcggcagcgcgtgccctctattgcaatcagtagatcgcgggagagagtaagtgggagctgtggtgcactgcgacacaaatacacctgtagacagagtcttaacgtaacgaaaaagatagctgattgtagcagcttcttatcgtagggcatcacgctcttcatagagtatgcgtacgtcttgacgccgctcggcgtttctatacagtacttacatagaatgctattcggagtcgtaacgtagacagcataatcgcttgctaaggatacgcaagaaaactcatttgtagtatggtgttaaacggcagcagtcgtggcatttggaggtgataataggaagctcgtctttgcagagttctgcgttgtttttcaatcactgttaccggtgccggcaagttgtgggtcaggaagagggctgacaaaatagtctcgagctttgtcggggctcactctctctgaaatccccgctgcatggtgggcagagtccactggagctgaagccgggaaacactgtaacaagagtgcttgcatggatcaccactgttgaagatgatagcccgcgtactggtttgtaaaataacacgtagcaaccgttaaaggctacgtagacacgggaaattcccatccttttacaccacagacactgtaaagtgtatgcagtggaccaaaggctcttacttacctcgcgctcctcatttatcaggaagtgcgcatggttcaccaagtttgcgtcacacgcggagactgcagaggttacctatgctggtcccctgagttgaaatattacaggaaaatccttgaaagttccacgaagcgcaacacattgtctttgccgtgacacagaacacgccggcgacacccaactgcatggtttccacgagcaatgctatatttttcttctgactcttggaatctctttcggacgcctcgccggtagtttgtgccgctcatcgcttgggagacggcctgaagacagcgtgaaaacaacatcaagggctgtgaccgactttgttcgcgtctctgtggcggccggtcgcatgcttgagcctcagtaaaaaccttggctgcgttgacgagtgggcggcggtccagaggacacgacagcgagctgatggctggcggaataatggtgaattcaaatcgactaaggttagggccccgttttagagtcacatttcctctggatacgctgaagaaagtggaggatttcgcttttctttgtgaggagcgagggaagcgtcatgtctttgttgtttctctaccctgcgagaatcgtttaaccgttcattgtctgcagcccataccgctaccttgtgtcttccaaagccgttggagagtcgtatgttttctctctgcgagttgaatcgttctcgagacacaaaccgctaccccattcccagacgccaaaagaggtggaaaaaacggcaaaatcttcttctgatctctcgttcggcgattgtttgttctgttgtctctacttgcgcttttcatgaggaggagcatcatttgggatctccccgccagtgccagaagacttttcctttgagtcttcagaggcgcca

SEQ ID NO: 3385 - DNA, 1222 bp, Toxoplasma gondii
  source 1..1222: mol_type = genomic DNA
gaaccaattgcacaccaatacaacgaagatgttgatggcactctggtcctttttgataggcttccatgcacagatacccggatacagtccaaagtcttctcgaaaggggtttcccggatcaaagagacgcatgcctcagctcaggtttcgcaaaactcggtccggtgaagtcgggaacgtgtcttgtcaaccgcaacacgcgtggagggttaggcgtttgattttttcgcagactcacccctcgggtctgtcttcgtctatcatgtcgatccacttttcccacaggtgcgcgatcacctttccgcaggtgaagcaccgaattgggatgatcattctggttagacaagagaggctgacgtacagctgacgcctccagaagtgactctcagtgaatgaatcactattctcagtggatggatcactgtagtcctgtgacaagtagaattttcatccggaaaacacaagtgcaagacaagaaaaagttcagctgtcgaaaagatcgaagtgccagctctgctgcattttccgcgacagcgtggtggacgaccgactgcggcattcaaatatttcacaccgaggatcgagagcgaataacgctacacttattgtggcccttactgttcctgtgttcctggggctttgtgaggccgccacaactcggcaaaacggaagttgagatatggtaaggtgactcgtaaaaacttctctcacgcccacgagtgccgttgactgttaatgtctccggaacaaggcgtgtttccaggggataatcgagactcgagcctgtcataatagccacattcgcgtgactaattggatctgcatgcgcgatttcaaatgaaaaaaacgagtctgagaaacgcgtacctgtggacttgtcggcgaaatgaagaagccgcatcagcaaccttgactcagaaactcgtcgttctgctacgagcactcgcataattataacagctatgcaagcagatactcctcttgatgagaggcgtgccacagccaatctaccttcttcgcggttctcacgaaagcctacgtggccgccttttctccgcatgcctcgtgtacgcatgcatggagacgcatcaaatggtatctcgcactcgtgcaaagccactgttgcctgtggttttttgagttgcatgcagaggcgggggtttgtgctgtttggcggggttgggtatttgccccttcgtttgataagccgacaagcggccca

SEQ ID NO: 3386 - DNA, 3121 bp, Toxoplasma gondii
  source 1..3121: mol_type = genomic DNA
aagagtgcatgcgctatcggcaatttcggcctacaagtcaccggatcgggcgtccgccgacgcggttgagtgcgggagggcggcccgggcgcgggcatgcgtcacatctgtctcggagccgggagaagaacggagacgctttggttttccccggagacgaaggcgaagaaggccgaagcgtgtgttgggagaacgaagaaggcgaggagcggcgcgaggggaggacagacggcatggctttcgacaccgcgaggaacgccgacggtcggggcggcagccataagtcgaggcgatgtacggggcgaaagcggggaaggcctcgtggcggccggggcagaagctcgacccggggcctggctccgacgcacctcacaggagactctggcacaggcgcaggattgggctccggcgaaagcgaccggggcggcgaggagcaagagctgcgacatgagggcgacgaaaacgagtcggggagagaggatgtgcgagagaaagaagaggaaaaggacggtgatgaacacggcaaactggttgcgtaggcggaggtcgagaatccttctttgtggccttcaaccgaggtgcaaaaggcgtagatagacatacctgcacatatttaactctagatggtctttctttttcagtccaaggcaaagacggagagacggaatacagagacagcgtcgccgcaagtgtgcggagcggacagctgtcgagagaaaagaaccattgtggagtttgatgtgataccaaaaaacagcgtgtctcccagttatcgagtcgtagagttctgtttttggaaacacattgtctgtgtgccatcgtgcaagccgtcagtttcggtgtcaatgaattcgttttcgaacaatgcaattgcttcgccacgcctgagcacagagaaatgtaccggtccagtgtgtgaggaaagccacgcaggtgccgaggggatcctcaaaatgggaactctggagtgtgggtccgcagttgtttgtttgggctgcaggccacaagtgaaatttcgttttacatgagagcaactcactctttgtctgttttcattctcttggcggttgctcttcgcttctcaatgtggtatgcaactgtttgttgcgaacccttgcaccacgcctctaaaaacacgctcgacagtggaatacgctcttaagtctgaaaaaacaatctgggcaactattgacgtccttccgcgtcgattgctctgcacaccgccgtagctgtgtctttttgcggcgtgtacatttcgccattcgttgacgatggatggctagaacgaagaaacgtcgaaccattgaaagacacgcgccctccagtgagaggcttgtacgagactattacgttccccttgtccgcacttcactgtctacaacacgaaagcgcgaaaccgaagccgttgacctcgaaaattgaatttaaatcaacacagcccatctatacaccctctaaacctttgctttactaaaaggcccaggcggacacaaacgttacaaattcagatccttcgggactcctgccacatagtgtaggccatctgttttcaatgcaagtgccctatgaagccgtgtctgagcatccttagtccttacgatcgtcacgaaaaacccagtcgaacgtaattctgccagccaaggacgtcaggatctataccagtgctccaactcgtataaacaggtatgaggagtggttgatcgaaaggaattgggaacaagcggcacaaaagggtgaaacgtggatgccgatgctgacgcgcgacgtccttcctgtccgccaaacaccgctctctggtgctgttcagtgcacgagacaactcccgacgaaaatatccagcacacctgctaaagaagatggctatccaaagagatgatacacaatctcttagaagtgttcagatagtgtgagcagagtcaccattgggcgcgtcgcgttcaccaaaataaaactctccgtttgtcgatcacggtgttcgagaatatcggatacgcagtggaagacaggcaagtaagggtatggagtggattttttaatgagggcagaagttgtgcgcgcaaagattatgaaattggattgagagtcctcgtgtgcatggtcgagagaatacaggctgggcagtggagacgacgcatcataaactgcaaaagcaaagtgaacactgtctgtctcaacaacgaaaactgtcggcttacatacatgagcgtgaagttgtgcggcggaccgaaaaaacacaagagcattcgctgtattcattcagccactgtcgggcaacagacgtcgaccctaaaacctattcccaaacacatactgactgatgcttatggtgctctagatggattcataagcgaatgttgtgaactccaaatcgtgacttggcaattgtgcttgactgtccggagatgcaaggagtctacaggcctcgttttcatgaataatgctaccgaggaactccctcgcctctacagcgtcgctttcaaaatatgccaccaccaaattttggtggctggaatgaatggctagccacttgatgctgcacgcgttgtgcatctgccaatgctttccaactcctcttcaagtaaatttgggggcgaaataagaagcatagtgtgtcttctgaaacaagtgttgaaagataacagggcttctttggcgttgttcttcacgcttggacgaatcggttctaatctctcgcccgcctcgtggtcacccggttttaaccgcgaatctgtgacagctgcttccgtgtcaggacaaactcacgggggctaattgcagcctggcacgagcgtttttttcttgcatccccaaaacgttcagaacgaggctccgcctctcctccttccgttgtatagtgtcttttcgtgtacggtttccgcgaaacagggaatcgcgagacgaattgatgtgcatagattaaggttcaccaccctcatgggacgcaagcggggagtataacttccgaatccattttgttgaaattgtagaaacgcactttcccttaatgccttggatgtcccgtttggccaccgactgtctctttttctgtgaaacgggaggcgcatcaagagacggtgggggcatgatgtactgacggaacagaaggaacgtctcggctcaa

SEQ ID NO: 3387 - DNA, 2692 bp, Toxoplasma gondii
  source 1..2692: mol_type = genomic DNA
cgagttgccgacggttcggtagaaggtggattttgaacaaccgttttgtgagtgtggggaagcctccggagtcgcgaagaaacgcgcagttggggaccttctgaaagctcatcccaaggccagccgtgtggatatacgactgaccagaatctgccgtgctcgtggccttggtgaccagcaggttgacggacagcatggctgtctaacagcgtgttccgggaaagggttcggctaacaccatgagccatatacgctgcaggtagacacgtagaagcagagtaagccactgaaaatgcaaccaatcgatctgatgtcgtggtttctgagctagtaagcacgacgaccccgatactaagagccctctcgaggtgcacagcgtgccgcccatgctgtgttttctgaacacattgcgtgaaaaaacgtgatttgatttatacaggagaacagtcatggattagtggaaaaggaagaagttgagactccaagtgtgcgataacgcctgtgcagtaaaccgcaagggcctccggcgctttaccatcatgcactgcgatacaagagacgtgactgaagagacagacgccattctcgaatgtttacagctctatctagtacgtccgccagtcatgaaacgatcacctgacgaaaagaacaaaggaggaaaggaaggaagttgcgggacggccacgtgattgcgtaggactagcacaagacaacgtacatgaatggtcaacccaaaatacatctgtacgagtcactccattgatgtgaaaactccaacaaactcacttggaagacatgaagcggagaagggggaagtggagacgaggaattcgatggtgacgagtagaagagtgaccgctgaaggcaggtctcttcgaaatttcgactctccggccattggcacatgatcagtcacaagcactgatgccacaggtagaccatttttgagcaaagccttccccacaatgcccatgtggcctgtgctagcacagttgaaaatgagaaactccgcacttgacgctaatacatcaaaggcaccgtaagttttcttcactacatgacgcccagcttcttcagcaaacacgcacagctgtcagggctcggcccttggttgccacaggagcgactctaaccatctttaacttccactggccgagtttcgccgcagttcaagtcaccacttcccccaaacgcgaagccgcttaattattttctaagcctcctcaaaatagtgccttcagccccagtatgtgtctggacaagacaccaaccctcaactcaatgtggcaaactagaatatgccgaatctgagaggcgagacaagcgtgccgacatgaatccggctcagttcacgaatttcctgggagcagcaacagacacggtacaattacgcttctcttcacgaaacgaccctgaaccctggcgagagaggcaatcgtccccgcgaacactaccttattagctggcagcgtaagctagagcggtactgaaagaggttcgcgtcgcatgcttctctacgttgggccggctggaaccagccaaggtgaccgccacacgcgcggacaagacatccgcctgaggcaaagagcgttgaccaatcccgtgtgtcgcaaggttgacgggtgtccgccgtcgatgctcgcttcctgtaagaaaatggcagcaaaaggaaaccaccattcgagtgccgcttctgttctacccctttgtttaactagctcctttctgcatgtattagctgtggtaacgcacagcacggggcgccgcattttccccaggaagaggcatttgcccggatgctgccaggattgcgtccggacgggtgcatgaccatccaggaccaagcagttcatactttcagtagaattctatttgtactgcaaattccacccaaaatatgaaacttgcgatcgaatttgcctaatggtgaagtgatagctccggtgtttctaagaccacgacccgtctatacagcgagcgctgtgcaatccttcgggcacgccatggtgccgtttcatttgaagttgcctccttttaaatgcagcatctcggacaagcactcacggtttgagattcggaaaaggattggactttctgcgacgtacggctacacaggtggcagaaaccgccctcgcttgcagtgtgttggtgtcttcatgtggcgatcgtggtggtcgctggcatatcttcaccccgatttcgcaaatgtgtcgccgaaggacacgaaggtaaggtctcttgcacctgttgaaggtagtttctctttccatgctccgacagatgcaaaggcacccacatggctgcatcaccggttgtccgcacactcccgtgttcgtgtccagcgtgcttccgatggacgaatcaactagcggatgccgttttgcccctctgatcaggaagaaaggcagaccgcaccttcaagtgaccaagagcctttcctggtatgcagtttcgcggctggctcttgctgttcgatacatgcctgttttcggctcttgtctggttttccgttagcaggacaacccctctggatcgcaagccaacgctgatgcttgttttgagacaacgagttgcagttaactagaccgctgatgtttttcccttgataactgcaaactcgaaaatcactttgtcgctctgaagaagcctgtagtcgtcgctgtccaggaagtccaaggcttaacatcatcga

SEQ ID NO: 3388 - DNA, 1831 bp, Toxoplasma gondii
  source 1..1831: mol_type = genomic DNA
ggcgctggatgtcgatgcacttacaagatacagatgtctgctttttcttctgtgaatgctgtacaccatcccgctcgaccctctgtctgcacacagctttgtgctcccatgttgccaggcaatgcacccgttgatgcaaacgcaagaagaaatgataacggagatatctaacctaagaagaaacggtgacggaggtatctgacctaagaagaaacgatggaggaggcatccattctgggttgagagtacagcgaatacacaacatggacagcatactccacagcagaacacactctttcttgtaatgctgcaaatgccctgaaagtgcttaggtgttaggaactccttacgtacaccaacaacagagccccgtgaactccattagcagtgggcgcgtggaactgtggtatataggaggccgcttgctgttttgctgaccttttcagctccgcggctctcaaaggaatgtgtctgagttacaagttcttacatgcaagtccactttcgcacgctgcatcaaacagtgtctgttctggatgtcttcctggtgactagaggatcgacggccaattgttaacatacgaatgaccgctccacgactgcaagcaaggggggtggtgtaacgaaagaaacgaaagctcagagaggaggctcaagcaccctatggaactcgaagataaacgacgaagcaacttgtttcgcacggcacacggacgggtgccagatgggaaaagtggcagctctctgcgtacgaacagcaacagagaattcgcaggacctgcttttctcaaccacgttgagggtcaacaccaggagagcccccatcgctttgcacgtctcccaatgcctgcccgtatgggtaaaaggctttcacagaaaagctgcgtccaacagactgaacctgcaaggactgcaacgaagactgagtgacgaaaacactatatatacacatatggatacatttagtaggatatgttcctcgcagctgagctaataagctatatttcttgagtgggtccccgattttgatttgcatctttacatcgcacctcatatagcatgcacaagaataatacgtaaacatgcaaactatatatgtatatatattatgcgtatccatggacacgtatacaggcttcactagttgggtcaacggcggcgtgcctgcaaatacatatatgcggccatctgtgtgctcacggatgtcaagatcttgctttccgtcaccagacatttgcatgtatagttattaccattatatgcgttgtaggttggagttccctttccttcttcaggtggactgaatccaacgcgggaaaccagtgcatgcatgcatggagctcgtgacgtcccgtctcgtgcttcgttttgaaggtttcccgcagaaactcgaacagtcgatatcacatttttttgctttcacatgttgaagcgaagaatgtgaatccaggtccattttttgcgcttgaagctgatgtattaacccgaagtttcgggctcgaccttcccgttgtcgcctaggttgctgttcccctcgcggggcgttcccgtttgttttttgtcttgtcgctgtgtctttgtctctttggcacaccgttttctcttctccatcttgtctccttcatccccaaacctcgtgttttcgccggagtcctgcctagctttctccgcaagtcgcggcaagaccctgcgttctttgagtcgagtgttcagccggtgtccagtcgcgaagttgttttttaagattcccgttccatctttgcccctttctctttgtcgcgcctgtcgctccggtcttttctttccgtgcgagaaattcggcggagccaaa

SEQ ID NO: 3389 - DNA, 1887 bp, Toxoplasma gondii
  source 1..1887: mol_type = genomic DNA
atcgtgcaagtgtgtgtaaacacctaagcggcgaataaagctgttggatttgggcgcgagcgtcgaccatgacgaagcagaattgtcacagaatggggaatcagtctgcatcttacacgaaggattgtcgctcttatcgttgacaagatatgctgtttttttgtctgaggaactgaaacacaggcgactcagacgagggcgctcgttatgcgtgttcctcgtacgtagagcagtcaagctttgtcgtcatggcagtggcttactgctgagataaaagaagactgtatgcagatattattgacagacaccggctgtaggcgaacatgtttaccaaaggctgccctggtgcaggcccccttccatctttttcctcgagtgaagttatgctgcgtagtcacagtatgcgctgacgtcttcaattgctgcagagggatgattgtacaaacggcggcttcctccgctgaaaagtgcatagcatgcgctgtcgacaaactattgtgaagtgcccgtaagcgttcgttatgccaatcgattctttccgcgctctgtagagctaatgacgaatgtgtggtataatgcgtcagccggacagaggtcgcactgtgcaaacaaacatctccggccggattgaactgtgctacaacactctaacgggttcagctgtggcatcgagtcgcccaatggcttcctgttggcaatgctcatcgctttaaaagacgtgtgatggcgtgaaccaacatcaacaaatcagttcgaatccagcaattgtacagttgcatttacagttgttgccaccaactggttctaacgcttttttgaagctatgaaagaggcgcagctttccccttagaagacaacggctgtatgcaaaagctcaacttgaaacctggagtacgagttggaaggaccacagacatgtagcgtctgctcaccccagctgtttccacgaaggcatagctacagtggtctggcaccgaacaaaacacatgacacgagcacaacagaaatagggaaattaagactgtccttcaagccgaaggtcaaagcagcgtcacctgcggtgaaactacagcgaccttaggagtgtaagactaccccacagaactctgttgcttgactgacagttacacatggatatgtgcagcaataataaatgcactattacacgccagatatggtgcgcacagaaagcgtccaacacgcagagttaaaacagcaccggcataccacgttccggttccatcttggtactcgtccgcgtgtgcccttgatacgactgaatgagaattgcagcgcaaggcctctttaccggtgaatgtgctgttcccctgtgcctagaaaatggatagtaaatcatttgatcaactacactgcctattgcgttcggccgatggccagccggctggaacgacaagtgaagtgcttgtgacggcttaccggtttctacagtgaccgtgacttcagctatcagaggcgctcagctacctttgatcgcaggctgtaacccacaaaataaactggttcatgcgtgtagtacggccttatgttcatttgtcgtgaacgcgaattccgatttgctgcatttcaagcgtgtgttgtcaaccaaaagggcagggaccccgcaacgtacatcgcggtagcctcgcgtcatgccacgggatgaccctcccccaagaattttcttttgcagtcccgctactaacgttccgtctccgagatttgttttggagcagagatcgaggaggaactaaagaaccgagtgatcatgacgatgagttgctcaaccaagctgagtgccgtttgataaaaggcggacgcctgcatttgctggacacgtactccggtcagttcgcgcgtttccggtagacagtgacttccgtttctgta

SEQ ID NO: 3390 - DNA, 3446 bp, Toxoplasma gondii
  source 1..3446: mol_type = genomic DNA
ggccaagggaatgcgggacttggattcgttgccatgctcagaagctggaggaggcgcgagagaggctccggaagctgaagatgtctctgtgggtgcgagagtgcgagaggccgtggatgctgaggtcgctgttggagtgcctgagggaggtgaaaaagctgaggaagaaacgctaaagcgaaaggaagtcgaagcgggaagacaacagactcaaagcaaagcaaacggaggagacacacagcaaggcggaaatcaagaaatgatgagttacgaagactacctcgcaatgattcaaggcgtcgatgagagacaactaactccgcagcagttagcggagtggagaaactaccgaactcagtgtgaggcgttcttcgcctaccagcggcagtacgctcagtggcagccacaggcgtaggcgacggacgagaagagaaaaagtgaagcggaaaccgagaggagaacgggagtagggaggagagcaagcaggaaagcgaggcttgaagaaagaacttgacaagggagaagacggaacgccgatgatagggggaaggagagatcgtgggggggggggaccgcaggtgcgaagcatgcggggagaaacgacgacgagagaggcaagattgaagagagagaaatgtgcagcgggacagagaaaacgagtaccgcgagggtggactgatcgaacagctgaggaagaaaaattggtaaatttgttgaacactttgctgtcccgagggaaatccaccgtggaaaaggtgggcaagggcgagaggtcagaagcagagcatgagcagtcggaagcggtgaaaagaagaggcagacgagaaaggagaagaaactcatctttgtgacgaaacgaacacacggggaaggggaccggggatttaaaaagtatcgttgtggtaacaacgttttccgcaaattctggccttcaactccctttagctctttgctgtgtgagcgttactgcctcgatctggaagtggaacagtagagtagggtgggcattgggttagagcaaggcaaaaacgcgaagcaatataacgtggacaagagacgccttgctgacctcagacacaaacgctcgaatttgccaacgggcaaggacccacgcttgcctcgatacattgcgtgcagaaaataatgaagtttactttttccatctggttcgcgtcttgttgaagtcgccttttcgcccgcttccgtcttcgtcaaccacgccggacagcgacctagcaaacagaaatcgccatgaaatacacaactgacaaattctgccttgcgcatcggatctgttccaccagccaaccacaacactcactgttttgttgcatgttcccgcattggattggttcttcgaggaatccagagcgacagagtgtgacgcaccctagaccgaacgatgcagccggaaagcacgagacacttgagagagactgagcgaggaacggaggagccgaataggtgcagttttttttatgcagatccagcagagcttaattttcttgtactactctttggacacgagaatttgtcttgtctcagcaaatgaatgtgtgtgtgtgtgcggactgacgagggactgaggagactcttttctggtagcctcaactgagaaaaccgtccccttttgtgtcgcttcttccccccgctttagtgaagtgatccagcgttatcgaaagattggcacacacatgtgcagcgaagcgacagagtagaacaacgaaagacgcatgccattctcgaggaaactggacgcaaaatgtgggagcggagttctacactgtccttatcgtctttaggctctgaagtaacaaacgtgaggtgccgtttggaacatttgtttttcactcgtaatctccctctacgcggcttcatcacgctaatgtctgaccctttttcctcatgattgctattgtttgctggatgcgtttcagtcacaacatagacgcgtgcttcttggcagaaccccatggaatatcgcaatctgcgattcgcctgtgagtcgttcgagtcactggaagagacggactgcactcgttagaatatctgagaagtcgaacgctcaacgggacactcagacactgcgagcggaaggaggctacaaatgcggatatcatcgtgtttacacagcttctatacgaacgttcggttttcgaccgctggatattgatacacttaatgcactcaacgtgatggtgtgttccatctcgaacaatctttccctaatgtatggaatggtacgtagctgtgcaaggctaacacatatggatcagcttgggagagcatgatttcaccgaagcgtgactttcatgtaaggatccaggtagctctggcgctacaattcgatgtgcctttactgttttgggccaaaacctgcccccacccccgcgtaaaaagaaagaatgtgaggcatcatttcgaaaaactctgtatagaggggaacctgtctcaacagtgcactccgttttaaaaatccgagtgcgctgcacgggatccagcgtctgttgtcgttcacatgcaaaaggaatttctcacagcctttggtgtaacagcagatcagcagccacttcacagcagctgcagccgccaaaagaagagagcgaacatgtttgtggcgtgtctgtcttccttctgcggtagatcggcacagtaccagtgagaaaaaagtcgggtgaagtgcgaaggtaaactagaaacgagaactcgatgtcggctcggctctgggctgcagcgcccctaatttttgatggatagagggaacgggttgccagtacggaggtgaagaatggtcggccgaactatgaggggcagttcttgatacccgcagactcaggatagctatgagccccccgaccttgctacgttttaggcccagtgctgcctcaatccgccttgctgccatccttggtgcggcggcaagacacgttcgtccgcttcccggcagcgagggtacaatttcctttctgttcgcgcagcatctatccacagaagtcatacacaccccgagtttgacaggaatttcgctgcttttctggacaaacaggaaaccggtgactccgagccgccaaaggctgttcatattttcctctcttggaggttggtggcgcccgaatcgcagaaagaccgagccacagtgaagggtgttgtctggcaagccttaaagatccttggcgttgaggtccattgcccttctgaaagcgtccaaaaagcaactcttgctattcctttgagttgcacaagtgtaaaacgttgcctggattgccgtcgcgtcgaagaacaaacccgtagtctatagttccgtgtctcgctgtctccgccagtgcgtgtggccgccgcggcttacagtctttccgcgagttccgtcgttccccaggctcgagtcacttttcctccagtgaacaacgccgttttttgccaaaccgacacaacaacgctgacagcta

SEQ ID NO: 3391 - DNA, 1305 bp, Toxoplasma gondii
  source 1..1305: mol_type = genomic DNA
gaaaaagcgttcaacgggctcgagcctcagtcttggcaagttgcactcaagagcttttccggtgtgtaaccatagactcttcctctcactgtggcgttgcgttgaattcgaaagcgacaaagagtgcaggacggcttcagaaagtgaaccgccgacttgcgggaagaactccgctgcctacagaatcgctgcgatgttctccatctaccgcatgctggccacacaagtggagaagcaacagcagatgtgcattcacatatacaccggtgacatcatatctgtatacagtattacacacgtattatatttatacatatatgtatatatatatatatatatatgagaaagagacagcgagacagcaaagcatacatatatatacacatatatgcatgtatacgtttttatgttggtagaggaggaacctgtgcgatccgtgactcttttcattgcagtgaactcgagtcttctttcagactccattgaaactcggagagggtgggtcgcatatatatgtttgggagatcgattgatctgatttaattgttcgaaacgcttgagttcgatgaggagacttcaccctctttcagcatttcaatctccagagtgaaaaactgagttcagcagtagctctgacttctcgcagaagtccctctcagggcaagacccccctcgatcggccggagtgtgcggaactcgctgaagtctgcgagttcttcgtccaggacttcacgcgcaggcaggaagtcaaaagctttgaaaagctcgagtcgaccaaggaaagacaaagaaatcgaaggaaattaaaagaaatcaaaaggacttcgaggagttctctgtgcggaccagacaccaagttcaagctagcgagtgtcggagacatcgacttcgcagtggtcgtgcatgcacaacgagaaaagcagcactgcagcgactttctctctcccgaaaggttctttttttttaaaaaaaaagcagcaaaacagtcctttctgcgtcttttaaaggtgcacgaaaaacgagctcgggagtctcatgcttcgcctgttttctggagtcccggttccggggcgtcagggtgtttatttgaggaggcaagagactctgtcgaagacctcgcagagagtccaaccgttccaatcttcacgtcgcttgctgagtttctctcccaggtttcctcgctttcagaaggcttcctgaaatccttcaaatccacgcggaggaaaacacgcaaaccaacggccgtcgaacactgcggtgtacagacaccggcttcttcgcgtctaccacacttcttcggcaaaa

SEQ ID NO: 3392 - DNA, 1830 bp, Toxoplasma gondii
  source 1..1830: mol_type = genomic DNA
cggaaagatgctttgtctgcgttactggagctagatgatttgttgttcactctattggctggactgcgtcaaaatgacctcctgattctggtttctccttgcggcaacgcagcccgctatcttagcctcgcggcgctgcgatcagcattgtcgtccggcttgggagggacacagaggtcgaatcctgcagaagcagaagtgcgtcacgggtcatctgtgagcgacggaaccaacagtgacgggagcccttcacatccgtacggcaagatgtgtactggcgcatgtgaggccacgcagacgacgcttcttcagtcccaggcgattgatcaagagtttttgactgagcagcgggcacccgtaaaaacttcgacagcgctagagtctgtatatcagctggacaacgccttccctgatatcaactcaagtggtaatggcactttccctgagcttacgtggacctcttcaatggaaagagaactcgaaaaagcacgtggtgagtttcagggccctggtgggggcccttggataggcttttacatacggccaggtgtgggtgtatgagagtagttgttttcagtgagcgccgtgtaggcgcacactgtagaatgtgctgtgaaggttgccacaatttcttgtgaaagcgaagagccggaggtagagtctggaagccccttcttcgataattcccattcgttccattttcgcaagtcggttactatgcctaccagtcaactgagtgtccgaacactcatgcagttaccgtcactgtgcactgtacactcgagtggcaacagcaaaaaaactcgtgcagctgttaaattgcacactaacattatactctgtcatactgagagtcctatgtcataggcactcttgttaccgtgtggtcaacgttgtggacggtctccttcgagacgcagtcgtacccaacctcttcgtactgtcgccgtatcttttgctggcaaaatatatcggcagacgccggccccattcgagtgcatctacagcatggtcccctttgctaatacgagcacacaagtagttgccatgtgtctatacatgaaattgacctgtacacaggaacagccactgctttgtcaacggacacgtaaattaaatggtgccgctgcgtttttatgaacgtctgcccaatagctgtaggctcagaaacaaagtgcttccatgaaatctaccctcgtcgcgtgaaggcaagtatgcgaagaagttacttacgacaggtatcaccaggcgtctctcgtgtgatagtttgcttcacgccgaccaggcaccggaggcaacaccacatttccagtcaaaagaacgtcgagtaagcgactgcggttaatcggtccttccacaaatggattcttcgatgcagagcgtgactgtacaaccgcccatgttgaatcaaggcggaacaaccagcagcagggagacgcgtcgctttccccaaacgtaccagcgtacggtttagtgtcacttcgcgacatcgtagcggccacttgaaggtaagtacgtcttagaagtgcaacgcaaataatttgatgtgattcgaagtcacttaaaaattcgtctctctgcggaacatttctggaataatctggctttcaaccaaaaacctcgtagtaaaggcgtgtggcatcccacggctgggacactaaagggaacccatgttcgcctgtggaggccattttggaggtttgtggggagaaacgtttttcgtgttgcctgtttcaagctggcgattgtagtcgccttttgaacttcgggcgtattcaattatgtcatgcggtgaaccgcgttagcgctaacgttttgcaacgggcccaa

SEQ ID NO: 3393 - DNA, 4419 bp, Toxoplasma gondii
  source 1..4419: mol_type = genomic DNA
agcgtgaaagctctttcaatttccataaattgtgtaagcagtccagttgagtggtagtattcagcagtcacaacgaacgtccttgtctgtatctcttcactggagctatttgcagaatgacccagatagtgtattgtctctgtttattagaattgagcagtagagttctgtatcgaacatcatttgtacaggaactgtacctgcttttaatgacccctcccacgcatcgcatggtacgaatagcgtagtacctgattattaacttctcatgcacgggacaacggttggccaaaaaaggatgcgcaccagccggaaacaaccttatccagcatctcaaagcgtgttttaacggtttctctagacggacacagcgccacatattttaccgctctggaggagtcagcacgaattgcatcggccgtcgtcaagcgtgccctaggtcttttcaggaaggcattacacatgatgaaagtacgaggacgccgagaaatcggacgtactgaagacgagcggaatgaatctagtggtgtttttgactaaacgggccctatggtggcgatgttctttgcacaaccggacaaacgagagtacacgtcactccccccggactgtgtacctggagtagtatccgtcccttttccgttagcgatctcgcctgagcacgagaagcccaaacactgcgtaagaaaacacacaatttttgaaaaaaaccggtaagcagactgagcacggacaatcaattcgtgccatgcaccggcggagccggtacgtctagcatagacgcaccacgccttgtcgacacaaaggcacggtgtctggagaaacatacagcccgcctgttaccgaagaaacgtacatgccaccgagcggaacagctgacgggcactccctgaaaaaactgcaaacacgtgcaatctacgctgacctgtcaaaatcgcttctgtcggctcgattcagcggggtaagaaggagccacgagttcatctaaagtgcacgtataaccgtagtgggaataaatcggccggcatttccagtctgctatcttgtaagggtagagtactacattttggctgcccgttcctgcaccgtgaacctgccctgactcagacataagcagtgatagcaccacaacaaaagagtggtaggggcaaagaagccgacaattggaaatcagtattagttcgaagacaatactgcaacagcggatagagtgcacccaaagaagggattcagtgtccccctgttgtacaaaggggtccactgttacacgcgtgcgaagaggacattcatagcagcaggtcttgagtttgcggccttaagcatagatgacgcgccgaatgctggagggttttctctctgcagtctgctatcctgctaattatgtttccccatctcaatcggccagccagctcatcgatagaaactgtccacaaaaggcagtcgcattaagcctcagctatgacgctcctgcgtgcaactaatgcgttcgggattgacaaatgaaggaccaggaacttacagaaagaagaagaaaaagatagatcctcgctgcgaaagtaaaccggccccccggcgcgtgcagcctggcaccctgtttccaatggggcattgttgaaaacaccgacgcaaccggagaaatcatccttgccccgatgctaaaaggtgatccttcctatgctcgccacacacaaacatgtgacggccaataccttcagtgcaatgtaccaccgagcaagaggaaaagctggacgcaacaggctagagaccagtgggttcttcgtggcgacaagatgactggccagtgcgaccacttgacacttcgattgtagatggtacaggcagatgcccgggtacaaataaacggtcaagcatggaacagtgttttcagatgttaattgagaatcaaatgaaattccgaaggcaactacgcggcgccgaaaattctgggaaaactggcatcgtgtgacgcaggcgcgcttgactcacgcttgattagcccgatcccttgtgaaactcccgaacggcggacccctggataaatgaaaaatggtaaggatttccataacctcgggtgaattgcaacaatgcgcaaaaacacgagtgaaacactgtggatattgcaccgtgatatccatactgggtacattgcaggttcactagcgttagtaaccgtccgcagcacaccgcagcgctgggttcctccgatcgtagtgtgcggtgcctccggattagttgacgtggattagacagaaaacgtaagcaaacaggaactgcttgtgaactgaaagtagctatcaggaacagctggcgacccactaaacgcacctgctctgggtgggacgccaaacacacgacgacggcggcgtgtagtatgtgccgtgtccgttcctccgcctgatgcgcaacaccgtcagccaattacggagatgagcaatagtccttttcttacgatttctgtcaccatagcttagaccgaagtcctaaaccatcgttgggagtgtgtgtgtctcccggagcatttgtttcaaacgagcgcggggggacatgtacggtattctgagaagagttcggggttttacactgggcgctaaacacgggtacagatgcgcctcgccctcgggttcgaagacaccatcggccgttaaaaaaccgtcaccacgcagaaacgttccagtattttgactgtgccagaagagtatctgacgtcgattttgcggtcgtaggttcgcttccgccgacattccatgcagttataaaagcgtcgcgcaccctgcgtcccccctctgtatgccattggactgtcctccattatcgatttactcttacgaggcaaagatcataagtggacacttgatggccaacactttccatgcccactggaacgaaaaaactggcttcttcgagtatctgggcagacgattatgactagcttcatcgatacaccgtcactgtatgcgagcggctgtttgccggaatcgccggagtttcttcctgaggtcgcctataaggaacctgaagcgagtttccaccaacagttagtggagtaccatttcacgtaacaatagtttctatcgtcgatgctggctgtggaaagagactgtatgtaccaacacgttagcggcggcaaatacgacgtggcggttccacattgctgaatttctttgtggacatttgctgaacgcagctgtggtaagactagataatccttggtatctcatgaagatccccgatttcatgctaccccacaatcgctagatttgagcgaagccatcggctgtcaggctcctcaaaatgtgtcttacgcacgcgtctcacttcatcggtccgggggaaggcgatacagtcgtggcgcgaactattgaactattcgtcactacgcacctacctacacaacgacgcctcaaccgcttctgcacggcatgtcacagtgaactggtacatggaaagtccaccgttaaggaatacattctggcacccttgaacttttctgaagtttaaggcgacgacctagtggcgttgtagctcgatttcagggctagtacgtggaaggggaccgagggcgtcgagagacacacggtgttagcacacattgcttctgtgggttttcctccatatctttttggttgcacagtttttaatgttgcgcacaaaaccaatggaaccttcagtttcgtattttcctggtacgtgtgtgaggaagtgacctgcatgagactttacggggtgccagcaaagcgggcgtggatcgctggcggcgctacccacagtcgtcgaggcactttcagcgttaatcgaagtgtgtggtcggtcgtgaaaaagagacgaacagcagcaagaggttcagcgtggcggtatcgtgcaaaatcgttctccctcacctgttgttccccggctttcagcgctagtgagcaggtcacttctgcgggaagagaagtggtccgaaagacttttgttgtgtggtacgtgtgcagagtgctttggctctgtcttagaagagcgctgctcctgtcgaggattccccgttccgtgtctctggaatcttccgcacacacatgcttccgactgtggtaagcgcttttttgggaggttgctcacttttggcgtagcacttgcgagttctccgaccagactgcttgcaagcaacacttccatcctctgtgcgcccgtctattctcttcgcgtttactgtataaagggatatgcaaaccgtgtttgtgagagttttctaggtaggggtagtttacgtgtcttcattggacagcgtttttttgaacgctgcgctcgagggacgaacgggacttcagtcgcaggcgtcagtctttcaacgcggtcctttattgtgcaagcacgtttcaagcactttcgattctgggattcccccgtttcgcattgccgccttccgtcttccaccacacacca

SEQ ID NO: 3394 - DNA, 1960 bp, Toxoplasma gondii
  source 1..1960: mol_type = genomic DNA
agatgctccgacgaaacaaggagactccgcatctcttgatatgacggaggaggagactcaatcacacagagagtgaggactgggcaaagggagcagctcccactgtccagacaccgacgcgagcaagggaagacgaccggccttcccctcacaaaaacacacgagcaccagccggtgttaactccgaagaaaactggttcgtttatggccgctacttcgacatgacatttcgccatcgcagaggcgccttgcctctcgatccgccgacgcagagaaaatgtgaaggagaagaagaaggaagccgataaggcgacgaaggagaacacgaaggagaacaagacgaaggatgcggggaacgcgagtgatagcagggacgggaggaaggaagagaacagtttggcgtaccctcgatcagctgcgcgcgcagcttggccagtttcgccttcaagagccccaagtgaaagtttgtcgccttgtttttctgcgttctggcgatctccgcctccacctccgcgatcctctgcagcaccgacatcttgtctaccgcagcgagggagaccacttggaaacaattggaagactgcggaacgaagagagagaaaatggtgggggggactaaaaaggaaacgagggacgaagagaaaagagagaacgagggaagaggagagaaaagagagaacgagggaagagcagagaaaagagagaacgagggaagaggagagaaaagagaaaacgagaggggaagcaacgagagacacggaggaggacggcagattgaggggagggcacactagggagaaaggcgaggccgttgaccggcgacgatcgtgaagaagattccgggggagacgcagagagaaaggaaatccccaaactcccgcgaagagacaagaaaagcagcctttcccgcgcctcctctcccctggtctccgtcgcagatgcgcagcctgcggttgctctcagtgaagaaggcgacgcagcgaaaggcgcggtgcctctgcttgtttttgaagaagagtccgcagaaggaaggaaaacaaagagatgcaggagacagagaggcgaaaaacaacagccagaaggaaggcgcaacgacgccgcgcgcaggcgcatgcagttcgcaaacactgccgcatgtgcttccccaaaatgagagcgtagaggcccagagacagaacgaaggcgaagacgacggtcgctgcggtgtctccggggtaggagacagcgagagcgcgtacacgagaggagagaagacgaggaactggagaaggagaagtcagcaacaatgcttgtgttctttttctgtttcaggaaacgagaaacctgcgttttggccaacagagaggcggagcctccacgtcgaggaaggcggagagaagaagagcaggagggagggtgaagacgccccggacagaagggaagaagcagacgcgaggaaacgcgctgttgttcgactgtctcaggagagagtgtgtctcctgctttttcgtgtctcttcgctaggcggacgaagaaagtaatgaagaatccgaacagagaagagacagagagagagaacgatcggggagactgtgcgctgacttttgggtggaagtgtcttgtcagatagcgaaacagcagtccctcgggcgaccgttcttcgtctccttcgcgttctcgcgtttcttcttgttctttgtttcgctgtctgcttgtttattctcctcacttcttctccacgtttcttctctctcgctctcttgcctgcgatttctctctctccctcccttcaccgttggtggagaggaggacctcgacgcgtcggatctctgttctctctccgcagcgagacatgaccttttgtcgccgaagcctccaaggtttttatagaggcacacaagcgggagcggaaatgcatttggatcggttgtccagagtagtcgttcagctggattcggcgcgttctctgctgtcgaaacca

SEQ ID NO: 3395 - DNA, 2165 bp, Toxoplasma gondii
  source 1..2165: mol_type = genomic DNA
agttgaaagcgttcaaagcttcccaagtatcataggcaaaacgtcgcctttcccggtctttctgctgcggcttgtgagacaggcattcgcgagcaactttttggggactcgagagtttcagctggctggcgagacactggatgcttataaagctggcgaccccgaagcgttgcaggctgcgctcgaaaaccaaatgtggaatttccttccgactgaaatcgttaaaatggcccgcgatctgaaatctgtttgccgtggagcccagttccaaggcagagcctcttcgagttgtgggagcgtttcgggtccggtttctcaagtgcgtgcgtcgtccagtgtggttcctgtctcctctagactggacctgacacgcgacgtgcgtcccgtcttgggatgcttctcgtcctcgggggtaaaattgtccgactgtccaaacgtagaaggtgggcgtcagagcgtcttgaagccaccagcagtccagacaagcaccgatagtacctctcaggtgcggccgaatgcggaggccgcagacgtttctataaatgagcttctttgctgaaaaaggaaacttcaagaacacacgttactcgaagaagagttttgatggcggaaactacgattcctgaatgtcgtgctgttcaaaccacggcctagctcgtcaagtttgcgatgagagtgccaaacgcgtcgacgggagatgaaaaaaccgtttctctctgtctcccccatgctccgagacgaaattaggtagctgaatataatttgggaggttaaaactgcgttgttttgccattcaagttcattttgttttaagtagaatcgccttgtcttcttaagtgttccgaaatgatgcactgccaagggatcgcacgaaaggcgtatgcacgaacacaaagagaatgatcgatctggacctataaatacaggagtagaatgtttgcgcatacgaggagcacactaaaaacaatttcaaatggagagacgaagagaaggaaaaaaaagttttcgaacggggagcaagcccgtagtggagtgttgtcgcgttgagacaggagcacgtaaatacgtagttgttcgtgcggtgtacgttgcttacgaaaagtcctttttctcttatacgaaccgtaatgtctttcctatccactcaataaaacgcgttagacgagaaacgaatttgaggaatgggtcctcatcaccgcaagagaagttgaaactcagagtcagtagttaatcagcgtatgcgatgtgtttccaggttcttcgtgcagcatcacgtgtattgaccgtatacagacgctttagtgaggttggaatggtgtttctctttaaggaacttgaaataactgggaaatacgtcatgcgcagagattgcctatcttgcgtgaagaacggcgccctcgagaaagacgctggtacctaccgttgcaggtcgagagccagtcagatgcctttctgctacttcctgaagttattcatgtaatagggccaacttctcgatatactttgtagagtgtgtgtgcgaactctagtgcggccattagagtacaacagacaactttagtccaccaagaagagtaaaacaaccagggagaactcagttcggatctttcagaatttgtggcatagttcaccttagttgacccggaggagaactcatttaaatggaattccattttgccaagaggcgcagttattggttgctggctgtttgaatctggatacgtgcgagtggatgctagacttgttggtctgtttgcgttgctgcatgtccgcctgtgtgcatgcattgtccacgttacgcggattaatcgtttattcatgtttattcatgcgcaaacggacatccagattctctcattccacacactacgctcaacacgtgcgagaagttgctctttcctaacgggaaagtggagtccaactgaggtggtcccgtacaattttagcggcacgtggtctttgacacgacggacctccgccacggaacagatgccgcggtagaggcatgcggtccgtgtcggcgtggcatttcctctcgtccgtttgtgttgtctgtccaaactgtgtgacgtcgctgtaaagtttcttcacttcgtaggaatctgaattccttggactgtttgtgtacgttacggttccccttttgctgtgccttcgggatcgca

SEQ ID NO: 3396 - DNA, 2593 bp, Toxoplasma gondii
  source 1..2593: mol_type = genomic DNA
catcttttcaagcagagatatacgcacgttgacacccatttctacttacatggtagcaggtggtaattggaagggtactgctgcatatgagttgctgccgcttgaggacgcacccttcgctgcggacgcgttttaactgtccagggacggagagtcggtcttcgtcacggagctgcgcgactgcttgtcttttggtggaagaatctcgggagcctgaatcctccccgcggcgtcgcttctgctcgtcctctcggccgctctctgcagaggcactttccaagactcgctcaggctccggcgcctcgcgcttctccagcgaaacgtgcgagtcttcgtccccatcttgggggagatccagaggcctccgttccatcgcgcgaacgacctcttcagcggtggggaagaagacggagaggcggggagaaaaacgactcaacaccgcggacgcaactagagtcggagcagcgagagacaatcacgtggagcagagcacagatcctaacagagcggggaggctgtctcgagacgagcgggatacctgcgcttgagagggagacggcggcaatgaaatcaagatctcaccgtcgacaaagcctctgtttgatcctctctacagaaacgtacttcgtccaggaatttcaccacgatgtgggcactctgcgttcgcggcatcattctaccacttgaatcgaaaacgccttccacttgctctacacatcctgagctgcactccaacgtccactggggacttcgcgaggcacggtttcatggatctgctagggcgtcagttaggcaaccagtcctttctatacgcaaggcggccatgtaaatactgccgggtatacggaacaacaacagacacggataactctgttccagccgcgggtgtttctgttccacgacaacccgttcacggcgcgccggacggtctagtggaccgacagtctcttaagagtcacttctgcggacggagctttcttcttgaatctgcacatgaacgaagcaaaagagctttccatccttgcttcgggaaaacggagaaaagggcgattccgcggagccgagcggcacccgcgcggtgggtgttcgtgatctccgcgggaacgcgagacggagaggagagacgggtcgccacaaacgcaagaatggacgcgagacacgcaacaacctgccgaaaggcacggaggcacatgctgcgccgtgtttaccgcgaaaaatccacgcagacacactgataactgggaggatctcatcccctcgcacggcggttccactcacacgtatcggaaaggacgcacacaacgctgtcaagcatagatccaagtctgtaccagcgccgagcgcgtgtgaagtcggtacagaagcgagaccccgatgtgccgatttcttcggggtcttgacggggaagtggagggacaagcagcgtctcgaccggcgcaaggcccggcgaaaacgaaaatcggcggatgcacgaaaagacttttcctgccgacctggaagaatgatcgaggcgggccagcggcactggaaggtgtacaagtccgctttctgcgtatggtttgtcttggtaccacagtaagtcccttgaaacgtggaactgtgcccgccgaagaatcggaggagtcgagggcagcgaaaacgagccgagacagatgcaggcgagtgcagcatttgaagaggcatccgcttcctccagaagattgacacctgcagtgacctatcccgttcccggtgctcttgagccttgacgttccgtttccatccgtcaaaaacgcttcatcagggaaagcgccgcggaaatgggttcgcgacgcccgcagaacattcgaaaactgggagaacagctcgcggcggccgtctccgcacccacctgacgttcggcgtccgcgcgttctctggtcgcgtaagccgcgtcccagctttatcctgccgtttttattatacaaattggcagaccattcccagcgctgaacttcccgtccgtactgagaaccggccaccgcgcaaactcaaaccgggctactcgcgcataaacatatggctgtgagcgagctggcgtcgcgcgtttagagagcgagagggcatgcacagctggttttctcgcatgcggcccgccgtctcatcttgtctacgcagatgctgacacacgacgattttctctggggccgacagcgccttctagtggaacagaaatggtgggttcctcgcttcttcccctgtagatcttgtcgttcttccctgcggctggttcttctgctgtccgtcgtcatacgacctgcctccccaggggaccctcttcttccgcgggaacgcccgtcgtcgccaccgtgtctcttcgtcggggtgaaggcctggaccgttcagcgtcctcgccccacggcaaatctgcgaatctcttgacaaatcgctgtggcataaactcgttttccaccattccttctcttctgtcctgcgtccccgcgtccgccataaagcctctcccctcttccctctgggtgtccgccgcggattgtatgctttcttcaccctgacgcttccttgtcttgggttctcggtgctctgcatgttcctcagtgtctcgctttcacctgaa

SEQ ID NO: 3397 - DNA, 5026 bp, Toxoplasma gondii
  source 1..5026: mol_type = genomic DNA
agatctgaagcgaacaacacgcacatcattttccagagatgtgtgaacatctatgaaactcatcaaaaaacataaaccaaatgacttcacaatctggtgcatttgccacagtctacgaatctggctccaccgctgccattaaatcgctcactgcgcatcgccagcttaccgaatattcagtcacgacggccagaatctcccgacccaaacatatgtttttcactgcttgacgtgcccggacctctcctatgaacaaccgtttttgatcgtcccagagtttgacttttttggggtctgcttgactaactagagcgaatacgttagttctgaagagcatgcctgccacctcataacatccttcaccccacgccggcacctcgcggcgcataaactcggacagaggagcgcacgtgaagacgcgaaagcccacagacgtggcgcacacaaaacatgtattgtcttggttgaatgaatacgattgcaagtacacagggtccagtctgcggctctgtattagctctgagacaggtgcctccgcctcctggagatggcaggaactgtgaggaaggcaatgcggatcaaacgacgtcacgcggctgctttgtggtacaatgttctgcgaggtaatgggtggttgtggagaatcatcgttgtcgatcacgcctgtccgtggatctgaactttcaacttctcctgtgttgctcggtgagagccacgtgtcactcgcatctaccgttgccggttccttcttctctcctcgattctgctgttggaagtcagtttccgctgttgaggggcagacgcctgagtcgaacccatattcctctccagttttggctaatggaaccgtgcaaatgtattcagtggcagccgcctggacgttgtcgtcaagcgcgagatcgagagtggactgagctttcgctctaggatcctgaatttcaatgttcgtggctactgcagtgctggtgtcgggagagtccacacagcattccgggggtccaagaatctcacaagaatgcgtttcacgaatccgttgacgactcatgtttgctctggttcaaagaaccacctcagaccgtcctctacactcaactgaaaaaagacgaaaaacaagagaacagttgcacccgccaggaaaatccggatgattgacttgttcttttacttgctccgcaacatgaccagtgtaaggagaacaacgcggaaaaacaattggaactggacgacacggcaacgtaaatggaaagctgtaggagacaaacgccaaggcaggccaggaaaagcagccgccagtgagtggatggcagttcagcaagccaaaactcacgctgacgctagtacaatggaacgagtgacatgcattgaagactgagacgggtcacgcgcatgcgtctcggttgcatgtctcgcctgtgtttcttcagtcaagaccactgggcagaaagttttcaaatagtcatcgcagcatacgctgctaggcttcctcgtaatgaattagtcagaaaaagctaacagcagcggttgctatgggcacttctttgtcgctggtgagggcgtgaagcgtggcttcctactccgagctttgggcttttttccggaaatgctacacgatcgtagcactacctgaatggtcctgagaccgggccatggcgggtgcggcgtcatcactggactcagtacaacaaaaactatacaccccttcatgtctactattctgaccttccatcctcgtactctgagggcgactgcctcatgagataacggtcgccgcaaggggttctatgagatcacgtaacacagacagcatccttcctcatgctgcttgatatgacgaacgaaaagtgacgtttctcagtcatactgtcatgccctcctcgtgctttgacttgttccaatttgcaaagacagcggcagcacgtacagtgtgattgacaacgacagtggcagcacttacagtgtgcacggcatctgcgtgatgtattgtggtggaacgcaacacggtaggacgaggtggtcaaggcgcactgaatttgttctcgctttccaaattgccgttgttttggtcacgatacagtcgtaatggtaaaacaatatttgtgtgacatttcgctgtgctgcaggccagcgaattctggtgtcgtatcaggcttgaggtaagcttgataatcaactggtccatagcgtcgaactcgcacggcctccgcttagtcgcgttttaaacgtgggaagtaccgggggagacccctggatgtttctctcaccatgccggtgaagtggacaaacacaccggtagtgaccgacggaatatcgtcgttccttcatcatttgttttagtgtgcaaattgtacgtaatgtacttcctcctccacaaacgctcgttccagcacccgccatgagtcagccaaagccagcaccatcgcccagataatatttttgttcctgtgtgccataacaaagactttcttctctagtacgctctgttgcttatctgtggataacttgcacggtgcaggatggggtaaggaatcgcaagcgctgactgcaccacaacttaatcatttgtttcgcggtgctttcttccgaatgagacaggatcaccacgattattagactaattgcgctgcgtgccggtacactgacaatcaaatgcgctgcgcgccggtacactgacaatcaaatgtcttgagttctgacgcaacatgttttatagtccacgttcctcggtcgaactgtcacgcgcccatatggaggtattgatctacacacaagcagccacagcttagctagtgaacatttcctcaagcatgcagtccattttttgaaaggagccttaaacttctttctttatgaggtggtcaactgcgacgcggcagcagccgcaaacgccactggcttcgaaaaaccctccgggtgttcaaggaaagacacgatcttcttcaggtgacgttagcgactagactgttcctctctactttttccagtctgttggctgtccgcctaccgcgtggcgcgatcagacaactattataatccctaatgtctgtcatggtcttcagccaggtggcatgcacgtttattcggtgtcaccgaaaacaagcctacacgccatcccgagacttttggtttctcctccgaagacgctgtatcacagcagccccgttccctgccgaccacagccatattgtctacattctttaaaataaagtcgccttctttgcaggattaactgcgacccagaaacgtagacgcaaatggctgattccaggtgaggaagagtccactcaactttctggcacagctttcgcggtccgtctcttcaggtaaaacagaaaagcagcgcttgtgtttaccattcacttcgttcgtcgtattgtttctaaagacaatgaccaccaccaggtgcataccactgagcactatccgaaaaataaagctgccgaatcaacataaagaaatgtgaattaagtgtaggatagagctaagcagcgtgtgcgctccgaactcatagactgctacttccaccgagacgtctctggtttgcgtggcgttagcgaacagggaaacgttgaatctgtggtcagaagtgagacgtcggacagaatgacagaacacacggatgccacaaccggccaacctctttgatatccccagattccagaggcacgctttcttttgagttaccggacccaacagatcagatattttgatatctggaggcatcatctgcctacatatctacaggcaagacattttcacgctcttcacgcatttgcttctaaaaaaacgatgagacacctgtgcgaatattatcaccgaagacaccaacagcccttgctgcgcttgttggtggagaaggcaaacatgcggaggggttggttctctatttaacagagaacaggcatttcaggatttgggagcaaaaaatagaggcagcaattcgggaatgggaacgacgagacacgccaatttcgtgctacatcagcttcagcgaataggaggcatgtgcgagatgtgtccgactccgatgagcacacagaggatgacggtgtcgcacagccagcactagcataaaacaactgaagacagaatgttcagggagcagcaagaaggaaaccgaagagacatgacgacgaattgtcactgcgaaaagccatgctatgtcgagactgtggagacaaaacaacagctctgccgacttttcgacacagccgcatgaagtgtaaacgggatttgggttatgcgcttttcgttcgcaactctatccatttccgcgacattctgttccacgaagaatcccttttccttttcagatctagcaacgatactcgcagcacggaaagagagcacttactccctcctgccctcctgtcttccccttggagtgtcaatttctattgactttcctgtcgattctggactcttatcgcgtcaaagactcgcctagatagccttgccaggaaaacggcacagacatgtcatacacccccgcaactggaagtttctgtgccagacatatggagtctgttttggggggtgcgatgggagacagctcgactgtcaacggtacaatctaggtgatccgtccctccccaagaagacaatgagtgagggacagcgattacccgtctccttctcaggggtttgaagacagatctgcaacacgaactccgtgcttttcttgtcttccgtcgccgtgccgctttctaatcacctttcacttcttgaaggtttccgaatgtcaccgtgcagtcgtttcgttctttctttcatcccagggcctgtgctgtccaacacggccatagcgttgcacgagatagatcttgcttctgcactggcttcttcctttcccctgctctactctggtgaaggaaacgaacgtgttttttctcccttctcctggtggccttctgtggttcgtgcgaagccaagaagacgggatgaaatgaccagcttctggaagggagaacaagagaaattgtcggtctgggtaataccccccctcgaacgtctgtcccttaccccgcca

SEQ ID NO: 3398 - DNA, 4702 bp, Toxoplasma gondii
  source 1..4702: mol_type = genomic DNA
tcttgtgtgtaagacagcgggtacaaccgcaaaagaattgatgccggaaatttaatacgctcgtcactgtgcgtattggctgcccatccatcctgaagaagacctcgccagtcaaaaaagtttttcagttgtcacaactcgtgagtgctacgcagatgcagtgtgttgtgcggcggataccttcgcgtaataaagtccatgtctcgagagcgggcgagggcaacgtgtcgaagacgggtcacagacccactgaagcatcaacaagagtagcatccagtaaagtgtaggattaaccataatgcaatctaaatatcaaactgttcatgaatatcgtttaggtcttatttttgtctgcggtgtcacacggattggtgccggcagcatactgattccacaaggctgttcggggcatatatgcccttgtgttgaagctaagactgcgccgttaataattacgctcatttatctttcacgtagttttcgctctcagacggagttgtgtattgactaggaaagccaacattccagctagaactccacttctgattcttcctcttcggtctcctcttcgacagcctttttctcttccgactcttcgtttttgtgatgcgcctctggggaaaccaggctatgtactttctcctaacccaaacaatgctgcaccagatcttgggctcggaaagaaacagcactctcttacttgtagtttatctgcagcatctgatagtccggagatcacactgtcacttttggtgccttcttcagccttcttcacgtactcggccgcgttgatcgttacgtgcttccctacagaaatcaattcttacttcctctgaacacagtaacactcaatgtggaaggcttacccactggctgttccttgccgttgacctgggtttgattgaaaaaattgtcttatttttgagttcagtctgtactcggcttacctcgactcgcattactctgttttcatccatgctaactttgacattaactcttgctggtttcggcttcttcgtcggcggctgtggtccagtggtgtaacagatgccccatttcgagatgttaagcgttatggtaccggcgggggcggaggaataatcttctcctttttagcttctgcatacgcaatcacggtttgttatatttcgttagtaataactgctgaggactcaccagtgacagcggttttaatgcttggtaacgttcctgtggtcacgtgactgaggcagtctcctttttgaatcataggctggtactctaacctttgattcccatatttcggcagaaccaggcctccgtcatggctgccacaagcatgacgaacgtggtcaagacgttcaacagaaacttttcaccgtcaatccagctgtcacgtcctagtcttgaagatgcgcagagaacttgctcatttccccgatacttgaacgagaaacctattgcctggtcagtgtaccctggatgacgtctcacacaacgagtttcttacaattgggtgaatcggcaactgctccaattggcaaatccacgccttcccaaaaaaatgtcctacaaagttgacaatgtgccgcagggctcctaaggagaaaactcagtgcaacgtaccctttcactgtcttcctgtagtgaaccgtaaaggcagttcccgttattcgacccattgtctcactgcggcccatgcgaatgagaggaacatgatggaaatgaaaaagggtccaagtaaaacctactctccactgtgcttcagaagctcagaagactgcatggataatgagacattcctgcacgaaccaccgttgctctaccagttacctgtggtacaaacttgacaggcccgattttcaaaatatcgcactctattgaggaaccaggcagagattcttaaaggtaccggtggctttgcagttgaatcaaattcaggcacctgctgttggggcttctaaaggcctctcagcctctacctttacagcttctactagacgtttgacttggcttgcttcagctgcaaggtacgtgcaatggcgttggcttaagaccagggccactgaggtatgtttaccgtccagcaaatccgcttgtcgctccattatattcgcctgagttcggtcgaaactgtacagcagtcttgacagtggtagggcggttatcaattctttctaaacccgacgcttacacagcctcagcagagctttcctctgtctccctctgcctctcatgatctgtagacggtacgactgctgcttgtgctcctgatacgggtcagcaagcactgctactcgcgtcacagtgaatgaggctcactgtcagctgctgctcgaagctgctcggctaattttctcttcttgtgcgctgtcagcagcagatgatcatatctatctgtgttcaagatctgcgggtggtgatgagaggggaagggggtggatgtgggatcaatctttgctgagaggtttttgttccgtcgagataaagcacatacctcaaactgggctcgcaggtcatcatcgttatcaactgcagcatcaggaactgcattgctaggtactgcatcttctgtctgaaggaactgtccgaaaatccctttcccattctgacggccgggcacaatgtttgacatcacttagttcacctacgcaagcggtagcgactcacgcttgtggcaacggcgtctggttgcgaacctagcccgaagaggcgtgcaattgccgcggccagctgaatgtcgccgagggcgtcaacaggctttgataaggcgaacgccgacgccactgcaacaaatgctaaagagcccttcattgcacttgaaagcattgagttgggtgaaagaagcccgtctaaataaaggtactgttacctacaaggtgcgcaggtgacgcgcctgcttccaagtgtatatacgcgtgggataagcggatcgaaagcagccccttttactaataacatttcatctgcactcagagaaattcccgaaacataatccctttacaagggcgaatactctcaattgcgcttctctctatcggttatatgtgataccaaccacagcatctgtgcagtctggtttcgtagacctattcactcgtgcgctactaaggggataggcgagagatgtgcgtgagaccgcccacgaaagtagaaatgcattgtgcgccacatttgaagttggtcttgtgcattcctgtcgatgtggtgaaggaagcatgattatataggttgcaaacaattatagtgcccagctgctaaatggagctctggtgcatcgtgtctcggaatggagtcattttgctctgcgcctgagcagctgaaacaaagctgttcggttcgtatatgagtttgatcggtccagaatgtgctgccctggaggttgcttatataaacctagaaatccctgcttatagtgcgttatagggtatccagcttcagccccgtcggggggcatcaatactttctcctcgtaaacgctggtatcccctcgggatcgttggaacagggattttgacgacaccagctgagtctgcaataattcgtgtggccgccgcgtttttgtagagattcacactgtgagcccaaaagtgtttactcatgcctcaagaccgtttcgtgagactgaattaaaaacgcccgctcttggaacttgctattagatcatcatgacggccctgacggaacatcgggtttctaccccgtccattatgtagtgtggattgcacgctagtagaaatagaacaagacaaccgaatgctagttttgtggcaccgatttacatagtacaagaactacacacgacaaacgctcggggatctgtaaccaaggctggcaacatcccttgagagaatcaaaggtgactttgtgaacagcatcctcccccttcccggtatcatgcaagtcttgacgcatgtgcacactagtgtcgattgagcaccgttttcttaggagactcaccaccgccttaggagtcacaaaacagcttaacgaagcttctgcgaaaacgaccttctcactggtcggtgaaagcaaagcgttgctcggagttgatggaatagacgaacaaaaccagtagctagatgcaggtcagctggctcagcacggatgcctctttgcgtgacctccactcacgacgaaaatagcacgaacatcgttatgacaaaatatccttctaaataccacaggagtcagagctgttcgcatcctttgtttatggccaatgctttacctgacctcctactcagcggctagattcaacggctcctccggacgacgctgtggagccccagaagcttttgtgtgcgtccggtagaccggcaggccatccatccaagggaatgatgcttctctatgctccagtaaaattcacattggcttttatcgagtaatcaagaagtcattgccaatcatgaaaacgtgggtcgaacatgccaggtagagctctctcgacggtgtggcgccgcaaatcgatttctcttgtccaagaaacaagaggccaatggaccgccccaacaggcacggacaagcgccattgctcgtacacatgctgaacattttgcgtgaagtccgatggaatttacacacgagacgcgattttagtgtctcacatcttttaacttctcttttctttggtggccctgtaatttgttgctgcaaggctgcctagtacgtttcttgcgttccgtgaggactcccccccccccttttcagacgcgccaga

SEQ ID NO: 3399 - DNA, 3179 bp, Toxoplasma gondii
  source 1..3179: mol_type = genomic DNA
ctttacttctcttccttctgagcgtgtcgtcagccaaattttggctcgtcttcaagctccagtacagggcaaacctgtcgagttcttcgtctatcttttcatattcttctaatgcatctccaagagatctgtccaaggttccacggtgctgctcagcgaacgctatagctctctcctcaagtctgtccagaactgcgtcatcagcggtatttcgctcgtcttctcgcagccgaggaaagtgttcctcgagattccatcgtggtgcatttctggagcaggttgtgcctgcacgtaaggcgttttaattgtcagagctgaaatgcatatgcttccccatgtcggtttcaagagtgtccggatatagttttctcgcttacccgtcacaaatgaagacgtgatttcagtctcagcctgtagaggacccggaaacaacggagccaatcgcttgggataaaagtgttaccagggttccctgcaggtctcttcagcggaagtcagccagatatgcacctctcaatttttaggagcaataccgcagccgacacaaggcttgttagcgtcattgttattttgccggaatccggtgttctaaataacgaatccatactatcctcaaccgcacatttgagcttacctgaaaatctttatcagacgtcccggaaacaacgtagattccacagtatagaaacggcaccagacgcacacatttgctcttcatggtggtcaaatacggccaatgacagagttcaaatgcacttccttaaaagacgtctgcttcgacagctagtgggagtggtgccacaggtgaaactttgtcagggaaaatgcagtattcgccgtgaggcataatcacttgatcaatatagtgcctccgctcttcacagtcacaccagttcagaggtaaatggaaacttcctttcacttctaaaggcgttaaggctgaaacgcgtgagcagatgcacgtacatagcttagtcaagagagttggaacaattattctggggacccgatcagctgtatggatttggaattgctaacgcccagttgtcgtggaaataagaaggggacgtgtaagatgaagaactcttacgaagtgacgaagcaaatatagaaagtgaggcgatcaggagtttataagggcacaatgagtaatcatccaagagttgattttctcgttttacagttggctcaaaagtcgcaatggtcatacgaccctttgttagtccgatgtcagtgtccgcaagtttcagtggagtccacagtccacaagcggggcatgtcatatccgacaaagacaatttcaccgaacaaaccataggctgccgctctctctctctcgtgtctcacttctgtctcgtgcattcgtttctcttggcgagttgcgcaagatgcccgcctctgtctcatcttcctcgtggagcttctctgcagtttttccgcgaacgcctccaaaggaagacggtcggcagatcgtaactggtttacctggactctgaactacgtcacatacgtgaaggatacagtgtgaatatagacaaccactgtactcacgcatccttcctggggcgtagcatatgagaccagaaaattcattatgaaataaacacgcgaaaacggaaaccaccagttttgagagtctacagcatgcgctggcgaacactgcatttaacaagttttcttacacagttttacttcaaagcactaaagtggtgtgcttgtggctgatgaagtggttttccttgactgacgtcgggaacaccttgcagcaaacagcccgctgagaaagagtcttttcttcgatcatccatctgattttgcaaaaaatggagaggcctcaggtgtatgaagcgcgctcccgttcaactgcatatgaacctaggcacttctttgccataatgcaagatgggacaatacaaatttccgtgtcagcccgctatcctagatgcggcaatgaagtccttcttaagcacacacatgagtggctgtccgttgtgcaacgcttgggtgaacgagatatcaacctggttcagacaagggaaaaaatattcattagttccggaaacacggacctgtgtggtgcgtcaaaaatgaagaccatgagtaaaactgtcaccttgttggagcgagtgtactgtctgacgttacggatcagggccaccactgacacagttgctgaggaatacctttttataaagaccgggcacgaaccacatccctaagatgaaactcattggttaatcttacgctggcgtgaagccctcagcgcttcgttgttatcatgttcagctctctgacagcctggcgattcttcatcagtccccatcggaagacgcacaaagtttgtcaatacaaacaactgatgcatgagcaacaaatccggccgatactgttgcggccattaagcgaacccgacgtgatcctatgtttgagaaatgtgaaccagatacacaggacttcgtcggctttcggtaacccgttctgcgcagcgcttcttcggttcaaagtaaagttgggtgcccattggaagccctgaaaactcaccgagactgcatctcgcttctgttttttaattgggcgactcaccgttgtagcagtgcatctgattgccacctacctggacagctggtgccgtcatctttcgtggacacagttgacagagcacgccgtgcactatctcactttttctccgactttgatggtatgtcgcttggacggtcggaaggctgacactggagtctacaccattcgaattgcctctttacatatccgctagtgagcgacaatgtacgctgtagcgtagggttgcagctgcaacgaagcatcaatattgtgactcaggcagcaccagctctcccgttcgcaatctgtcatttgaaaacaaaggctggcgccatttcacggccaacgcgacgccgatgctcgcaggcgctgccccggcggtgctaccgagagggtggatctgtccatggttctttcatttctgtttcaatcgtttatatcgctcctcgtatgtattgatcttcttgtagatatcctctcatcgcgacttctgctagtgtcacgagccgctcgcacagctgtgttacccgatcagagcttcgagtcccatgccagtgtatttaccgttgcgatttgcttattcgtaagtgtgttcgtccgttgagttgagaatttcgcga

SEQ ID NO: 3400 - DNA, 4831 bp, Toxoplasma gondii
  source 1..4831: mol_type = genomic DNA
gtgagcaaagtaggtgtcccaccagttgtttcgctgctccacctctgcatgcagagccgcctgctctgcctgcatgcgaacctctgcctctgacccagaggcatgggcgaggacagaagagtacgcctgtgacgcggcttgcgccaccaggatctgtgcagctggaagaacgacacatcgaacggcgtggaaaagtgccgcgggagtcaaataaagtgcatgcagagacgccgtcgtgtttgcgttcgcgctgataaaatacactcgaagagccgccaactcggcgctaacggcttcacttgaagaagaagcgtcttcagagcaacaggctgttgtggatcgtgaggtggttgtcgaagaagaggcgactgtgtatgaagcgactccctgcttcgttcgaatcggttgggtcttctgagctctgtgtgtggaggctgcttcaagagctgcgatgcgggtcaccttttcgatgtgctggcggcgcgcagaggcggggaggagaagcgcaggaaggcgtggagagacgaatgcatgcacgtagaaccagaaaagcgtgaggaagaagaagagaggcagagagggagagagaggacagaacacgccccacagcttgtccgtcagccgcgtctcctcgcaagagaaggagaagaaacgcgaaagagccgcaaggccgtccacaacgaaagccgccatcctggaactgataaagagatcgacaaagggaggtgaaagggagaaggaaaagaagggaataaaacggtcgctgtggagacaccgacgaaggatgtagaagtgaaaacaagtgggcaatagcttagaagaaagcgatttgggaaaaggactcacgatcgtgtttgacaggagtcgagttcttcaagattgaagggaaacgttctcgggatacgggaagaaatgccagagcggaggacgttttgaaaaaccggttgggaaaagctaaaaaaacaaaagtcagcagcaaagggtctctaacaacacagcttctaaagccgcgaatgcgcacaagaacccgacatgcacgggcatactgtttcgtggatgtgtgcgctctacacgtggacaagaacacgcattttggactttgaactttcttcaaaagcgtcaaagacaaagaaaaaggacttctgggaaaaacaaacttcttgaagggtgtgtttgtccatgcaaaggccaagagtgaaaaaacgcaccgaacttgtcgagagacattgggagagtccgtacgtttcacttctgacaacctgcagtcgattaggggatttctgattttgcgagacaaagccttcagacggaattcgttagcctcattttgaatttctcatctgttgttcaattgcaaggcgcttccgagaacctcgagccgcgcaaaaaaaaacagggctttttgcgaagtagagacaaggtgattcgcacggacgaagcttccccgtcccctccgactgccggaaaagccaaagtcgcatcggttactgcacaccccgtttttcaccaagacttaactagactttccgtggaaagcgaatacctgacagcttcctcgtggtacgcgaaaaacggctgaagaaaatagttggtgcatgcacagctaccagaccggtttccaagctacagcgtgttcgcctcgctcggaacaatatgtgcgaagccaactcacatctctaatttcacgttcaaacaaaaattccaagtttatgtctacattggaacctttttagctcaagatgtagagttctggacctgtcatgcaaattgtaaaggggaacgatgcaaggatgtgcccgtgcatgtgtggagatacaaataatataatatatgtatgtatatagatatgtatatatgtatcgaaattctgctgagcaatcagtgacagtcccgggttcgatgaagacacattgttcaaccttaaaagatctccgttgggaagcggccatgcctcgttcgaacaaaacgggagaaaccctctgaacttgagatacgcgggctgcgttcttgcaagccatttggtagattcataggcagtgtttaatttcttcactccagtttttgtcttctaatcggccaactcagtggtggattgcctggagctttgctgtctacactgacatcgagccttctgcggagtaataagaatttcacgggtatgttctaccggtactggtggctatttgtgaagttcgctgctctaacaaagtggtagcggcgtataaatagtagaaagaaactctatctgcctgagtatctcagactagtttctgtggctcgcacctgtcgcatgatacgccgtttgaataactgaccagaaaaatacagcacctggcgtcgaaatcagcgtgctccgatgcagtccttccatatgtgtgtgtgtatgctgcttcctcccaataaatatgccgccttggctcagttgcgtatagtgcggctgacgtggaatgcgcagacacagaagagagaatgaggaaatcgagaggaaaacagcgagaatgggtggtcgtgtagttttgagatcacgacagggaaagtgaggcagccagcagaaggatctccgcacttcccgacccgaagtatcgcatcaaaactccgttccctgaggtgaagagcaactcctgccagtacaacttcataggataatcaaggctacttcgattctcgttggtgtttccggtttttcaagagttgaagtcatgctggcagcagcgtgctgtttctcagaaacttacacgtctttttcacgagcagcaacttgcttcacaaaacagaactggagtacgactctgcaagcgtagagcttgttgtttcccacatttatagtgcatgcggcacacaagcgcagagtttctgtagtgcggctgacgggaaagaagccccttttcaaatggattattctcaaaccgtggagaggcatcactctctgagtagactctacgacatgcatggccccactgcgcagagcgaccatgccaaaacgctgggcgtttctctgcctcagactcgaaacgattttcgtctatcatccgtttctcccatattcacctgaacgcgagtttgttctttctaccttccctgcctctgttcgtgcacaagtcttcccgtctaacgtcccttccagttcattttggacatgaagtccgactggagcgtgtcgctcgaggccgctgctcaaggaattcgaacgaaagtaaaacttcgcggattccccgcgcaagcggcctctcttgttttctgtacacgccgcgtatattgtgttctgccgcacaaccctgttttcataaaactgttagtagagcggtcgatagtcgcttctgtttcagtgacctcagcgagcttcagttgaaaaccctttgccgtcccctacatacgctggaggcccgtcaattactttagaaagtacctccgaattcgatgcgcagttcgcaactaacttcctctcttctgatgacttcgcaggattaattagatcgaacttcgccccattcagttccctcctctgtttttctccacattctacacgccattcgactgtaaacttcgagtgtttatcaaaccgtgttcatacggagagcaccctgcccccttcaaacgaggtcgcgtggcgggtgcgcgccgaaacacggaggcttttcgggacgttttctcgttgctgtgatgtgccccttgctaaagcttgcatccacaggcacatgcaaaccgtaaatcccctgccggtcgcaaatttaagcgtcgagactcaaacccctagccgtgtgtagacttttgaggcggctgggaagcgagggaagatgggtgcagtacgctggttcatgtacagtaaacacaaaagcacggctgccgcaccgttcacctcaaagtgttattagttcgtagtcccaggtaacgtagtggaacgaaactgagactctaaaggtgacagatgagttaaagcggcgtcaagagacggcagccattcccttggttcccacatgcacatcgacgctgttaccttatattcgggtagggggcggaccatcctgaagcggtatagagaggagcagccagggaagatatcgctcgtcggaagagacaattgggcggtggtgaaagtgaaatctctccatctgctactttttttcgcataaactgatccaccactgcagaggaaaggctcgatatttcaaggagttgcggaaacggcgcgaacgtgtgcaggcagcgtgcgagtcttgatgggcaagcacacctagcgaaaggtctcagcttgtcgcagctcttgacgcggtatcgagttgacgatttgcatgtttttcgccggaacctgtgtcccggacgccagcagaaggcgctgtcgttcaccatttttttgcgaccaaccactcgtggacatttctcttgcgcatctccgtcattgtaggacgatgttcgatgtgctatgtaggtgtctagacacccaacgttgttttgctctagacatctgagcatgtcagctgccgtgccgccctcggtggaccgagtgaacgctttctcttgtcaaagcaactcgatatcacacggaattatgaggacgcccggcggtggctgttggcgcgctccctgctggtgatgtgagaggctgtgaggacgactcttgtacagtgtttgagccgcgtattcccgagcatccgatgtgtcagagtggcaccgcgagtgcggttgtacgctgtttcgtcagacgcctgtgatcagggtttctcgtcgcgacagtcgggtcccgggcctccggaggttcttttccagtcggctccacaagagcttacctttaccacccttacccctgctgtttcttcctcctatgcctctaata

SEQ ID NO: 3401 - DNA, 2290 bp, Toxoplasma gondii
  source 1..2290: mol_type = genomic DNA
aaagacggaatcgtgaaacatagtcgtacgcgcttactagtacaagaagctcatatgtaggcatgtagtgattcagacgggaaagcgatacaagcggcatcattgacataatcaacagtggattgatggagagcacaagctcaaacggtgcgttcggtccgttcacttaagtggcgatatggcttatcggctagaagtagatatatgtacgaggctttacctcttgtgaatgttttcgggaatgtacttccgaagtgtctgttcaagagccagaaatatacaagcaaggctccagcttgtatggctccgaagtatccgcttaccgcagacatgtgccgactcctataacgatcatcacaattcagcaaatgattgcccaataaaacattgctttcgatctacctgtgcagattagaagcgaaatgcccacaaacttccagaagttcggtgatttgcacacgcctttgataatctgcaataaagaaaatcgcgtgtgtgtcggagggcggcgcacatcatcgaaagcaatcacctctgcagggtgagaagcctcaatgcagaaatccctgacgtcgtgggtaccctcacgaacaacgatttccctgaggcagcacgccaggataaactggatgaggcaacaggaaaacgccagcagtaggtagagcctatagtaagggccgtactgcgaggcacatgcccgcgttcctgtcaggagaacagcagagctcaaggctgcacagttgatggtgaagtacctgcagttccatgcgttcacatctgtttgtttttgccttgcaattgtgcggactcacgagcaatcgaaggcgggggaacgattggcttttgtggtgtacctccttatcccaagtttgagaacattactggtcattgcaacacccataggcaacactgtccagagcactaccagaagaagggctgcttcagacacgaataccatcgagagccggcctactgtcgcaaagatcgaacctacgaccagtgcccatttcactccaatgttgtcaataagcgggccgaggacaaccccatacactagaaccataagtccatacataccatagagccatccagccaactggtcgctgaaactgaatatgctactaagaaacaacacgaacacatagtccagagcgaaagtgctaaaggagtcggcaaactcgcacgcaagaataatcgagagctcacgaggcgccttcaaaagggcgctggcagtgcctgtcatgcttgtaaggtggacagggtttccaactgaagctagtgtccttcgtcctgaaaagggaaaatagatctcgcctactgtggctcgtcagtaggtgcggtcctcatccgttgcctggatgtacaccgtaacaagttcaatgtttcgtcctcaaatcggtcagtctcttccgctcgcatgactaagtacacctgaattctaagagggacaagcactggagggaaaaattcaccttacggaataagggtcgttgtgctttctaaactgtggttgtgaccgcccgtccaacgtggcggccgcgcttttttacgcaagcgaactgcgactagcttaccggcgaagcgagttcccgaccccgttgaacccaggaagaaacaccgtctttttgttgttttcaccttccagaccagtttcaaatgatgcttaaggtggactcacttctcatatgcttcgactctgctttcgctgtgccgattcactgttgaccagcgatagtcgcccggccgccgctggtccggctgcaccaagaactgagtttgaagcaatttttcattattaatgggaccttgcgtccacctcaaggatattgcagaaaccaagagctagcagcgttggcggcttggttgtgtttgttgtggcgtttcaatggtaccatagccacagggtgttgtttgcatgctgcttctgtggttttttatatcgttcaccgcagagcggtcgaccatcataatggtttttgactcgctttaccggcacaccgtgataacagttgaggagtgggtgtgcagttcagtttgatgttgttcctatgtcttctccatcacgcttcacctctattaagaactaccagtctttcttttgtgtcctaggctctgcaggtctctctcgttagcaactgctgcgattattatccatcagcttagcaattcctgaggagacttgttcaccaatagtttagaagaagggctctttggccctattttaaagctgcgagtcaagtgattttataactgataatcgagggccggtaccccgaacgactgcaaggca

SEQ ID NO: 3402 - DNA, 3632 bp, Toxoplasma gondii
  source 1..3632: mol_type = genomic DNA
ccttgtacagtttagagctttgcctctccaatcttatgctcttctctctcttcttccaaattcattcgctctctcctttctgcagagaaagctgctgtaaactgagctgtgcgtaggcctgttggattctttagaacaacagaaaggaaactccgttgcatgcatgtgccgcgtaaaagcttttagggcagcccggatccgagggcctttacgcaggtgtgacgcaacagaattcaacaagcattctctgcctcgacttatcggctcgcttgtccactgatcaccctctcttctgttcctttatgggacttctctcaccttgtctcatccttacacacatcatacatacacccacttcctactcacacatgacccgtaaacaatgtgtatgcatgcatgagaagagttattcgaactagctaagaaacacttgacttccctcaaagctcgagtaacattttcctctttgtgcgtaccgtggtcgcggaggtacttggccatgacggcaaggttccaccgatccagaggtccccggaagaacttgaaccagacgggcatcagcgccgagctgagagcgcgtctcactttgccctttgtcggcggagaagggacatactggacggggctgttggcggtgattttattcgagtaggaggcaaacagcttgccgatttctctgtggaactgcgccatcttggtcgacttcgaaagcggttcctggaggaatagatgcgctagaaccgaagcgcagcggtgacgcggctaaacacgcaggtgaaaaaccggaaacaaaacgcgagaggaagccggcaccgttttttgtgcggctctccacaacacatgcacgatatgcatgtaccacaggtccacgcagtctctccaaattgcgcagcgaaaaaagtagtggcagaaacacagccaacgcagaccacaagagttgaaggaagacgtgaaacggtcagctccgccttctcacaaaaaggaggtttctgtttcgggaagtggccgagaaggggctgccgaaaaaggggagaggcacgcgaccgatctccagggtggcggcagacggggagaggcaaaagcgaggaaacggcgccgaaaagtggacgttgactggaagccgagtttcccgtccctggccgaactttgtgtgtttttgcttgacgcaagtttggggtgtggcgaacctaagagctccaccgatagtcggcagcggctgcgcgccttcgcaactgagtttcgtccaaagggtgaaaattacagggacgcgacaaggaaagtcaaagaaacaggaacaagggcagtagaggaaaacgcgccttccctcgcttttctctccaaggaagctctcacgctggacacatgtccgtaatgagaaaaaaccctaccactcgcgccgcccttcatcctcgccacgagcttcttatatacgccgaagcgcgtttccagtctggctcacactttcagtgtcatcgtgatgcgaatgaatctttccctgcgtccactaacacaaacaagataatgtggaagattacccgtgacttgctctcaattatgcctcttcaccgtatgatacacgaaatcaagggccgtttactcgcatgtccgcaggatttccacatctgatagcagcactccgaatataagccgtctcgtgtctgaacgagcatcgggacacagacattgtggttcttagtcagtctgaagaacacgtttatcgggatttccatacgcagacgactgattgttactctatttgaactggatatgtgcatgcggctaggcagccattatggatgatcgtgcactgtactgcaactatacatttgtggtgcgatctcgatgtctagtgtgtatcagtaggaactgccgaatgttttccctttcttcactcgacactctctgggaagtgatatgacttcgttaggcaggcaaaataagaacgcaggagcctgtgtctgtcctcgcgtgatggcagtgttcgcaagtcccgaagggggggggcgtggggtcgccgcagtcagtaccacacggggaagggagagaaagagctagacagagaatctgttcgcgacggtgcaagaggagaaaaatggaagcccttttcgggaaacgaaaactacctgtgaaacggctgccgataatcgcttggacccgccatgtcgctacgccggcagatgctggcacagaacgcgagtcatgcacagatcctctaaaatcctttataattggatgctgacgagagaatactaccaatgcagaaaacacaaatgtccgtcactgacaagctacaacggggattcgctcgcgcgatactcgtttgtgaaagctgcggaatacacactggtgcatgtagccgctagcaaatctgcatctgtggagatacaggatctacggtgcaagcgacgatatgtctcgaatcgttttgtttgtcgaattacgcgcgagggtcagtgagtgagaagcctagcgcgaaggtgtgtgtgctgcttgagtccaatggtgctcgttcctggcgccatgtcccagaagatcaccgccagccatgcttctgttcagaagcatcgtcggtgtctgtctcgtgagcacagagtgtagaacgaggattttttcagttaaagagaaatacgactctcggatggcacagaaaaggcaggagagaagaactctgttgaggtggaagggccgttcatcgctccttcggcactggcatatacaacatgtctgcgtacctccatccccgttaatctgcccgacgactccgggccccgctgcagcggcgcgttgtcgtcacctgccttaagaaacagaaaacaacaccgacagacaagttaccatccgcttactgtaattcattttcccattcctctaggtctttctcttcgaaacattccattcatccagacaagcgacgctgagacagaggaaacgaggcgagacaaccagtgttgtgcgcaagcaagcgcaagtgcgtacatgcgcgcagcattatagattttggttctttcccgggagggtaactgcagcagtgtctatttgccatcgcgagggtggcgagcccatctgtgacctcccgaaacgcagaaaactgggttttttctcggtcatttcctcccggccgccttgactgctgtcctgctggcgccgggattgggatcccggacagctggtgcttgctcgagacaacaaacagcttctgtcgtctcgtggcgaagcgacgatttttttgtcaccacttcccaaagttttcctgctggacaggcgaggcgcaaaacgggaatgtgctggttttttcaaagactcgcgccactccctttcgtaggcgttccagaggcattttgccggcttgggtgcacggtgtccccgccttgaagagaccctgattctttgtagccccgtttccgtgaaatctacaagagcagacccgtttttcgttctaagtcctctcgctccctgcatctggcgtttagtgaccgttcatcgctcccgttttgtccatcctcctcgctcttctcagcatcgttcggtcttgtttcccttgcgtttcttgccgcctccaccccctgtgacactccgttcctctctcttttgcttcattcgactgcccccttgcttttttgcaggttccacga

SEQ ID NO: 3403 - DNA, 2047 bp, Toxoplasma gondii
  source 1..2047: mol_type = genomic DNA
ttctctgaaccgttctaaatgatgttttcttgtcactggacgtaaccgcgtggcaaccggaggctgccgagcaccactgcaactgctgcagctgcgatcctcttgggggcgttacggctcgctttctgagaccctcgagaagaaagtgtatcttccagtccagtggggtggtggtgtaataggcaacttggtagactgtatctcataaagggagtcatagtcaataacctaggctatcttcagaaacggcatccaagtattttctgttcattgtaccttggaagtgcttttttgtcggatcgcagtcgtaattctcatatacgtgatgccggttttgtacggtagttacagtcacttctttgcaccagtccgattggatgttcagaagtcgcttttctgagaaccaacgcgagaacctgtttcctagcaccattagtgaagtgttttggtctgacgccattagggtgtttttttcgaactcattcaccactgctgttcaccagtacgagtctagggaaaatgaatgtacagggttgcgcgcggtcctaatcttctcactgcgaactgccgtgtagaatggcacatggttcctacagcttaagtggaacacgtccgacatctaaggtccctgcgcatgcaccatctcccagcgaggaatctgtgtccagcttgagatactttgaagcaaacaaaaaagtgatggcacgtttttgtccctgtgaagggaggtaggcgtttagcaaggcagtgtgacctgatggagggggctggttttccttcagaaaacaacacgaagaagaaaatagcgacacgtgtatgatacaacaaaggaccgtttcttttgtgtttatttagacgtatcgattccttgcttttgccgctgtctgtttattgccaaacggattccgaggactctcctgtgaatggaaatgtactgtacagaacgacttcttgggtgctaatatggtgtctaccatggtagggaacttgagtgttgctgagatacaggattaagcgtggagatgctgcatagatgaaacccgaagtacagtagcatcagacaaaccgagtgttttgttttcacagacaacatcccatacaagcatttcagatactcgtggaagggtaccgacccctcccgaccgacaaaattaggagtttcagtagtcctgttgtgaacatatacgcccgaagcttggccaactggagttcggaacttgagcccgcgttctggtagtatcttggaaatttctcagagaccgtcgccagttgccgtgcagacaccccttcgaagagcttctaagatgaaacaaaacgacaggagaaccaaattcgtctctttcatcagtgggggtggcagattattgcagtaatggctgaattgccaaacagacacgcttacgaacgccaattcaattgcacatccattgtgcagaaagggctgcagacaactgtcgaaacgctgtaatttacgctggccgtaaagttgtgcgcgcatgcagttgtttttcccggcctcgattcgtgttgtttcgtctctcaagcacgtcaaaaagtggctatttgccatattttggatctcctgatgcgtcaaatgtctcagtatcatgtggaagttcctaactttctagaaaaagctggttttatctgggtgtcgaatcgtcgtgtcggcgggggctcagccaggtgagttcttgaaggtaccgtttcgcggcagtcgatgcaaactggtgtttcttccttttcttcggcggacaacatggaaagcaacccgaacgtcgatgcaaacgaggagggacggggttttgctcaatctagttaactcggatggtactagggcaagaacgcgtcgtccgagttacattcaaacaccaagaagaaacggcgtgtcttggaaaggtctatcacgtggcactaacagacactgtgtagatgactcccaaatgagagacttggtttctcactgcacgacggaaggagcggcgccggacaccgtacgccaccaagaactgcacgaagcaagttttcgtttcgactgaatcgcgga

SEQ ID NO: 3404 - DNA, 4714 bp, Toxoplasma gondii
  source 1..4714: mol_type = genomic DNA
cgtttcctgcctttccgtgtacataacggttcgcctcagagaggagggccgcgcgggggtcggctgcccacgaagagtggcgggaggaacgtggagaggagagggcggagagggagcagaagagcgaggacgagaacggagaaaagagaaaagaagaggagggaacggacccatgggtgcatacggaagaagtcgcacgcgcgaaaggggaccattcctgtcccctgcgtttcaacgcgagccgaaaggaggccggccgcctggcattcaagagaacgcgacaggcgagtttgtgagtggagacagaagaggagactttgcagaaagaggggatgctgcgcggggtgcgtgtgaagagggagcgactgaaaatgtgtgggagactttctgcgagaggaagagacgccagactgagggacgcgcggtcactctcagcgaccgcgtagcaaattgcgagtaccacgctgatcaagaggaagaccacaaagaggctaaaccggctctgagatagaacctttcgacgcggacggtgaacatgtctctgaggcgtcggcggagtcgaggacgctcgggaggaagcggagaacgagccgccgatttcggcactcttattagacgttgtctggggagaaggcccaggtaaacgccttcgcgggagatgaaggcactcgcaaaacttgatgcgcctcgacaggggtctcgacgcagacacagagagaacggaagactgtgaggcagcacgaagcgcagagaaaacgctcaagaagggagcagccagcggggacgcggaggcaaagagcttggaacatgcgtgcactcgcagccatcgaccgcctcgtttgtcgccgcaaacagggcgtctttgttggagacgaaggctggcgctgtatctcagacatcccaccctctttcgccttttcttcgatgtctccttcctcgctcgtctgcccggctcctggactctcttctggaaactaaaccggtgcaaaaaaccgcggcgcttctcccggtgcccacttcgaccaagtatacatgcacccgggagaacggtgagcggatgtgcagaagagtcgcaaaccggggagccgacgcagggtccgctggggttattccctgcgtgtttccgcatgccttctccggttgtttcgtcctccatgcttgtcgctgaagagttcatacaactgaagagacgcgcgcgagtatgcagcgaagagcgctgcgaatagacctagaaaaaacactccctgccgcgacgcatcgtcactcctaccagcgccgcttcccgaccggaagggtcacatctcctgcgcaagtgggcgttgtggaagaaacatcaggaaaacggaaatgcagtagaaaatgtaacgaaaggaaaggtgggatggcagcggctgcgtatccgagacaagagaaaatcgtatccaagttgataaccgccgcgaccagcaaagagtgccaaaagatgccgccgggctggaggggaaaacagttgtaggagttggctacagatcgaaaaatgttccgcagtttttcgcgctgaaaacagccgtcatagatacgaacgtacaacacaaaaaaaggcaaaatgcattcagacaaactcgcagttctctaaaatcggaccttgcatctgcccagtctctccgaggctccccgtccgcatcgggagaaggcaggcgtctcgtcctggcggagacacgagaactctccttactgcattcctcagtgtcgtttctttccgagatcaaactgagaaaaagcctcttctttccccaccttcgagaacaacaaaaatctgccgaatgcgtacgtgcgcccagtaaggcggcgtaaagatgctccggttagcggctgtcttgcccggggtagagaccctagatggtatactttctcacgacggggcgacgcctactccctgcggatcaatcccccttcacactgttcctgtgccatcggtgtgccgtctagaagttttctcatccttttaacggtcagatctctgcaaccaccgaaagggcaaacagagttatgtacctcctgtcgttacgtgactgtcagtgcatcccccctcccccacccccccttcttgcagcctgtcctttcgaagcgcattggaaatacaaagaatacgtgattggagttgtcacgcgtctatggcatgtataacggcaactcttcgtgcagcttagaaacagcctcttcctggtcgtcttcatataaagaagctacgggactccctgtgtctcgacgcctggcaggccctgccagctcgggtcattcttggggcttggggcttccagaacaatcgagaaagctacattagcaccgtgtcatcaccaacaccccgaaaaagaaggtcacctaaagggtctgtttccctcgttttctgaacgcatgtttcctcctgtcggcgacagaaagggatcactggttgagttacgtggcctgtcgcaaggcgctcttaggggcttccgcaacacaaccccccgtcagattgaactctcgcacatcgatggccagtaaaaatcgacagcggaagtcacacaactttaaaaatgtgcgaaagggaaagtacgaaacagcaagagcgatactaaagcgagggggatgtttcagcggtttcgtggacggggcgtaaatcagcggcgacgccgtagtgaaaagacagaaaagcattgtctatgttcacatgccgcatttcatctggtgaaatatgctctgttccggactcatgacagtatgacatccaaacaaaggaaacaattgcggcgcgacgtcccggaaagttactttggggcgattacgagtaatggagaagcatgaactctggcggccgcagcacgatattctctggacgctgtcgacaagatctccaacaagcaaactatctcaagagaaccttgccgtttctcaatcgagacagtcttaatagagttgcggccaaagcagtttctaaagtgggaacatgccgcttcgaataaaagattactgtggtcggtgtgagcttgtagtgaggccttttcagagggcgtggccagtctgacagagcagctttagaacgcgtatggtaacgcctctttttcctctgtgaagcctatatgcgtgtcttgtcaagcaagctgatgagccggcgaatcttcagggttatgtagctaacacaatacagcctcgatctggtaaacaacggtcttcaggatttcggccagtagcccaactcgtcgtttgaaactccccagaaaaagctctctcaccaagtattactcccactacgaccgtaatgattatactagcacctgagtagttgtttctttcgctgttactatgattggtaacggtaaacaatttgttacccttggagcgtacctaacgctcggtcctaagccttgtcaagcagtgccccaaatctttgtgaaagggcaagtctgccgcgcaagacattgcggcgcgctcttgcttgctcgggaaatcgaaaaacggggcgtcaggaaatctctgacattgcccagtcttttccacccttcttgctgcggtgtcttcccaccgtcttaggagaccgctacgatggcgtcgttgagtggcgtttcggtgtggttgacctcacagcactgaaacgagaacgtttacttgcctgagccccaaggccggcttcgtacacgtcagttcatcgccgaaaccgttaaggcaaaaagaagcacacgatcagtgagttcattgtgctaaagtgaacagtatctctcgatccgaataaacgaaatcaacggctactgggcggctgtcattctgcgtttggcttttcttatcagcagaccaaaaacgtcgactgaacacaaggttgttttctctcgcttgttcgtagttacgctagatggtttctactttcaaaaaacacatgattcctcgtgcgcccctccacgctacagtctcgcccccataattcccctataccctcttgttcttgattttaacaagttcggcagctgtgctgatttgcaacgtggagtgcatggtttgctaagggggaaggccaacagcggcagggctgcttgcatttgcgtcagccgcatgcattgtgcggacgagagaggcatcgacaacagcggttgccaaagaatatactcgttttccacccgtcgagtatccctagccaaaatcactgcattgtcagcaaagaaaaaccgaaactgtactggcctttccagttctaccatctgccacgttccatattcttgcatggcagtacatggggcatcctgtggcctacgtaacgagaggtttcggtgtttggccgttggtgtgatctcgtttcaggcggcttaattttgatttcaagccctttccttctaattagatatatcttctaattttcccccctttgtagacatgtctcggcgtgcagaaaagactggcagctagggtttgtcttcttgtaacctcttgcgcatgcaagctgcggtccctccaagcccctaggaaagggaggtttcgatcgaacctggtcttgttctgcattctgtctaatccgttcgttttcgacatttaccgtttctttcgttttccgtgtcgaccacgccctggagacaattttctaggcactcaagggcctcgagcataagcagcacgactctacactctacccaagtagtgcagagccatcgtgtccccctcaacgttttcttcgaatccctattttatttctcttcattctccatctcca

SEQ ID NO: 3405 - DNA, 1898 bp, Toxoplasma gondii
  source 1..1898: mol_type = genomic DNA
actttctgaagatcttgaagcagcgtcagaagacccagactcggatccaccgccgctcgcgtcagcgcttgggctccaacagccttcgccgcgaccgcggtcgcgccctgtctccgtgcttcagtctctgcgcgccgggccgccgcgaccgccgtcgcccgcagcgatggaacttccgagaagaagaaacgagccacaggcgtctttccggacgcagcgtcttccgctctttgttctccttgttcttcatggccttcctcgtcttcgccttcgccggcgacggagacctcgtctcggggtctcgcagcatgcatgcgcgtggatttttctctgaggtttccttcgctgttcgcggcgtctttgagtgcgttttcaggcgaacggtccgcgacgttcgagtctccaagcaaggccgcttcctccgacgttaagtcgagaggaagagcagcgaacaagcctttgaccggttcgacgcgctcgagacaagacggagaaatgaagtccgtcaagacactccacatgcggacgtactgctgcggatacaccccaagcttcctgtccagttcgaggcgacggacggcgcgaacgaagcgatcttcttcgtctctgtccttcagctgctcgagccgagcaagcctcggattccacctccgcacagccactgcgttcggctgcaggaagaggaactcgctctgcacagatccaatgccctctttgcagccgccaatcgcctcctccactcgcatcgaggtgtacatacactcgaacgccgaacctccggctcgcgtctcacccgtcgagtcgtccaaagacgcagcggcaagcgaagaggcgtcagctagtgtgtacaggagatggcacccaggctggatgcacttgactcctgcgaactgaggtccgactctccagagcgcgtagtcgaggccaacgtgaacagaggaacctgaagccccgacaggcaagccgagaagcagaagagaacaactcccgagctgagaagctgcgtcttctggcgagaggaaaggcggcagcgacggaggctccgcctgcgcgtccgacgacgcccgagctcccgagacaccacagaaagaagaagagaaagaagaagagaaagaagaagagaaagaagaagaggaagaagaagaggaagaagaagagaaagaagaagaggaagaagtgaaggtgttcatggctgcaagaagacaagggagaggggggccagacaggcagccttgtgctaggtgaaagaaagaaaagtcagcaagcgaaggaaccggagcgagcaaaaggaagaagggggagaagagagagaaagggagagagagaagacgaggaaactttcatttgacaagatcgagaggcggggcgaaacagcgaaatggtcgccagtggaaagcagcgaaattcgccatgagggccgttggtaacaccgactttatctcgtctcttctctgcggtacccacatgcacaacaggagagacaagaaagaagttcgcgccttcttcttgcatctccagcttggggacgcactccccgaaaaaggaactttttcttgcttttcttctcttcgtcaagaactctctgcatcgggacttgtgcgatgccttttcactgtcgcacccgcctctcccacccagctcgcattcatgcactgcttcacaaaggggaaggaaaaaagagaaagaaagaaaaaaacaagaaaaaaaggaaaaaaagacaaacaaggaggaaaggaaaaacagtcaagcacgcgcatgtgccgggtctctgttgcttgctgcgtttttttccagcggagcgacgcatgcagctcaacactgcatgtgcgacagttcctgtttttcttcagtgaagaactcacgacaatgacgataccacaagtccttttttctcccta

SEQ ID NO: 3406 - DNA, 4775 bp, Toxoplasma gondii
  source 1..4775: mol_type = genomic DNA
actccggacaaccaagtcttagagaagcagcaaatgctgtggaaagtgcgtcaacacttcctctacgacttgtcccttgtttccagcaccgggaatcatcaaaggaaagccctttctccgtcgaaggctttctggagagatgcgctcaactcttccgtggttgatgccgggagactcgcactgcttgagacacttatgcgatcacccctcttcgaagaccaggcgaacaaagttcctggagaaagatggggaggcagatgaagacgaaaatgtggaacgacattcgtcgccgactgggttgctttatatcaagtgaaatggtggtgactgtcggagccttacagacgtgatgtggcataaaccaagcagcaaaacgcacctcaaggatgtagcgtgtgggacgaaaaacttcatacttccccctcttgtgtataaggcgcctttagatggtgcaggcactgaaaatgaatttgacaatctggctcgtgggggaatagctgctgttctgggataggcctcagcagtgtcgtgcttgtgctgttgcaagcatgtcacttgtcagtgcgtgaagtgacacacctgcttctagctaatcttgtgaacttaacgaaaccattggggtccgagtggatgccagtcactgtaatctacgcacgacccgacagacggcagcagtagttgacgtaaaggatacgcacgactgttttaaaaaacagttgccacacattccgatggcttcctagatttgtccatcagcgcggcgtttgagtgtgcttggtcgttacagaaacgcccaaatatgacccgtaaagcccttcagagactgtagaaagaggagagatgattgtgtagcactcagacctttttccttgtcaagcgatccaaaccgcaacgtcgcagacatgaaaatagaaaataggtttaactctctgatctgcagtgactccagagagagagccacatcaacaagggctgatgacacaccacatgaaacctattgagaccttagacacggtgcctttctccgttgcagttttacaatcctccaaacttacgatctaccgcaggtgtaacccctttgacttctgcttcggtggatgacagactgctgactccatttcactctaagaaacctgcgtgagtcgctctttcgacatttgagcctttaagacaacgcatggctccgtctccgtcaacgagtgtgagacattctgtacagttgattgacaaggtacatccaacatacatacttagcgaaactcctatccacttgtgccactgcctatgtgttccattctcctctagctcctggctgccttctgttccctcttcctgatcttgaaatttttggggaacgttccttgtctcctcaccagaaaacgccacttccctatacaacacggctgaagatgtcccgatcagcaacgaggaacttctcagatttgctttgaagaattcgtgccacttgaagagcaatgctctgccatagttacagttacacgactatgcataagataacgtgtcgacttccccgtggcgtacactctcgctgccagctcgctcgttttctattctggttaaccgcatggggaagcgattccagtactatgcattacgaaagtgaagatccttcgtgcgaaaaggtcgtttgcatggttgtgtacacgcgactcagctggctcaaaagatgtgaaaactaaacaagggatttcccttcgagcctggttatattgtttctctggctgactaccgaccattgagaggcgttgactaagctcgttcgctaccccagaattgtctagccaacgcattatccatgaacccccaaagcagagtgttgttttgaaaagagcacaacgatgaatcaaactcacggcttgtgctataaggtgcgcgcccattgaaatatctgccagatgccggtggttgtttgtgattgcaaagcatggttagaaatacaaccaggacagcgtatcggcaacgcaagcgtaacgaccacggtactggtcgattccaacatcttcgccattagctacgctatgctggggcgtccgaaacgctggtacgcttgcgacaaagatggttcaccgagcgctgcacgaaatccgtctttttgtacattattcacccgcgcaactatggcgacatggatccttacatctctgtcagcaaaccaagtgatatccctactctgcttctgtctagcagcaaatattgtacttgtcgtatttctgttcctacagaaggctggtgttttgggcgaggccaccgcggagggtctccccccaccgaggaagtattcccacccggcctcacaatatttcaaagaggatccgcatttgccccgaagcacttttctgtgggaccgagaggatgctgccgctgagtggctggcaagcgctgaagaacttgcgaggacctacgatgacaggagtggcgaccaaaggcaaactgcagtgacttgcctgaaaaaccacgacacgggtacctgcgtcatgttttcttttggtgggtccgacatcgactggatatttcctccgtggttgtccggatccttcccccctcccttccctccattatccccaatttgttccttggttgagcttccaatggcatcgccgttgagttgcatttctggtggctcaccgctggtctcaacttccactgatcagcaggcgaatcggaaacagatgtggaaccctggtaaaggagagagggaactgcgtcccgaaggctgcgtcactgttggagggatatgtgtcggaccgttgccgtgctgcaaaggagcagtctgtatgtcacagcctggatgggccagcacagtccctacgtgctactccgcaggatccacagatcggtacgaaaacacctcattcgcccaagacgaaccaattcaggacgtcgcctacctttccgattcgctttggttcaagaggcgttggccccagacgtcacgttcataactatagaaacgcggtttcattcgtcatagcgtcgaccacacacgtctcactacttgttcttcggagggagcctgtcaaactgtttttgagtttgcgtgtgaagagtggacatgcgctgtgtggtaaatcagccaactctagatgcaaaattgtcgcttcagagagcgagatggaaacaaatctacttgtctccggacccaaaaccgtataattttccttccagttgcctctccgatttcgcttcttccgatcgcgatgcgactgcagcaggcgcttcaaagttaatctagtaataccgaccatccaccatactctacaggtcccttttgctaattagcaccaggcctgagctggttcgtgccatgtttagagaaattcgcgacttttgcagtgaactgtgtgagtacagtggcagggcagaaacggttgctcactaactaccaaaccagattcacatgtgcagaagcgaaaggcacaacttccaccagcggcgcacgcgtgacagtcgaaatgtaatcagccccacctgcttttctaactctgcgacgttaccgtgacatcgtctaggtcaaccatgagaagggtttccaatgtattttaaccaaggtgccacaattgatcacatcccgattgatcaagtctgccttcccccgaagctcaatgagcatgcctccacaagtccccgaccgacgcggcatcaacacgaagatacttgcagttgaacgacggtcttagccacatccctttccatgctcacgaggaatttcaaaacaccgatacacgcagtgcgagcaactgttccttcgcgtagaggcaacagtacatgtctctaaaaaattcacactctccggggacttcaacgccgttatccgatcgacgatggattagcactgtgacagcaacttaagcgtcggcgcgacacctggagaggagcctctccgtaagatacactaaaattccgtcgagaggagccaaaatccaaaactgtatcttctgtccgcattgatttacaccacgaggagagggcacacatctcgactcaagagaaccttgcggaacacacacacgacgcgcgttcgcaggattctcttcgggaccggtgcgtactagcggcgcgtcgctgttgtttgcatgcgcacaaagtttgacggattgccgctgtgcgcgtcagaaacctcaattcttgtctccggtgcttttgtaagcccatcgctgaagattctgcaagactgtcgtcagatccgattcgactacagtacgtgtttctctcttctatgacgtctccgtagttaccggcgaggattggctaaaccctgtgtcacccgtgccacggcgaccttcgatttgtgtgctggtggcgtcgatgaacgttttctgttttggctttctctaggctcacgacattgtttcgaaaaccccttcttggaaatgaactgggagactctccgtcgctgtttgtttaccgtttctctccctgcacttcggatactaccaccacccttatagagtacgacttcccccgcaagacccattaccacagtcgggggtcactgctcgtttttaagtgatgccgaagaactagtctttcgcacaagttggaagtctaagaacggaggcaatggcagaaaacggactgtcttctagggcgtttatcttcatttgatacgcctgcactagtagggacggagacgctcggccgttggcagctgtccctcggtcagttggcgcatggtttgttctctccctactgtctgtgttccatgactttcattgcctgactgttgtgcctgtaaagcttcccctgtgaaagaa

SEQ ID NO: 3407 - DNA, 1875 bp, Toxoplasma gondii
  source 1..1875: mol_type = genomic DNA
gaggcaattgctcttaaagcaaatttccgcattcccatccataaatatatgtacacatacacacatgtatctatatatccatgtatataaatatatatgcataccttccaagtatacatatttaagcattcagtgtatatatatatatatgtagatatctatttgtttgtacgtttatttgaagagcagttgtgactttacttcggcttgtgtggagtaatggaacgaagactctgaggcaacctgtgaggacgtgctttggttcacagcagcctcttctgcgacagaggtctgggcaccgtcgaaagggtctctgcgtttcttttttcacttcgcagagaggatctgcgtctgttgttttcaagttttgctcatttcgcgtgcgtctctgactgctctcgtccccttcgtttcaatccattggatttctcgaggccagagtgctgctgtgtcgagagttttacatgcacgaattgtcttgcagcaaagagaggcgcagtcatctgagctccttggctcaacgcgacgtctgaggagacgcagaggtcagctgggaggtgtcaactcagtgctcgggagggtactttagaatcagcaggcacgaccagcttcacgcagtgaggcgagcggaacgtcactcccaacagacggcggtgaggcgcagagcgacgaggtttctctcttcacggaaagagagaacttgtttttttcagccattattcaaggcccaaccgaggcgcttcatcccatctttctggagacgtacacatccgtgcttggcaggtcttcacacctcccccagtggcactttccacgtatacggaaacttaaagaagaaaggttgtttcgtctagacgactacagaagcttgacaagaaactcctggaagagaacagcaaagttgaacaaaacgctcgagtccgcggtgcgagacactcgtaaacgatgaacgcctagagtctgctggttgcagaaggtcttagcatctgagatctgcctcgtaacgctccgccagctcagaagagagactgtgtttagcggagacatgcggctctgagaacagagattctgccactgctctttatgccgtcgctgtctcctgcttgagagagagaggaacgcctgaaacctaccgtctgagacagtcactccaactgaggttattcccctggagatacaggacagcgcccgtgggggaccgagagcgactgcagcgagacgttctccacggactccgcggagtgccagtatgttccggcgtttgtgttctcctgctgtgctcgtcaaaatcgaagagagaaaatcgaaatgtgagaaaagaaacgcgcctcgctgctgccgacggattccccgtcccgctctctcgggtgtacgcgtccgcctccgggcctccagagcgcgccgggaaagccggaataaaataacgcatgcaagccttcaagtgctcagagtatctcgggcgagtccgccttttctcgtatctgctttctctctcgcgaatcacctttctccttttctccctcgcctttccaaaagcgccgctttctctcttcccggcactgtcgacgccggagactgtctcgcctacctcccgccgcagacccctttgccgcttttgcttctctcttcttgcctgtctgttttttcttcttctcgtgcttccttctttcttctcatcttcctgctctgcgttttctcgtgtgcgcttcttccttcttgtcttcttttccctcaagtgtcttctcctctcctctcttccgtttccttcgtatgccgggcttgcatgcatcgccagcctgccttcttcctgagttcattttatgtagaaaaaaaggtctcgaaagctaagggtctctgcgtcttcattcgcatgca

SEQ ID NO: 3408 - DNA, 1319 bp, Toxoplasma gondii
  source 1..1319: mol_type = genomic DNA
ctttttccttgtgacgccatgtgggagtagggacaagggacaacgacaaatggaagagaagtgggacagggtgaaacgaatagttgtaagaaggggtacgcaggacaaagcaggacgaatgaagtggagagcactcacgaggggattcgagagacaaatatgaaaattagagacaacgacggatgggaacgcgtagagtatggtagaggatggaataatgggaagataaggaggaacacgcagggtaaattctacgatgcgcagaacaagcattcctcccgttaagcaggcgagaatttcggaagcaaaagatgagactagtatgagaaaaaggggtgcactgcagtacccgctaccatcattatttttttaggatgttagtgccggtgctttcataagaaactagaagcagcaggctggattatgtcaggcagggccgtgaccatgtacgacattgcccagaagatgtgttcgaactggtcacctacctgagtttgaatgttggtgccggtacagcggggctctacagctgttgtaaatgtaattctgcatttgcattgaagccttggcttgtggtcaattgcgattgcccatcgcacccacgggtgaagccgaaggcgcgtatgacgggcggccccatctccgtacgacggcctcttaactaccagcccgttcacgccgattcgcgaatttcacccgttgttatctttttgcaacagcacagtccacgtgggagttggcattctttctgttgtagtttgctacaggtgcgcccgcaaaacagtgttgagtcgttgaacggaggaaccaattccaggtttagttgcaaggtggtgctgacggatcttcaggttggtttttatcgtgtaagcctgaggtgtagagtgagtcgcagttacttttactacgttgacaaaatccttgaattacacactttcacaacacacgttgcgtttgctctcactatttgaaaatctcattctgggacgccgtacttctttcgagggtcagttgcaacctggaatcgcagtcgcccgcaaggacgatgccagattcagccccgagtcatggcgcacgcgtgccaacggcgccatagagcatcgaatagttcgggtggctgccctgtttaccctagtgtcactacttgactgcttatcagtgcagtttttgggtaggtttttggctgcgagtgtctcacgttacttctcattggagtcacggtagttggtgaacgacgcgggtcggagcagttggatgtgcgtcctgggaaaaagtgtcattctgcagttcttggacagtctcttgcgaaattggaaaaa

SEQ ID NO: 3409 - DNA, 3367 bp, Toxoplasma gondii
  source 1..3367: mol_type = genomic DNA
tgaaaacgaaaactatcacaccacagatcttgcgttttccaccatttgacgcaccagagagtatgcctgtaagaagggcgcgacaactgcccacgcgacctccaggaaggggagaagcagatggaatccggagctagcgatgaggtggagtccagcgccagtttcctgttggtttcttcggtaaactggcgaggacgacgtgtgagagaagtcggtgagaatgtcctcgaagcgcaggttaatggctttcaggacggcagccaagagacatacgaagatcactcgcagggcggtgtcgatgcgggttttccccttcgtcgcgacttctcctgcctctctctcggcctcttcaacagctcgaatgacgcccctgtagcgtgagaccgcttctgcgcgctctccgagttccgcgtacgacgacacagcactggatatccctgaaacgtcttctctttgtcgtccttcctcgagagcagcccccgccacaggggtcttctcccgcggcgcagccagctggcgacctccctcgctgtcgaagtccaccacatgggagaacgcgtctggggcagggtgcaccgtagaggcggtccggcgccggactcgaaggacggagagaatcacaacgagagagcgacacaggtggagaagcgcgacgtcgagaagagaatgagaaacagagtacgaccaggagcgccactcctgcgccagaacgaggaccatcagcaaggtgtccaccgacactgacgcccacaacatgcgcatgcgccgccgacgctccttcacgtagccgtcataggcgaaactccaagaaggataaacagaagaagaagcgtgagaggaggagtgagaataagggagaaaagggggagaagaaggagatgcagaaggcgaagaaggctccagaagaaggggagcagtggctgaggaggctgtgtcgagtgtgaggtttccagcattcgcttgagcgtcgtagtctcggaaaggaggtcttggcggtccttcacgatctgacgcaccggcgaatggaggaagggaggaacgcgtctcctctccgttttccgacgaagaggatgctccacactcgccgacgagtggctgccgcagagaggaagaagtcgcgcaatgcgtcatcctcgaacagagttgaggtcgacacaagaaggcggaatcagaacggaacacggaggattcgcgagttgcgcgttaatgcgagaaagaaaggcaacgaaagcccaggccggcgtggacggcaacggggaacagttgaaggaaatgcaggggaagtgaaggagcagagagggcaaaagatgaaacaaaagcatgcggtggctgttgaggcacgactcaggcggggatctcctacgcctgctcgaacttgagtgttggtcgaattgacgctccgtctcctttgagtccccagtcaagtgggcatctccccttgaatgtttcttttctcttcctgcggaaacccagaacaggtcgttgtgtaactgggacagttgccttcgatagaactcgtttgttgtgaggaaatgacggagggtgctcgtctcgctggacgaggtgcctcgatctagattatgacgcaacacgcacccatttcccccctgttcaccgtcatctttgcgttccttcgcgtctgtagcctgtctgctctccgaagaaacacgatcactttttctccttgaccttgacgccttctctggctgtgggctcggtacatggtgggcatgaaaaggctgcggaggcggacaacgatacgcgtagcggacgcgggtttcccggcaaaaaccacgagacaagaaaagcagcaacaccaaagcctggtcctcagtctttcacgaagaagaaaagtgagaatgttgcggaattccttgagcagaacggtcaacgaaaaacgcttttgtctacgttgcgttttgagcgagacgtctgctcgagcaagtctcttctcgatctgtcgttgcaaggcgtcctttggggtatctagaaaagaagtaacctttccatacggatgaagccactagatcttctcctcgcttgagaggaaaatcataacgcatgggttcaaagggatttagctgcatctaggtagtaaaactcctgcgctcctcgacatttttcgccttcagctatgtgtgcagaagatgacgcgcttgctgcgtgcgctcgcggctggggacaaaacaccggaaaagtggaggactagagagagacgcgttctgcgtgttttcttaacggaggcgcagtcccgtttcaaagactcgacctatctacttgcagacaccatagaagggaaggaccagctgcaggagtgccgccatgccattgtccaggcggcacttaagagccgttctccgaaaagacgtttgcagacgcggttctttcgaaattcggaaccacgcgttaggtgatgctttcgccagaagtttgtgacgagattcttgcttgtgtgtggtgaaggagcgataggttcctgtaaagactccccatcctacagaagagaggcggcatcgaccgtgtggcgatgtctggggggccactagcgcactggtggaagtgagtttttgtaacgcgttttcgtcaggagttgagttagtctttccaagttttgccttcatcttgtttagacactctctattcttgtgttcgaaggaggttttcgtcctgttgtcgtgaatagagtctacgaacgctatctcttgtgaccgaggatcattttccccggcaaaaaagttgtgacgagagaagattccttcttaacgtggctcgtctccaatggaaagagacagggacaacagggaacgaggactcctgtttcatggtggtacccaagtgaatgttttccatgtgttagatttcttagtgaatatcgattcctgctagcgggccgcgtttaccgtgaccttgtctcagtttccggggctgacactcttcccctgcgtgccacacttgttcagcgttccttcaccatctcttcgagggcacagaacagacgattcatagattcttttccgtcctccatcgctcctcgacttgccatgtgccacctgcatcgtgatttggtccaccttccccgtgtgttttgtcttggaacggaaaaacgaaaaaacggtcgaagctggagggacccagatttcaccagcgtacctttgcgacatcggtattttgtcagtttaggaggttaggtaggtgaggtattgccctgttttgaatgtaccgcaggtggcgaggtgtactgtcttttattccggtgttgtcgtgctgacacctttacagggagaaacgcagaaaacggatggctgagcaggcaacagcgaacggctgggttaggctgtcctacacaagaattgaacagaagacggta

SEQ ID NO: 3410 - DNA, 1881 bp, Toxoplasma gondii
  source 1..1881: mol_type = genomic DNA
tacattttgatgagcaccacccagaacgatggtgcgtgttgtatctcttcgctatccctgagcacggcctcgggaataagtatgtcggtgatgcgaatagggtagggcgattctttttctgaagaacgaaacaccgaaatgagtctttcatcgtctcctgttacgtcgttctgaagtgggtgaatacacaggtgtggtttttctgagcttgggaaaagacaaagccctcaagagacacgaagggaaacgaatcgacgcgcgagcaacacgcaaattcacaactgagtgaaacagaagaaaggtgaaaatggagaagtcttcgcatttcatggggtcacggtgatgattccacgggaagagcccggcgtgtgatcccccgcagccatcgacgggacggtagagtcacctggtggctcagtgttcatgcgttgttttaatcgtaacatggaacatttgtgaagaactgaaacccgggggaagcaggggagacgcttgacggggttagaaagacaaaaatgcctcagctcgttttgccggaatgaagcagagggatgagaggacagacgcgtcgtattatgtgtctcatgaagttacctgtctttttcgaagaagcttcccatgtacaaaaactttttgtcgcacctcgaaacgattacgaggatcggtataatattttgtacactgtctctcggtatccgtaagtgcatatgcaggcattgatttttttgtgtacgacggcgtcactgcagtcaaaacatttaaagcatgacaattgaatccacatacatgttcatacaaaaacttttgtactgtatatgtttctgcttgctttcgtcgttttgctcggcggtgaatatgtcctcaattcaaccggcagatccgcctgttatcgtaggccaaatgacggaactcaacaggcgactaacgattgcctgttgacactaaatagttcgaggtaccgcacaggagagaacctcaacatcacgtttctgtttacacgaagcttccttccgttacagctccctgtaaagaagcctgcgtcgaccttggcgtttctctgaggcagacgaaaaaccgttcagaatgctacacgtatttgccccgatcgatgataagagagggtctgtactgttgctgtattcggttgttctcattggtttcgagactatcgctggcgtcatccatttcctttctcgtacaacccttctcgaaaggcggcggagatgtcccaaaactctggccgaaactcatgtttctccctgtcgggtgaggacgaacataactttgtttttcgcagagagaacgccaaatctgaagcgttctcgcgaccccgcgcacgcaaggttggcgaacaagacagtggcgtttttgtggctatttcggtttttgcagtgactgaggacgaacaacgctgaaatgtgtcttctttgttgtgttttacttgtcacccttctcccttggcattctccttcgtgtatctgtgtcggatttgttttggtgccttctgacacgcgtgtattgcgtacaaaacgagactgatgagcactgtcgcgtcgcgagggccagaaaacgccaaagcgaaaaaagcgggttccttatttgatctgtcttttcgtccttctgtctgttcttcgttttgctcatgttaaagcttgtgtctaaaactcgatgccacctctgtcagattcatttttgactggtgtgtgcaggaaccacgcggggtaaaagcacgagttcttccgggaaggcacgacggatgaagtcgtggtttatcgttttccctttcgagggtaccgtcactgattgcgttcgtacattcgagacactttttcacccagaactatagtgggtgtgtctgtagtgcgtatctgagttacacaa

SEQ ID NO: 3411 - DNA, 1906 bp, Toxoplasma gondii
  source 1..1906: mol_type = genomic DNA
tgtgaatatgtacgggtatttggtggataagagaggagagcgtctaacgttgtgcacctaggagggcgttggtcatcattttaatctgtaagccgtgcacttacgttgtcgcttcttttgatgccgttctttgcaccgtgaaaggctgtacctcgtttgcatgcggttcgaggtactgtcgcattcgcgtctggaaggtgttttcacttcgctttgtttcatgctttgttggttggatgcctcgtgtccgcgatgcgttggtttgctgtctttgcaactttgttggcgcgtagattgagtcggtcaagcgtgtggaggactttgacgccgcaacccaggcccatattcggaaaatgatgttcgaccaacagcagaagttgcggggagagaaaacctcagacgaactggagaaggaggaacttctgaggaaggcttgggatgccgagggctctccgtttgcaggcacccctttcaacccatccctcgttaattttcagagcagtctaccatcggggttcatgggtggtgggccttgaaatggaccacagggatttgcgaatccaatttctagaagcatctacagaaacgatgccttaatttttcgttttccctgagctcggtgctgtgtcaatctctctattctctcgcgtagccatgtctttgccagccagcagcctcatcgaggcaaacacaaatattgtgccgctgattcagcgttacgccgctcaaggagaaaccgcacacttcaagagagctccgcactcgggtgtttccactgcgtcaggtgccagtatatatctatgaaattcactgggtgcgcatctcgtgcgtgagtttggtttgccacctgtttgcttttccgagttcctctgtaggtgaatgctacttctggaatttacattctatgtgtcatcattttctaacacaaggcctcaatgaaattggggaatcgaatctcgaagacaaagatcggcccggatgacttgtccatttgccgggcggactgacgcatctgcatctttatggtatttgcacccgttcccacctcacgcagaggaaacattggactgatattcaccgacacttttagctctccagaacgcagtgagcggttgaacacgatgggaagctgattccgtggaaaagggttactgcgggttggcttcgagccactgaatgacgcaggtttgtgttattcgtgacccgatttcctcatgtgagcagcgtaaacactttatgaaacggacagacacgtcgttttaatactaatcagtaaaaaacaaagcgttgttttcccgtgtgtctgaccgcacgcgaatcactgctatgcgaaccgcatcttgattcggggcgcgtgcccgctgtccgcgataagccgtcgtattgcatggtacattgccatgtattgtaacactttgttgaaaactgaaccaaacagagcttgcgtatcatcataatttatgtggggggtgtgcagagttaacacaggaatttgtggcacgcgttttgttccagtggttatgatcgtaacagccgctacaacaaccgccctgcgagctgtttccggtggaaagcgagtcacgtgagtgcttgttcacaccaaaaacctttctagaggagctgtttaaaatgccgtgcacagaaaacttccaccgaagagtcagtcttttacaaggctgcgaactccagttagtacgggttcatttggagtcccgctcccaggttctgcagctggtgaaacttgtggcaatcaaatgagttctgtgatttttagtgaggtgacggagggttgaatacaaccacaacaagtccagcacagtatagtgccttcctttaacgagtcaccggggccccacgtgatgcctcctcgggctgctgctggccgtgtgagatttgacagttcgca

SEQ ID NO: 3412 - DNA, 2287 bp, Toxoplasma gondii
  source 1..2287: mol_type = genomic DNA
gtggctgtagtgacagacagtacatgcacaacagaattcattcacaacctaacgcagtgtaatttaaatattcatgccagttcctcggcgagtgtggggtgtcaccaaacctgcactcgacatgaggttaatacatgcataaatacatgcaatatatatatatatatatatgtatatgtatgtgcaggtatttgcatcaccggagattctcgagtatcaaagaatgcgtttgcgatacgagaaaaaatgaggagaaagagacgggagaggaatattcttgaatcgactgggaatgtcgtgcggcgtaccttgaacgcgagacgaacagtttttttttctgaatcgagttcgacgagcttcacatttcctccatggcctctgaggtaaggccgtacactctctagcacttgctccaccatcgtcgagttcaggcccacctccgaagaggcagagggcgacgacatcgggtgtctgtacacctcgaatgggttgtctgccacaggcgcgaccggccctgcggaagaaagcggagccggcggagacgaagcaaacacacgagagacactgcccccccgaagatctcccgacaacgctcgacatcgagaaggaaggaccggtggtccgcgacgaggaaacaaagaagaaagaggagaagaagaaagaggagaagaagaaagaggagaagaagaaagaggagaagaaggaagagaagaagacgaaacactgagagagctcgagttttcgttttgcgcgtggaaggcagggaatgatgtctggacgaggaaggctacggactttccttgcggacggcagcagaggctcccgctgcttctgttctcggtctccacagtttctcggcttcgtcctcttcgttctctcccggcgtctctccccgtctcccaggtgtcggctcctcgtctccaaaccgcgcctgttggtgcctgtgctcgacaggcctttgcatgcagaggcgaacaggcgacgggagaaagcggaagaagagacagcctggaggtggagaagaagaggggagcttcggcgagatgcagagcattcgggaggcgagatgggtgcgcgaggagacacatgaaggagaagaaaagactgaggaaagagaaaaagtcgccacgaaagggaggagacgcagacactcggcgcagagagcaaggcccaactcggggctgaggcccacaaccctccatggggagacctcagaaaaacatcgaaagggacagagacagacgggggaaaaggaagaggagaaagacgggaaaaagcgaaaaaaaacgatttcggggagagactggaacaaagggagacaggagaagaccgacagtgagggagaacgtgacaaaaaccggagaggccgagagacagagggaggaagagcgacagagaacgagatggagaagagtcagagaaaattgatgcaaagcgcgacagaaaaaagaaaacgcgcgaaagcagccagatgtcgttctgtgtgctcgcttttgcggaggcggggggtgtctccgtttcgctgagaaagctggggaccgaggggagaaagacaggtcttggagtcttgtgaggtaaaccgcagtcaagttctctcttggcaagcaggtgaactggctcggaagatctcaaccacgggaaggatcgaggaggcagcggcggccggatccctcgagctgtctgcgtcttggagacaccgcggagaaaagaagccggaaaccagccagctgcatcgatacactgcagaaagcgagacgtctttgagtctctctctcccgtctctctctgagtcgaagaaacgcagcgattcgctttcgtaagttgccgttgtccgcactcgaaaaggcgaagaaaagaagaagaaacatcttctgctttcctctctcgccgtcgccgtggggagtctccaactgtgccttttccgctttgcctggggggaagatgagcatctgcctcgccttctgccattcttcttgatctggttcgctctcctttctgtctgtcgtttctgcacctttctttctccggcgctctcgcctgcctcttcacggggcatgcatcgtcttttgcgtcttctccctcttcttctgcgtgtctctcagtcgattcttccccttctctggacttttgcgcatctctcgcgtttctttcttctcccgtcttccctactttcttcttctcctttttcttctcttttcttcttctcctttttcttctcgcttctcccctcttgtcctctcttctctctcttgcttctgccattttgaattcagagtgttcaggaaaa

SEQ ID NO: 3413 - DNA, 1886 bp, Toxoplasma gondii
  source 1..1886: mol_type = genomic DNA
gctaaataaccgcctcagttgccttaggcgcgaaatcacatagacatgcgagaagcgtatgtgcttctatggcagttcggagaacggttacggccaagttaaactgtgattagtatgtgacgtcgacgtttcagtgaagcatgactgaaaatgagattcagttgttagtagtgaagaggtaatatacaggagcgtgggcctctataataaatgactagaaacgtggaatattgcgaattgacgttcaaaagagtaggtttcaatcgcacattttgactgattctacgttgagatgagacttcactgcgattctgagatatgaatccgtttaggataaaatgagggcgttgctgatgatggtttatcggatttcgattcgtacgcttgaagccgcctgttagcaaagtgaaccggtaaggccaaacaacgagtaatcgtgcacttcactcgtcacatgctggaaaatggtgggaactgtttggtaccgtgcggatcctgtttctggcagcctgaaggcgtatcgcagtcaggaagatgtgtactcgcgctggcgattgtttagtctctcatgggaatggaggcgaacgcagcatgcgtacaaacgtggtccaagcatcatgcttaagcagaggggcttgcactttcgaaatcgacggggctgtctgcccccggaaaccgtttttcctctctgaaaaatgaaaccccgaaacgaaatactgttctggcgtcaggatgattgattcagtaatgtatccatagatacacactcttagaggctgaaaagacgccgcattgtctcagctgcatgcttcgactgcctcagtctatgacaccgcaaagtgaaaacgccctgtcagctgcaggcagttcccctcttccactacaacatagagcattttgactcttttctttactggtggcccaccacgttgtgtagctgaaaaagccccacggagtcataagcagaagcgtagcgccgactatcgacgagtttggcctggctcacgagaatgacactcaggaacagtccactgaatggctgtcgctttttctgttgcgcttcccgctacgggatacgcagaaatcacacagactgcgtaaaagacagcagatggtcaggcactgtttttttcgtcactttccaagccgcaagttctggtggggtcacacgtgtggttccaggttaccttcgtcgtgctagtttacttgaaatacagagggagatgtttggttacgaggaacaactgtgctttaaatttcagatctagtaaattcgcgttgctggagtgcgccatcgtaattgcttttgggtagaaacgaaacctttggcgggacaggccctcccgtctccggtgcgcgagacacacatccacttgggaaacagccgtccttttttggcttgcctttggtgcaaccgttgtctgccaattcctaacgccccaacggagaaaaaatcccgtgtgacgagttcggtgcatctaaaatctccccttcaaaggtgtgaggccttaccgtttgataccagcctcgcaaccggccggagtttccttctccattacactatacgtgggctttcctgagtatgcatacagtcttttatgaagttcggcagagcatttatctcggtaggcagttgtcccacccctatgtgtcattttggggttcacagcacagcgaacaacaggaacccaggcccgcatcactggagaccagatctggaaaggccgtcgttttgtcaaagagtcggtggctaccagcttctgtcacaaccgtggactttgcatgagtgatgctctcggaatctgtgatgtttccagtgtgactccgagaggggcagagagcgctttaggattgaacagaaacttcctctctcctatttgccacga

SEQ ID NO: 3414 - DNA, 4340 bp, Toxoplasma gondii
  source 1..4340: mol_type = genomic DNA
tgtctcgctgggagtcttgttaacgtactgattggccttgcttcttcgctcaatcatttgctttctgcgctcgtagaagtccttgagttcttcctgtgcaagttctcgctgttcacgcttgagcgcttcctcctctcgcctccggccttcgacctcctgcctcagttgctcctgcatcgcctctgccgcttggcgtgcttgctcgtcgatctctgcctcgacgcttccactggccatccttggcgcctgctggccgggcgcgctctttggaggctcttcgtgagtggcttcccccagagggctgtcctgcggcaggccgtacacaccgttggcctgagcgttggggccgacgcggtcgtcgaagctcgtgtctctcttctgcgtcgcatcgctccctgtctgcagagacggcggcgaatacccgtcgcttacttctctgttctcccggcccatggcaaacacgtcgttctcctcgaggaacgagtcgttgacaggtggttcctccgcgaaaaaggcgtcgtcgtcttgcggcgagctgcgcacaccattcaggcagccgtagtcgttctgcgaatacaccgaggagctgacatcctcatacccgccgctcccgctacttagctgcggttgtctttgctcatggcgcggtgaacgcgagaaaggcgacgaggcgtcagcagacaacactggagcgttcagcgaaaggcccggggaagacgtgaagtcggccatgtcgccgaagccgccgccggttgcgccgaagtcaccgtccattttgctggaaagggcagaaagtcaaagaaaatcgaggaggaccaacggtgaagagacgaaattgacgaacggcgtaccggagccaacaggtaggtgaaacgcggagtgtgccaacgtgggaagcgaagaatgcaagacaactggttcttcgccgagagggaaaaaacgggattcgctactgcggaaaacggaggaacgggcaagcggacgtgcctacggttccgaattagagataatgctgcatctgaggtgggaaatatccgttcgaagagaagtcagagtgaaacgtaaaggatactcgaacggagaaaaacagcaacactggaggaggtagacacggggactcagcaagacggcggtttaggtcgacgcaagcctttttggcttatgcggatacgcacagaaacacgttttcgaagaccctgaggaaacgtggtgagaacaagagaactgacagaacgatgacacagtttgcggtggcggagcacggaaacaagaaaaggcctgctcccggaagtggctcggcgatgtcacccgcgaaattttcgtccagagccgaagggacgagaccaaaaactggacggctcgttcgttatgtagaaagcttattatacggtgtacgtacacccgaaaagtttgcggatgtgcagcggatcatacattcacgagacagatggatttccccgacacacgctccggcgaaggtaaaacagtggagactcgggagaacgctccaagacacgaccctctctccttttcttttctccacccaggaaatcaggccttcattgcggccgcttttctgacggccgtgtgtgtgagtagtctgctgtcagtgcgtgcgcaaaaccaagcagaaaaagaaccagctttctctcggtcatggcttaaaacccgtcgcgcgcgcggcccagacgcctttccctgttctctttcgcaaaaggatacatacacttcttccgttctcacttactccgctttgggggttttgtcggcttaaaatcgaagagagcacgagcgcgcgcaaagcctctgtcccttgtggtctgctgctcagctaggactttcccgccagcctttgtcatcgcagtccgcagtcggtgttgcggtactggtttcgaaaatgattccctctcacgttcgtcgacatgactaggtccgaatgcttcagttataacacggaggcgagcacacagaatgctcctgtagtttaaggaactcgaaacaactagagcaagtaccgactcacagatgctacccccctcaaaccgtatcgctccgcgaggttcaactcttggcggttttgaatccccgtgtgcgggtagtcacggaagcacggagggaactagcagtctaagagaggtgatagctattggaaattcgtgactttataggatattcagaatgtctcgactcgtaggcttgccagtgcgtacgagattcctgccatcgcagccgcctcagacgggttaggcgcgtctcggttttctacacattcagggaaatccggcgccttccatggttaggtgtgcgttgcaccactttccagcgtttctgtctaacgttttttctgatcgccgaaaacactggctttctgtgagcagttatcccgtggggaggcgcccgctcatctcaacatccgcggtgtggcgccgcagtctcgcgacctcaggaaaaccacgttttccgcagctcgagaggagacctgaagacaggcagttccctacatttgttcacctcaccacttcagcaagctctaaaatctgtcttggtagcagatacactgcattagctggtattcggtggatccggggcgctccggaactctgtaaaactagcgcgactcaccagtcgagatcccggtgttacggggcgctgcggaagtggctgcagcttttgcttttaccgaccctcgtagtgaggctatttcttctcttcgttgctgcaacagagagagctctagcgttcagtttcaacattccgcgaactgcggtctgttgtggcattttcgtgtcgctcctaaaaaggggggtttcggggtgtgcccgcagcgcgcaaggtgtcggccgcggtgttcgtgggtacgtcgggcctgcaactcttttcgctttacacgcctgattcttcgccgtaccaaattgataaatgagaatcacatctctcaaacggatttctttccagtttgtgggcgcacgctctgtactgcttccctgtaaagctagaaacaagggacaggacgcatttgcccccactcaactggtgtcgcacccagtccaagtctgctgcgcgcggagactggacgatgctttttccccttctgcgttttctgttgaacgcagtgtttttgtgtcgtgtcttcaagcaagctctcgttagaaaagtcctgttcccggggtgaggggtttttcttgctcggaaggcgctggagggaagccggaagccgcgattcgccacatcagcagccggcgcggaactggcgggacactcttgtgtcaactctctatcccttcgcattttctcctcccacgacgatgtttgcgtgtccagtgtcgttccgtgcggtcattgcgtgagaagaaacgaaagaaattcccgtgaacgtaaacacgcgttttccatagaagttgaacatcggggtttgccgtgcgcttcgcaggcattgcgtccaggtcgatggaggaaacgcgtttttgggtatcgaaaggaaagctgcgttccggtggattccccggtgattcttgttgtcctttcgagtaggccgtgtcaaggctatcgctttcgcctttgtcggccgagacacccggtgcgttgcgttccacagcggctcgagtccgcgcgcgcttcctcgctcctttttcccgtcgttgcgggtatttccgcacgcgttttttgtctctacagagcttcgcttctcccacttgactttcggcgccttttcgagaggccgaaattcttcttctctgcattccacgctactgaaaccttttttcttcgccagtctctctggccaatctcccgcgttgtctcccgcccgcctcgcgtgtgtctccgtcgcgcttcacgccttccttccttcactttcccgatttctggctaattcgcgcgccagacgtttgtcgcctctgtgagcaacccccgctgcgtctccgcttgcgggcaacgcgtacatgctttacgaggttctcgaccctttatctccttccaacccggagactgtggcctttctcggcttttccattgcattttgcctccagaaacgtctgtctttgcttctacaagcctcttctcgcccccttcgtgctggggattgcctctttggggctactcactttgtcatcgacctcctcgtcacctgtttcgtgccatcggtgtcgcgtcaaagcctctctctctccgtcgcgccacaaacgcgtcaaaaatgtctttcgcttgaacaggcggagtgtcgccgggctgctgccaacacagtttgctaccgcattgcttctgaagccgtccgtcaacgtctccgttctcgccgtctccagcgctcccgcgtccggccgtctcttcgtcgcccaccacga

SEQ ID NO: 3415 - DNA, 3197 bp, Toxoplasma gondii
  source 1..3197: mol_type = genomic DNA
ttaatgaggagaaatgacggacgtgaaggaagccgtaatgactcagatggggttgacagtgccgggggggacggagttcgagacagcaactctccctgattcccctatagagtagcgacgacgagagctgagctccacgcatgaggctccagtcggagaagcgacagggcgcagaatgtttggtgtcaagcggtgcaaccacgacgcgggattatacctgcagcgtttacatacgtgagaacatatattcaatgaaacccgaaaagtagcctacgacatggaggatacagcaggacactcagagagcgaaaaccgtaagacaagcacgacaaggcttgcgggaggggattcatttggagcaggttccataacgctacaggagagtacgtgagggtccgggaactgaagggtagagttgtttcccctcttcggtggcaccgaagcaccgtcgggcactaataaacttcgaacaggagacagattatgcgattcttcacgtctcggaaagaaaaggctaaaggagggtgctactcttgtacgaacggttgaaatggaatgagtgttttctgcgtcgcgcttcccgcttgagaggtcctgtaacgcgccggggccagcgaaagataacgcccctctctgcgtttggacacacagggatacgcgagcactcctagatgacaggaagccagccaacaacggggaaaacaccaagtacagatggacccgagcgttcgaaagtccagcgtccgcgctggggtaccccgtgatgcaacagagctactgatcgttcaagagctctctctgcatacgttgcggggaggacacagcctgtcaaaatgctggcaatgccaggattcgtccacaggtggtttgttgcgctcaagctgcgatgctaacatatataaccgagtatcatcttatacgcacaaatggacataattaatccttgtacggttttgccgagatacggcagcgggggccagcccttccgagcttctttgcgacacccctattcacaagtcctgtccagtgagactaaattcgcgcacatatggagctcgcaaacaccaaatgagatggagaggcgtgtatggcaaggtgaaaactgaaaacgtggccaaagcaaagaagtcgaaagcagatgcatccctgacgtctgcgcggtcttgtcgctcctccccacgcactggacaggttattggaacgtcactggtgaccacactccctggtgtagttccgtagcaagagctcatccgagtagtccaggcacgcgaaaagtggtacagtggcaagaaaaaactgggttaccttgaatttcaagtgccgcgatatcgatttcacagttgagcactcgcgtcatgtgcgttgagtgttggtcggcgtgcatggaccacagagccacgcgcagccgatttttaagcggaaacaagggagggtacatgctggctcgacgcaaaataaagtaagtcaactggtgagccaaacagacagagggactaaagggtatgccagatcttgggagacttttcgcaggattcgagacttcgagcccacttggtctcatgcatctgttgcgccatcaaacaaccatgtgcgcattacctccgggctcgcgcttgtgcgctagtcaagctgcacgacccgctggtctcgagttcagcgactttgtcgtttatatataagggtcctcgtggcagtatctcagaagagacgaaacgctaaactggaggcaggcatattctgcgagactggatttgttcggtgttccagccctgatccctaaacgaagcacgcctgttcaacgctgtgtgcctaccatattcgtaggctggcacaaccccgaaacaacttggcgtatttcactttttttctccagtttgaaggaacgaagatccgcgtacttggcttagcgttccgtcttgactgtaggacatcattttcgcggcacgacctccgtgtttttttttgttttcgtgtgactcatctctgtatcaacattctccggaagcagcctcagacgctcatcctgaggccctgtgaacctcggaggcagtatagccaacctcccattcctgtgaaccgacacccttaagcgcacgtagttccgccattcttccgtccttttttcatttcatactgatctgcacatattgatgtatcttcaggaaataggaggtccatcttactcagcttccgttggcgcctgctccactctcttcctcggctcgcgccaattcacagcggcgggtcacccgctggtacgctgatcctatttgcgcttgcctgctgcgctcatttcagacgggaatttctacgttcccgtgcatctgtgcaaaggacattttatgcacgagatgaactgtaggggcgacatttggcgtggtttccctggctccccgttctacctctctgcttctggagggactcgtttcgattacaagttaccttgccactttttcaggtctccgcgacgatttttcaggctgtattcagacaattgaagtctattctcccacgcagctttccaccacctgtgtccatttaggtttgacgctcggtgggatagcgttctctggcgcctcagctggctggacttaacagtctgccctttggttccacgtctgttggcagccaattcatattcagcacttgtccatcattttccaccgaacacatactgtcagtctatttcttctgtttcacgttcgaacatattggcggcatccttcttggtttgtccgcacttgacgcgggcctcaaccatccagaccatatgctcatatacatgtattgtgtacttcaatttagaaatgtgatcttgagaaaggacttttttaaggggcgaccatcacgaattctctttccccttcgtttgttggtgcttcgatagccgtgcttcctcttggcagcgtctgttcttctcattgcgggtgaagagatttgagtcatatctttcgccgctatgcctgtttcttggagcgtgtgagaacaccgttgcgcgcgtcatttcactctccatgggtacggcacacatctgcttcctcgtgattgcagtcgtccttccctgtcatatatctctgcgaaaagaaaattacctttttattccggtctctctcttgcattcatttgcaacggtaatcgtgtgctgggtcttgtagagaaagattcttttcaaccctgatcgtcgaagcctgagttta

SEQ ID NO: 3416 - DNA, 2680 bp, Toxoplasma gondii
  source 1..2680: mol_type = genomic DNA
ctgggacttccttctatagaccacagcgaagaagggaaggcagagggggagcgggaggagaaagaagactcggaagaagaggcagagactcctgagattggggaacgagattgaggcaaacattccgatgagagatgaggggtaggcgacgagggagacgcatatgttacaggcgaagcggatgtgccagggaaagaagaatgcgtagaagaagagggaaactcgcaagagatatgtctgcttccaagtcgcgagccgcgcttcggccgcctctcgccttcgcgcgcccctcctttcttcgaggcgttagccgagaccacccaggtggctaagaggcggcgagtaagctcctctccggtagaaagtttccgctctgctggagattcggaaactgcctgcggcagcctctgtggcgaaggtgcacttgtggtagacggggctgagggaggcacctggagggacacagcgagagtggaagacggagtcggaggagaggaagggggtctcacaggccgcgaagaagacacttggagcgtgcggtaggacgaaggagagagggggagagagtcgggaacctcgagagaggcaggcgagagggcattgcgacacgaagggtgttcgagggaggcagagatgccgcaggacgggtggggcgtgtgagcgaaaaaagcgaccgaaacaccacgggccgaagcctcatcagatgccgtgggtgagtgaggagtagacaccgagaacgatgtaggtgacgaaattgtcatcgccatctttgaagtcgggttttggctcatttcctacagggagacccgcactgtcgagtccatgatttagcgtaagagacaaaagcgaaattgttcgtaccgtacatgaagagcggcgagtgaacgttccacggaaaagggagggcttttgactaggcgtgcattctcgaggagcggcttccccgtgaaacgtttgctaagacactgctgcaaatacacgcggcgctgtgtcgctgaatacttgccaacttttttattctatctcgatatgaagcctttttccagaggaaacctcggcaaggcttcgaaagtggtagctttttcaggtcgctgtcggacaaagggcggaaacggacaagaaactgttcgcagacgatgtttgtggctgagaaaaacgggaccagggaaaggtagatacggtcagtgcctctgaacaagaaagaaatgttttcgagacttgacaacgatggaattcataacggctttgatgctgttttggaagcggaaaaaaattgtaagtcacaggacgcgtcgatatctctttcgccaaagagtctcacacaatgacctagccgtgtgtgtccagctggagcgcgaagagcctcgagagtacgcagcgaaaaaccggaaacaggtcggtgactgcacttttaagtggatgcttggaagaagggtgccggtctcattacgagagaatgagtgtttgtcttgacgaaaatatcttcgacgacttctgctagtgcaaaactctccccgtgccaatgtctgtatacgcgccactgttgccttgccgacttggccccggttctcgggattcgaagcacgtgggtgcgcggtcgatgtcggagcaaagcttcaagcagcgccacagaaaggaagctggccgttccgttctttcgggcatccctgcagcaagttttctaaacagacggcaaggtgttctcaccggtagagaggctggccactaagacaagtgtgattcatctgagcgccgctcgaaatgcagcgagagcgaacggcctgcagaggtgtagatacacccgaaacgaagacacgcagcgcgcagttttgggttttgtgtggctatcctaggatatcgagacagccaaagcatctcaaaattcgggcgtttccggtgccgcctacaaatccagcggcctccacatatttcggcacgagtgagacaacacaaatttccctgaaagtcactctttgcgtctcgcagcctgttcgctacgtcacctctgtcgtttcgctgcggttctgtcctgcggtgcacctggccccacagagacttgcaatggctccgcctcgacagtggccgttttagacctgcaatagcaaggctcaacgcagtttcggtgaagaattgtctgtcgtccagaagctgcgagtctcaggagccttttgattccaggcgacatccaggcagctgcgattgcaagtccatccgcgatggccgcgttcttagcgacgactactgataggcctgataggcctatatccgcttttgttacagtgcaccagcgctagccagaagatgcatcgtagtcgataagtatgtgtggaggcagttgctgtttcggttgccatagcaataaacatttcggaaggcgtgggaggcggttcgaggatcaactgactcccataccacatgcgtctcgacagaaaggtgcttttagtggtgaaagaaacacggaagagatgtggtcagggcgtatgacatgcggtcagagaaaaatgattcgccttccttactgttgctctacatgtctcctgaaatgaaacatctgcctcaccgccgtacctgctgtggacacaacgttgaggtggcgtcacagaccgccaggaggggtccaatcagggaatccaccgcgttgtgttgtacttgaaagtattctctttttacttatgtaaga

SEQ ID NO: 3417 - DNA, 3013 bp, Toxoplasma gondii
  source 1..3013: mol_type = genomic DNA
atgaagatacaggcagaccgtcttggcttttgtccttgacgcggcccgttgtctttctgcttagttccactgtctcccgagtactttgctgtgactcttcagctcgagatcgagagctgtcagagaagtcgttgcggactcttggcgggtctttgctggacgcagacgactggagactcctgggatgcgaggtgcggtcgcgaggttcagcttcagccttttcccgcagactttcagggccaccgagggcgcccggctcttcgcccagcacactttgtccttgtccccccatgtttgaggagagaccggaagcggagcttcggggcttcgcgagcgccggtgcgtccgcgtcttcctcgccctgaggaaaggccgtcggctcgggcagttctctcttttccgctccaggccgaccacttttctccgcctcactcggctcgcgccctttgcggcttctgcgcttccccacgaacgtctgtagactccacggcctcatggcggccacaagcggaatgcgcttttgacgcggaggcgacgcggaggagcgcgggagaaggcggaggcggcagacaaagtcagtcactcagctggctgcgggaaaaggagaaaagaaggaggagccgagggccggcggaactctcaaacagggagagtggcgaagagcttggccgaaacaaaagaaacgaaaccgaaagagcagaaggcaggacataccctcgggaacgccagagacacgcagcgaggtgcgtcgagaaggtcaaggaagctcgtggagacagagtcgaggttccagaaggaggccgagattttgcagaagccgcgatcggtcaaccactcgcaacctgaaagccgcggccttttacatctgatcctcttcatcgacacattccagtggccgagacaggccgacgaaacctaaacgacatgaacgaggagttcaatgcacagctacgcaggacccagaagacgcttgcaggcgatcttgtctcggaggcgatgacaccccggagcgggcgagagagttccacggcaggaatcgacccggaagcgcggctgcttgtaagacaaacagagagcggcatagcactcccaagaagtctgttccagcaactatacgcgtatgagtccaaacgtggacggacttgaaaaaatgaaggagagcctcttgctttggtccagggacccccccaaaacagcacccttgtagcgcagaaaagagcggggtacgaaggcgtcgccctacagcagcgaagaggatctacgaacgcaccgctctattcgaattcgtgtctgcacaccgaaagtactctcacacaataaacagacacactacaatctctacagagagactgactgcgactcccgtcacgaggtacaactggcgaagtctgcttgggcgctacacgcgccgcaaaaccacgaaaagagaggcggttttgcccgattttctcgccgaagcggtgaagatccgccacgagtctcgtacggagccagcacccgaaaaaattgaacgactcgggttgcctcctcagtggcgagaaaacgcatttcgatgaacaacggcgacccaaaaaccacgggtgccgttgaagaatccagcctcacacgcgggagcttttctttttcaggctgacgcaccaagtggacagagaagaaagtgtctttgaactgcaaaacttcttcaactgtttccctgggtctttctgaaccgaatgcctggagaagcgcgaagcggaggaacatcgacgcctcccaggctctccgccagctttttttgtagcgcggtgaatgctaccagaggaccctcgctcccagtctcggtgtgtcttctcagcgtctgctcgttgtctttgatggaaacacacagttcccgttttcttctccgggcgaagctgcatttgtgaccacggaaatcctactgaagttgctccgttcacgaaaccagcgctggtagctcgtgcgttgatggcactttccgcttttcagcgaaaagccgctgggcgctcgacgaacggttgaacgtgttagctgacgcctctcttctcccgggtacgttgtggccggcgtgcgttctcctgaagaaaacacagggagacttgccggttctgtggaggctatcgctctatagaaccgcggaaaagaagcagagaaacgagacacggagagaatccggtacccaggacaggcaggcgttcttggcaccgtactcgggggaggaaacgcgatccccaggttccgcactctccagtttgtagaacccgttggtacagcagtcatcaagaacttggttgccggggcgagcacaactgagttccactcagaatccgaggcgcagcaacagtccagaaggtcacccgttttgtgcgccaagaagcattcaccgacatcgtttcgagaaagccagttacggttaccgcagttcttccggcgatgctgcgtccttcgagactttctctgcttgccagccttctttcacgggagcaaacgtcaatcacgtcgtttttcgtgcaaggttacgccgtggagtctcgcccactctagccagcttcccacgtgtgcagccacgcggcccgatgtacatacaccccactgcgtgtgttggcttttgtctgcagtttccgtgcaacattgttgatttccgaattttcttggcgggtgcgtttggtggcgaaggggtcgcgtggaatcgttggtccaagtttcagcagtcgccttgtccgtgtctgctcagcgggcgtttggaacacagtgctcaagattcgcgtgttcccgcgactgggttttaagtgtgcctttgcctcaatcgaacgccgtcttccgccttttctgcgagccttccgaaagagtctctgcgctgcccagtctgtcagacgctgcatttattagacgccgaaagtcagccccgaaaaggggttggcgtgggctgttctgtcgcttgtcttgtgcctaccgtacgcccggtccgttccgcggttctccttttgttgtccgcgggtcccaccggctccgccga

SEQ ID NO: 3418 - DNA, 4734 bp, Toxoplasma gondii
  source 1..4734: mol_type = genomic DNA
ttgaaacttcgcagttgtggtaccagacctaagtacatcgaattcctgtttgaactatccaggaatttttgaaaacacgtgcggtggtatttactgacgtgtgcggcccatatgtcagctcaatcatgaagtgcgccgacagcggttctcgtctccgttcctacaggtgcactgagcggaggcgaaacggactgtagcagagcggaggcgaaacggactgtagcagagcgcaggacgagctttcaattttagaatcaatacaagtgcgttttaactgctagtcaaacactcctgatgtggtagaactctttccgcggagtcgctggctaagtccgttgatcgggcggttagaggcgcgtttttctctaaagcagtaccgatagcatcaaggggacatgacatattgtttctggatagatgacgtgcccacgtaccgtttctcagtctattgtttctcagtacacagcatgctctggcgagagacgcacagcaataggggtactgtctgacatgctggacatgacaacagccagtattccagtgaatacacctttcagcccaacttcatctttgcgtccacgcgtgcactactctgttacccgatacgtgcgactggttttgtgtatcaaattactggaatttccgagttacggtgtatcaatcttaaacatagttggtcttttgtagaagacacttcggaagatgccggtaaaaggaagaaaccactaaggggtggtagcctgatgtgattggatgccgtgttgcatcctttttgatcgaagcttagtggacaataatccacgttacgtcctaattctatgttacacgctgtaaaaacggattcctaggtttctgcagactgtcttttctgaaaccgaagtaggcaaggagccaactagcgaagcacgcaaatcgtgtgcttgcacccacgataccatgttcccaaaatccgaaaaatgtaaatcatgaacctgatgacgactcactagtgaacagggcatggtcctttgtgcctggtgcgtacaggaacagtttgttgatgaatcagttgttcgagggtaccgcgtgtctgttcacccgattcggggaggaaatttctataccagaaaaactcaatgcatgggaatgccgggttctgcttgaatgacaagcagacggcacaccaggatttgtcaggatgggttgacagcagcatgtacgttcttgcggagctgcaggcgacggtgcaggctgaaggtctagcgaccgttcgctgggaccaatcactggtggtgaccgtgaatttcgttcaaagcgcattcggaggaagtctgattgcgtcatttcctgcggaacagagtgctcccgcatttcgccgagataacacgagttccgtgaaaccacagagcttctacgattacccgcggaggtgctcattacacagcaggaactgtccatgacgcacatatgcatgtggttcacatatgtttttccggtatagcgctacctccttgctcactggagcgggtcatttacctgcgtatttacacaaatgcactgtcagccaactgtgtcagcaacttctactcatacctggacatcggctgtcgcacgccacaacgtggcacaggtgaaattgtcgtgcaagcagctttggctttcagcgggcgtgaatcttctagccacagaaccagaagggagcttgtgtccttgcttcacttctcgaagtatggcatgaaaagtggcctctttttcattgctttgtaaacaaggttgctgggaattcgctgacagagaaaccgcagtttacgtggagagacagcagatgcacacagtattttcaaatgtatctcggacatacacaccgatttgtatagtgccttcgaataacaaactggtcatcgactgttcgcagaatttttctgtgctctcgtagacgcctgccgtgtcctgcagatttatgtaccttctctatctagaaacgatccttggcaaaacgaggggatcagccaccacactctaagtaatcggcaaccgttcgaccggagtagttctctgctcgccagagagactctaatgttgctgctaagcagtgacccagttccgctgatatgctgtctcgatcagtgtatcactcatcaactttaaatcgtctccaaacaaggtttacatcaactaggatctgtctagttctccgtttccggaaaagatttcatgcacacgtaagcttcacatcagcgggccgcctgggttctttgctcaggtaacaaacttacacccgtcgcttttcctcttgtcctatgtaaacacgacgctaactttcagatgtctggttttctggtggttgaaacgacaggtggtaatacttccagaatcggcactagcggtgtgagcgaagctccctctgcttctttcgccggcgtgacatacccgctcgcaccacgagtgcttgatcgctttagaactcttgcacccctcagcattaataattgctgcttcctgtaactgtcagcgtctaaatttgaaatttgaaagctgaactgtttatctgatacttcgagaagtcggcaccagagtcttagatatctagttgaaagacttgacaatcccaaaaccatggtgcccaacggtgcaaagcctcgacttggcgaaggagcgactcagctgtgcaacggaagaatagacgaactgagatacgtgtttcgcagtagtgtcctgattcacaaagtcctcataccggcgaatgcttcttctgcctgatgagtcacacctacgttcttcgttccccttgtacggcggttccgggcagccgggcaggtttggggcaacgacaacttagacggcatcgttcgataaattgctttcaccacagtttctgagtgacagtcaacagccgttcataatttctccgtcatttagcttcatggcggctatgtggtccttgcaactgcactgatctcctcacaatcctgttgaatagcaaattcctgtttgctgttctttcccatcgagtacgccaaagtgggcgcacactttgttctgcgacccatcgacctcattcgcttaatcctgcgcagtgttctccatctttctcggtttcgttcttgcttgctcaaagggcaagatgcccatccctgaagcttggaatatattcatgaactcgagggccacttctgccaaaaatggtgacgcgtgtcgcccactatgacgtgtgcctcggctgcagagactgtttaatgaatgtctcgtgcaagcattacgcgcagacggtgcggaatgctccggcaaaacagaagataccacgcgcaagacattagactttaatggaagagtgagacatcaaaaaatgttttccgacaggttactgtggaatcctgatatgttcctctctgggcgctcacttgaaaccacgttgcctcctatttcagcaaaacgcctgttatccgtacaagtcagtaaccagaacagaccggtgagttgagaggcaagatgttctgcaaacacataatggtcaggcaccttttctctgccttgggaaacaaacaagaacgtcgcgttcgtttttcccttcagcgcccctgtgggatttttacgctgttgcgcgggcagcgatgcttctttgcatttacctttaaagcttcgtggaactgagagattcacaatcgaaacaaaagagccaacacaagctattgatcagcgctcagggacgggcgtgcctcgtcaatatgtcggctgcctctactgcgagggatttcttgcacatcttccgcaaggccgtgtgaaactgtaggcctgtttgggcccactagtcaggcttttgagtctgtgaacgtctagggcttgcttccttcgggtatgaagcctcttcgcaggcatagataatgaattttcagaatggtggtgtcctgcagtagagtgactaagattacgacaatatgaagttgatgaacgtgacagtctaaacccatgtgaacccaattctcgagctgcatgggaccatgagcatttacctcgaacttgcacagattctatagctgcgctcacacgaatgtagatttaagtacctagactcaggataccatggaagtatgaggatcctctggtggagctgttgaggctgcaggctcagctggagcccctaccggagcttttctgtgtacatctgctagctttcgaagatgaaaaactataactgcagttggtgaccgagagcggagcggtctaaaacagagcatatttctgactttgtgttcgctgcacgacaggagatgtaatgtgaacaagctcccgacctcggcactcttcagaggtctagtttcgagtataggaactgtgaattcctgcgtaagggtctccaaatcacattccagctggacccagatggaacagaaaagagtttctgatcggcccaacacagaaccttggtgtttgcttccgaggacgtctcatagagccgcagaggtcgcaggtcagagtgtgttttttacgggattattcaagacagcgaccgctgctggccttacagtatttcctgcctctcccggggcaaaacgggatacggatcgtcttgagatattcgcaatatggagctcatactcgaccgaccggaatgcgtggagggctgtgagggtgtcagttaccgaacaaacaatcaaggtgatgggcgaagggtgagcatacagcccgtccctaatgttgtggggatcgcagaaaaaccaaaaacacgatgttgtaacggatggacaaccttcaaga

SEQ ID NO: 3419 - DNA, 1998 bp, Toxoplasma gondii
  source 1..1998: mol_type = genomic DNA
cgaggactttgtgtggatgggaacagtacagtattttccgctacagtcgcgggcaagagaaagacactcggagcgatagacagaaaggtgataagagaaatcgtgtcgttgtgtgtggttcaggagaggaaccttttgcaggtcagcacgatagacatgacttgtgattcacggagcacagatcctgcggcttatttagaaaagattttcaatcaagttgcgtcccttactgatccagtcagttcgggtaagaccttttcgcacggctggttgccactcgaacgcggcgttccacgtacctggttgatgtcctttcagtgggcttttgaaaggacgaaagagtatcgatgggcctttctccacagacagaagaggcataatcggtgcccggacgagacagacacaactcgtcctgccgccaaacaggcccgacggaggcccggcgtcactgggagtttctccatctttagaatcgtcacaacggcgcttgctgggggacgaggagcccagcccgataccagtcctgcagatacacgggacatacaagaggctggagaggtgatccagcaccatctcggctcaagctgctcacgtcagtgatctccgtgtgtgattaggttgaaatgcccgaacgtggcgtcttaatagcgacagagtttcgcaaccagacgagcggatagtctctggaatggcatacactcagtgatgcaagaaacaattgcgccagtgtcaagaggcgaccgtcacctggatccttgcgagtgactcgttctgcgaaactttgcttactgagccacgctcagggggattcttctcatcgcgtctgttctttcggcaggacaccatcgggtgggggcgtgcgttactcaagcgtgtatgcagttgcgagcctcagcgatagacgcagtcgagttgccgtggcatttttgagcgctacggaaacgagcagaacgccgaaattcaacggaacgcagaggagggacggtccgcaaagaaattggagaaagccgtggccctgctttacacccaagggggaaaaatggggggaaatgggacgggactcaactcgaactgtggacagagaagtcgaaaggcaaaaaccaactcaaaaacgtcccatttgcctaagaatagacgcttccaagtgtatggatgaagatgaacagcgacgcagattctgtgacactatcgttttacacagtgcactctgacaagacaagccctccacgaaagcgaaatcccgacgacttgcatgcgaaataagtggagacatccggaagatatcgccttccaggttccgtagctcagccggttagagcgtgtggctgttaaccacaaggtcgctggttcgatcccagccggtaccgcgcctttcttgtcgcatatcctttcctcaagatttaattactttttccctagctgaagttctttcttccgacatcattgaagaattgttggtttcacaacgcctccatcacgacacgcgggcattccggcgcacggagccagcaccgacagtcatgctttgagaacaggtcactcggtgtccgttcgcgcgagtcttcttcgtacgagcctctgccacctccaagtgtttgacatgaaacgacgagacttaacccacacctgcgagcgagtgatgcacacaatcggattgggcattgctaaacgaataaccggattcgccagtgacggagcttgtggtgctgcttgtcttgactgtggcctgacagtcactgaccactcctgcgcgacagcaagtcaaataccgtgctggttgaaatgtcaccactcacatcctaagctgtatatacacccgagtcgtcattacaaaagcctcgtgtcgccgtgggtcccgctttgtctataactctgtacgagacaaccacactgtcactcaaaaaaaacgacctcatttacgacacctcgaaccatagttgcgtacgtgctttccttggtccctgttgttagattgggaacgccagctgttgtttatca

SEQ ID NO: 3420 - DNA, 4798 bp, Toxoplasma gondii
  source 1..4798: mol_type = genomic DNA
ttaatgtgtaataggcagtcgggtttcatctgttacttgattggtactgcatgcctcattcttttttctatggttctcgttcgtgggagaaagacgtagaagttgcattttaaagtgtggaagagagagtctagcttcagttgtcgtcttatgatacactcagtatatctacgagtctacttcagacacaccgtgttgctcttcaggcagctgcggtgtcttctcaatttctgctggcccaagagcggattctttctgttagtggtataatttttcatgctgagacgtcgcacttcaagcgacaccctctgagctaacttcctagcgtttgctttatctggttacctccaagaataaacgaattcacatcgggtacgaatccgatatagacgtccggatgttgagacactaacaaagagcaagcgcacgattctcttaagttggacggcgtacacgttcgtgcgaagcctgtgctaacaaatgccacgccagtccacacacggaagatacgtagatgtgtgtctgtcgtcaatcggcgtggcattgccacgtcagccgaggggaaggaacagtctctctcacggcctctccctcgttattcactgaaaagtgaacacatggcttttcgtagccttagttcgtttcctgtttccctttcaggcactgagggtcctgtcggacggccaggaccacaaaaacaaacaagcaacttgttctcaagcaaccggaaaccaaacatgacgactgaaggaaatgcgctccacactctaatatgtacttcattttgaagttggagaacggaatcattattaagctcccggtagaaacccgagacgagtttgctgccagtgagggagagcagggaccactgttttccgagtatggtggaattcccgttgaacggaacggagtggcgtgttgcgaatgaaacaattgtggcagccgttcttttgccggtggaatattccaaatggaacgcttggggcggaagaccgcacgaggggatcgattgtaaatgccgttcggttgtgcatgcaaagagtcaggtatttatactcaaaccaactcgtgtcgtctacgttaccgccacacaggagccgcaggttctttgttaaggggcagtttatattggttcacgctatatggaacggtgaatgattttgatatccttttagttaaggcagtttgacgttctgatatgagccctcctgcttttctagattcaagaggaccacatttgtcaaattgacaaacggaaactgatgtacgagtagtgtcacactgacgacgtccgggtaggcagtcggtcctttcagagtttgaatccaccggattaccgcgtcacttggaaaaaacacctctggtcttctggtttctggccgcttcgcaaacaacattttgcagaggaatgcggcctgacacaaaagaaaataatgcagggtcagcccttcccgtgtttgctgatggcagcaggcaacccgtgtgcatcacgcgttacggtctgaactgctgaagttgtaagggagtgaagagagccaataaagaagagacaagaaaagaagcagatgaattcgcgactgtgcacgcgtgcttacctcctcgtatcaccggcaatctcagttgcttccgactccactagaaactggaccccggtggaacggcctgtgctgtcagactctaggaccgagtcacttttcccgatccgactacgcaacgatttcgtttttctaccgtaccctctcgtcagcttccttttatgtcggagtcccaccctgaaacaacagcacaaggcaattcagtcccctggccttcggcgacgctggactgcccaccagatcacctgcctagaatttttactggcaaaacctttgtctcgttgccctaatgcttcgaatcctgccccagttgctgagcaaactcccgctccaccatggcacagaacggcggcggctgtttcttctccagacgactccgggaaggagaggcagtatatgcagagggatgtgtaggctgtgaatattgtgtgggttgtgtcacaggtgactttcgctgtaattcttcaccaaacctcgacgctgtatgtgaagcactgggtgccgtaccactgcctacgcacgtgcatgctgctttctgagaattcctggagcgaagttgtcacggtcaccacgcgcgttactagtttgcgaattgcttggcagagacacagaaaaggtcacccgaccagccacgaggcggtgtgcggttccggtgtatggacggctcgccgcggcagggatgtgcacgctggcgcgcagaagcttcgcgcggacactgcataaaattatgtccattttcttcccgcgagacggggtcgcggcgacaggatccgtcgcctttctcgatgccagttcagatcgcctgctccatccgcgctcttgcaagatcattcgtcgctttcgcgagactgttgtccgtcggaatgtcgatttctgttctggacgactccaccacacttcgtcatcgttacatgagaacttggcgccgttttctgcgcaaaaccctcgctgcagcgctgcagccgtttctgtgcagaagcgccgggggacggcaacacgcaacgttccttccgctccgtgtcgctccgatggacacggtccggtggctctttgccagatcgccgcgcgcgtcgccaaaccgaggtcgcctggcggtcgcattttcggcccgcctagcaactgggcgcgtggactgcgctgccactttttcccaacgagcaactgtgggcagagcgcgcgcgcttcgaaataaggcgtaagtctgcttccttttttctcgtggctagatttcgcaatttcatgcaaatgttcttcccttttccccgctagctcaggcatctgttgacgccgtcgcgcccgtcgaatcctaggctgtctgtgaggggcgtaaatgctgcgcctctgtgcctgtggagaactcgccaacagacttcctgttttgcagatttctgtttcgaaccgtttctgaggagaaggcgccgcagtaaaaaaaccttaggaaattcgtttcgtcgaccgtgtcctcgctaccgggtctcagaaggtcacaggggccacctctgcaaacgcctggcgtgcggaatgtgtccgcgcctgctctgtcctctgtgcgagaggtaggacaggttcgagagcaccacttgcaaggcgcggaaggctgtgaaatcgttgcgttctgagagggaagacgcttcatacatcgcgtctttttttaaacagctgagtctcgtattcaaaggcggaaccacgctctcattttttccctcctgcgttcgcgtcgcgaccccctattgcatccgggccggtcaccagcgccacaaacctcagccttgactcttgaagaccacggcatactggcatcgtgtgcgggcgcgaaaagaggggctgcgttgtcagcgtacttagcctggcaaaaccctccgtcttcccgccccccgggaccgtgtgcattctgtttctccggttccgcgccgaatttcgcctttcttgcctacgccttcaccaggcgcgaccttgttccgtgtctaggccctttttctgcgaaacttctggtgtcagtgagagggaatattgctgccacctttgaggcgctaaacgataaattccgatcacgtgtgcgcaggggcgttgtgccacgtgtctttcggagccgagatttgccctcagaaacccgggcgtgagttgcgtgagtttggggaacaactcttaacttggacgacgaccgattcagcacgtcttggaacgaccaggaagcatagcttatgggcgtggagaaaggcagttaggtccgaaactgttttcgactcgtccagggtctgctgactctaatacgcgccgcggcgtcgtctggtgaaggggtcgctgtgtcaaagcgtgtgaaagaattgacggcgggaaagaccaatctgggcaggacggctgagttttagctacggtttcggcggatgagtagcgagaccagagttgtcgtactaacaggaagaggcaagcatttcgaatttttccggattctttgcacgcgtcgctttcccttttcgcgtagagcgcttgaagctgccgacagaatttcctgcaaaacgccattgtttccgctttttcaaccttcgagtcgctgggctatgctgcggcgtcctccgggacctgctttacatgcagccgcgcttcgccactcgagttagcgcgcggcgcccccatcttcttcttttttctcctcggcgccgtgtcgtgctctcaaaacgtcgggcgcgtctgcatgtgtatgtacgtcgagtagctgacgattcgttttggagggcatttagctgtgtgagcagactccgcctctgtggccccgagacccgtgcggttccgtcttccgggactggcgcaggcacgtgcgcctctcctggggttctgtacctgcagtttttctcgtaattgtttcggcttctttcttctgtttcagtgtctgcgtcttcacgcctcggtagatcttcttgacgaacaaccaactgcccttctcgaccggaacacctgcttttcagacgggacacttctctcaggctggcgccggcattcctttgcttgctcgacacccgtccctggttggtacgacacctgaccgggcctcgtaaagggagtactccagctggagcaggcattcagcatccgtcacggacgtgcaaggagttttgcttcctcattcgtgcctctgcaggttcttgcccccgtctccctctccttcgcgctctcctcatgtggatttctgggtgaagcgctcagaa

SEQ ID NO: 3421 - DNA, 4686 bp, Toxoplasma gondii
  source 1..4686: mol_type = genomic DNA
aactgtgtgagtcgtctggaagactcacctccagaaaacgcagctccagcagtacctcgaggcattgcggagaagaggagaacgcgaagcaagagaagaagcggcgattcgagagcgacaactgcgcaaggagacggaggagacagcggagaaaaagacggggaaaagaaaacaaactggcctttgcgcttgacggtgcgttgaaagggctgtgtccgtcggcctcgcgacgaatcggagcaaaggagagcgagaggacggtgagagagaacaaggtcgccaagaagacgcctcgaggaaaaaggactcgaaatgtttcggaacgaggagacagcgaacaagagagtggcgacagtgcaccctttctcacagaatttttttttcgcgattctcgccggtgtcttttcgtcagaacgcaggtaacgcgggaagcagatactccgaagaaaggtattgcgaaggacgccacaattgaacaaaaaagttttttttttaattgcacgcaaatcctgtggcgcagtcacgaggaactgagttgtcctttcagatcctatccgctaaaaagccttgtgaagggagtttatacatctgaaatctacttgtatctactcatatatacatatacatatatatatatatatatgtatgtatgcgtatatctgtgtaggtacactcccgtttctatagggcgtcttggtgcagatgccggcgccggtcagagagtctttcgcttccgcaggaaaatgtcttgtacaggacgctagcagagaggagaaaggacgaggagaaaaggttgatgaagacgagatcaagaggacgttggtgaggaaaaggaaagatggaaaggacgttgacgtccgagaactctgtgaggcggcatggagaaggggaaagacggtcgagatttcaaatcgaacgatgttcgttgcagctcgcgtacacacatcgagtgtatccgagactttacctaacgagagacacagaaacggagggggaagggaacctctcgcctgtcagacgaagggggacaggaaatgtgaggacccgcgacgtttcaaacgcgtcgcaagctccggaaatccgctttttctgacgttcttttgctcgccaactctccccgaaatgcccagaacgcatgcgcatgcacagcgggagtgaggacagtccagaatagccaggaagcaacaaacagacccttggcagagacctcgacagaaaccgaccaggtccggcaccttggttttcacggtctttgctcgggtcgacggcttccgtccgctccgaagaagatgtggagtcgcctcgcaagagttttcttgttttgtggagccgcagctgcgcggctgtgcgaagagtcctctcttctgtgtcgcgagactacttgctcgagcactggggacgccgaagcagccacagagcgcgtaaaaaaggatcttttccgacggcgattcgctgggagaatcgactgcaaggcatgagctgtacagaactcctgattaaaactctgcatgacaggtatttgaactaaaaagcgccgagcattttaacatttatcgacggaaccgtaagccctccccccctgacaaaccccggacgcgttcgcgccagagactcgtgtacacctcagggaggcgaagccaccagacgagagagcagttgaacgcgaattcctgcgtagcacagaaactcgaagttggactctgtctttctcgcttacagtttagctggcacttcgcttggctctcggcgtttaacgaaaaggcgcgcgtctcaggaaaaaacggtcgaaggtctctggacgcccgatttgtgtgcagaaaagcaccgcaggtcgcagcgccagctcactagagtaacactggggaaacagagcgatttgcggacttggtgaacgacagaaatgactgtgcgttctcagtgcagatcgacttttccacggcctccaacggagaggcgcttcacagcaggccatgcgcgactctggacaacgctgcccccctttgtggcttctctgctcttcaccctacgcgcacaaattatatggccgatcctggtgtaaactttaaacaactcctaaaaagcgtggactgttggcttcttctaactggaatgacacctgcagtgcctgtggcgaagaaacagccgatctcgatttacagggaaaggcactttcagttaagaaccggaactccgcatttccagtcgagaacgcgtatatgtacacatatgcattaataggtatatatatttatgcataaatatatgcatacatgtatgtcttctgcacatatgcgtcctagatggctcaagcatatgcatatatatatatatatatatatatatatatacttctatcctgtgtacatatgggaccagggtggcatacgtgtgacgtacatatatatatttatatatatggaaataattttcacaaatgttacgtagatggtgcaaggttaggtgcagatatgttaatatatatatctgtacaaatagatagataaagatggatttgtttatcctcatttttcaaatggaactagatggtgtatgcatatgcgtgaataaccatgtatatatatctatatatctatataaaaatatgtgtttgtgtcctctgtaaaggaagagagcgtagctggtctatgcgtatttgtccccacatacgagcaggttctattgcatactttttacgcctggaaaacgtaagtggtctacgcatatgcgtatacatatatatatatatatatattagtaggcaaggacggattttatgtagagaaggcagacctagcctgcctcggcgcctgagtagaatcctgcgtatgcgaggatccgtctggtcgtccagtgtgtgtggggtaccgagatgttccccgcgccggcactccccccggcgaggatcgtaacgcgcagaggtccgcgctgaaggaggcttcgcttgcggcaggttttcacatgatcaaaagtgactgttctcctggagcacttccaaagaactccgacttcaagggtgacggttttaaaggtcttgaatcccgcgcccggtttagattctctgggagttctgtgtcggcgggccgctgccgagagcgaggcactgtcagctggtcttcctcgcaaggacctgaggcctacattttccagtgtcgtctcgcgaagctgggtatttttttaaaagcatggatttgtctcttggggctgggagctgtgtgtcctcgttactgccgacaaatcccgcagaacttgcacgccgtttccctcgtttccacctgtctgtacgcagtttcgcacaatatcgcgggaacaggaggagcgctgactagcggccagcaggcccacgagtctccaagccccgcgaatgggggtggtgaagttgcgtttgccggtttgcgcgttctacgctcttccttccacactttgatgtccgtttttcttgccgggggaaaggagcctcaggatgaactgtgggttcttgtctaggcgccgaccctgtggttctagcgacgccccgcggcgctggagactccgtgtgtgatttcacgaggaattcgccgtcattttccgtgtgtcaactgaatgtgcatctttgttctccacccgtttcacagttcctgtgaaaccaaccccgtgtgtccaggcctgttccaacgacttcgcgggatgccgcgagcgtccagtgcacagatcacgcgaggcagcgcctcggtttagagctcttcaggaacgcccgaatttcaagttttaagaaatcaggtacgtgaagtcgtcgtacattgcgcttcggtgactctctgtggcatacagcggggacgagtccgtcactctggcccccgttgagcccagagttcttgccgcgcgcgctcgccagcttctgggtttcgctcctacaactttccagtgtttgtcttggcagaaaagcgcttttcgctgcgcttttccgtcgtgcgaatttcgtcctctctgcccagtcgggcctggggtgccggtctcggggtgcagggatctgaggctcaagccgcgcgcctttctccccggactgccctcgcttttttgattttccgcgttttggggcacagtgtcgtgacccccacgtagcgccgaggaagccgtggaagtctctgagtcgcgcctttctgcgtggataccgggatctttctggaggcagcaatcggtctccttgtttggctataggttttcgcttctcaccgcgggcaaaaaacgcagtctttgtcgttctgcctcgtgttgtccgcttgagcgcgtgccggcgtcgacgaacttccggctcctgcttcggctttccgcgtcgtctccgccgtcgttgggcctccacagcatctccagggtttttcgacctcggtcggtgcagagcggccaatcgaatccttgtagagtgacgagtcacacatgatacggtttcgctgtgtatccatcactgtgccatagttctgtcacaccccagtgcgattcgcgacttttcgtctttttgtctccgcggagaggtccacaatgaggcgcctgaactcctccacagctgctgacctgtcgagtgcggtgtccgcctgagcttcctcgagtcttcctccgcatgtagccttcctcttcccgcgactcgccggtatcctgtggagcgcgcgttcttcgcctttgtcaagttttttctcgcgttgttgttccggaaga

SEQ ID NO: 3422 - DNA, 3054 bp, Toxoplasma gondii
  source 1..3054: mol_type = genomic DNA
ctgcaaaaacgtgagcttttcagcgaggaaagaaggtgtcaaactggaaaacaggaggcgtcgatgtggaagggggtagggggggtaggggggtgtcacttcgtgcatgcgattcggtggaagagtggcgacgggagattcaagcaacactcagttttcgcgaaacactggatttcaaatccacgacagagtgcgtcgttttccccgcagcaacagagtgcggaggcacttggcgagtcgccatttccactaaatatttggcacctgaaaacgcgagaacctgaaaaactggacagtcgtctagtaaagtgtgaatcccgtgggaactttcttcctttaaatcttttctacaaagactggaattttgtgaagagagtcggctgttgcccggcagatacagcagacatcttgagttcacgcagaatcgtcatttctcggaacccagctcagcattcttctcgaaaaatggtgtgttcaaaagtagataaatcggtgcttatggatagatatgcatacatgccttcaaacactcgtacatgcagaaagagaaaacgtttgcgttcaagcagaactgtcgtcttttggaatccagtcaacatgccagacccgaggagactcgagagaaaagcacgcagttacagttggagaaactgtcgctacggctgagacagcaagctttcttcaagttgcacttgaaaacgaaccttccggaaaaagacgttgtcgcccgactcagagttccgtaaaggaccactgagacgcgttcgatgaaatgtgctcacgagggcttgccctggaaagcagggaggcgacagaaggaaagttgaaataccacgacgtggtagaagatgtgccaatccaccgcgaagccaaaacgagttccgcagatgtgttttctgtcgtttcgttttccgacgttctcttcttctggttgcgtttttttacgccgggacgtcccgcttcgctgtcgcctctttcgcctcttgttactccgtgggtcgacctaaatctacgggtggagtggcgacggtgtgtatcgtttacacttcctgggtttcatataatggcaataagaactgcagtgttgaaactctcaggagttcggttcccagctcagagattgaagatctttgttcgccagctctgaggaacctctagcctttcatggccactgtgcaggacgtttgccactcccatcgaaaacgcagagacatcgcggacgtcggacgcgcttgaaaacaactccgttgtccagcttcggaggaaactacgtgttgaagggagcacatgttgccgggttgaatagactgcagagaatttgtggcctaaacgagaagaggttcttcgcaaagcatgtttccaagaaagtgaaggcggtgcttcctcaatgcgacagcggtcgagagtgcaacgggtcttgccgctctggcgtgagcgcccagagaacggcaaacaccacattttccccagaggctgcatgcattgttcagatgtgctcaggagaccctccatctgtgaaggaaagaaccgtgaaatctgctttgagtttcgcatgcgttaacgcacagaatcatcaagtgttccggggtgctcctttcacatggcagtggaagctggctgacgacccttttagctttgcgcttcagagctcgagtctcagagctcagagagaaatcctagagtaccaaggccataggtaaaacgcgcacagtgccggcttggatctgctgcggggggggacttgacgtttttacggcaggtcgtcatctgcaggtcagcagtggtgtgtgtatccgagaaacacggaagcgattgtgcgtttgacgacccgaacggaatagaagagaaacagaggaccagttcctctgcagagaggtggagaagcaaagcttccagtgttccaaaaaaaaactcaacagaaaacaggcacatttgccgcagagtcacttcttcgactgactctgcatgccaatgcttcggcgtgcgtgttccgtagcgctgtacttctccagtcgcttccccgagaaaaatgggtgtgtagagattctatcaaccagttcttctctgggtagacaaagaaacatcttgtttcctgaaagaaggacttccagtgccgtgatatgcctccgtatctgtgcaccgcgtcccgctgcgtgaaaacgggagagggctttgcagccagtctctttttcctgagttattagaaaactgtggagagtcgatgactgaaatcgtgtttcgtatgagatctgcacgtgtttctctcttcgatgagacgggcatttgcagacctggagaacatgtcgagggtttgaaggagcggcgcgcgactcccgcagctcgccttgaaaaatcgccagtcctcaacctcccttttctccgggaatcaagagccgcaaggtcacatgcagactcttccaacgttgaaacactttctcgtctctgcgttgcgtctttgtctgtgaccctcgaaaccgattcgccttgctcccgcgccctgtgaggagcagctgtctgtacacccgaagacaaccgggaaaaatcccctcgaagcagcgacctgtttcagaccttggcgtttgatgcgcctctgtgttttgccgcagacattagggcgtctctctttgtcggggcgaagaggaaagaagcagactggggagagctgaggttcggagcaaagagtctgaagcacgaccgcgaagggtgaacgcttctccgagaagttgtggtctttgccgagttttgtagtctcaaggcgccgcaccaaggacacacgttgactttcagcggaaacatttctcagtctgctttgtttttctggatcgaaagagccgtttcctcgcactgactcagacctccggctggtgcccggcgaaggccaggcgttttctcccctcttttctgccctttcgctcccctttctgaaacgtgagatctgctgtgcacgctcttctcgaagttctggaattctccggcggcgattcgctgaggtgtctcgcggaaacggcctcgcgacttctttccagcaagctcgactgtacatacaccgcacca

SEQ ID NO: 3423 - DNA, 4882 bp, Toxoplasma gondii
  source 1..4882: mol_type = genomic DNA
ggaagaggaagatgacattcgcttgcgactgctagagtacgattcggacttctcatttgcgcttccgccgctgcgcctcgtgtctccgcctcgatcgcggcgagacgaagaagacgaagcgctttctctctctcgacttctccgacgctctgaccagccttcgcggccagagtaggacgcctccgtcccccccctgctcgaagaggtgccagagcggctgttgcgagacatcatttcaccctagagatacacgcgcgaagccgcacatggaaatcaagagaactttcaccgattgtatttgtgaaacgtgattagttttcctagccaacaccatccagttgcttgagaaccagtccctaaatatgagagagacaattcggatactgggcagtctccacgggaggcacagaggacaaatgcctagcagactgggaggcccggcgctagtgagggctccggagaaaaagaaacaacgcagcgacagggaagaacagaaggtaggaagctaaccgacgtgtccaatgacgcaggtgagggaagtaagtccgaaaccgcgagggaggacgaagcgtatgacaagtaacgcagttgacgagagaagccggctccgcaaagtgatacggggaaggcttcacaagagcaacacagaagagtcagaaggggtaaaggcacaggattgcgaggggagatctgacggacataggcgatataatgagagaaaagcggtctgtggcacacgtggaaagagagatactgggttaacagttgtaagaaagcgctgtgagaaaactccagaacaccccaaacagatggaccgccgcgtggaacacgagacagggagaaaagggaagcgcccgccacacacagaaaggcagcgaaatacagatgaaccccttatctgcggttctaaccaaaaaacgagggctaatgtagaaggaagagacggcggccgacgaagctgttcgacagtaaaggggggtgagaatcctgctggcgacttggggagaggtgcacgaaggacgggaaaacggagagaaatcaaaattcatgtgggagcggaaaaacaagggggaagggaaacggaatgcaagcgcagagactgatattttgagaaaaaaagttccggaaaaaagcagatggaccactaaaggcatgtagactcagctcgcgcatcgcatccactctccagcagaggccgcattcgaggcgccccagggggtgtacgtacaccgggattctccgccgactgaaaagccgtttttcttgtcttctcggtttccacagaaaacggagaacatggaagaggaaggcggcgaaagcattttgtcttcaaacgcaagatgcgcaaacgccaatggcgacgaaaaggaatcgcagctcgtccgttctcagggaacagcggactcagctacgactcttctcagatggagacggggaggcctagagaaaagatgcaaacacaccgtcgtgcatgttcgaccgggcaacttctcggcttattttcggtaagactagccttcgagttttgtgggttctctcggaatttggggctaagtcacttggaaacacgacaatacaaatccttggctccttcctcggcgttttgtacaggcacattttctgcttcttcgcgaacacggaagtagcacagtcgccctgtctttctcagacaggaacagagtcacagcggacagcacaagatgcacacagtcggccgggaaagtcggcatgcctcatgtatctatacgcaaatgcttatttgcattcttatgtacgcgtatgcatgaagtcaaatactcgtatacgcatggtcttttattgtcgtatcacacatttcttcatgcagagcagatgcctgccgtccatttaagggtttgaaaatgtgtacgaaaggtttgtcgcctatcgtttccagctaaaccaccacgtgcatttgcctctccctgcacaggactctcgatatcttaatctggtgaacatttcaacgaaactgtttgtcacgtctccagtgtccgctgtaggactaacagtccggcgtagagacaaagtcttcatgcacatggaacacttggatgcagcgacagctagttgcttttcaattgaacatcggttaacgcgaatttgcgttttgttctgtggcactctagagaagacaaggggtgttgcggactgctgccttgggttcctcaaacggcaccgtttctcttctcggcaataacaacaaccggacaatacaggaaaaagagactgccgaaagtcttgacccgaaccaaaggctttttgcacaccatgacgcttctacggttacaaacatctgccacaaatatatatatatatatacgtatatgtattatataggtggagaaagagacatacctatacatgcaaacatgctgcatatctaatatagagccttgcaaataggggagggaaatgcttgcgttgttcttgttcaaagtcctgaacgaaaaagctatgtctgttgcaaagtactgtcgatgctgaaaaaacagaaacgcaacaaagaccggtttctgacagactcgtgattgagattttcggagccgttctgccccttttccaaaacgacagatcgaacaccaagcccccgatacgcgagccaccgtcgttgtttctgtgtcggtcttccacctgtcgcgggtcctctaggtcgttgagggtaggcgaacgggaggagatctctgtactctttcgctgttccttgactcccttttttcgtcggttttagaaggaaacaatcaacgaatcgcgcctggacagagtacactattgtcaagaacaagggtcttcctggcgatggcagtgagcctttttgcttgcgagtccaggtgtacaatctcacaagagacgaaacaacagaataggtgataccaaaggggtagactcacgaataaccgaggtacactgaggatcacgagcttgtttctcgataactacagaagcagtctagtagaactgttaatggactgaaactcttcccttccctctgtctccataaatgcttgcataagaggaacagcgggagatgggactagtcggacattggcggaggtctccgctttttttgtccttcttttgtccctgctgtgtctcgatttctgatcacctgtctcgctgtcgcagtggcattgccactctttcgtctccccacctcatttgcttcttcgttctcttgctcctgtcatctcacatcttcttttcaccttgtcacggtatgtacgaacataaaaaaatgaaagatcttgtccgtatgtcgtcatccgttgttgcctctctcccctgttttagccctcattgtttcccgtcttgcaaagcagtgaaatatgtacagtttagtacactttactaaccttgttgcaaaaaaacggtttaaattccctcctggacgagtgcgcacgctaccagaaaattcgataaaaaataatggagcgtctccagctgttccactgtgcataaagagacacactgctgcacaaacgcagagctctacacacgctgccatgcttgtgatgcattccgcacataccagatttatggactgtcatctatccatctagctgaatgtctgtgtacatgcatacacaattataattacatagtgaggtttatttctacttgtattcgcaccgggtgacaatcgatgcgtgtcaacgaggcacttacgtgtgaaagactcactccacaaatacgcgtatctctagatactcgtaagcatacttatacgaaaaatgtccacttgatgtaaacgaatccatgtgtatcttcttccttttcctttttgtctttgtgtacaagtgatttttccagagaccctgtattggcatccgcctcagaaactaactagtcggagacgcacaacattgaatccaggttatcatcatcatttgacccaactgtcacctgtcgtttcataagccgcctcgtctactctttatctatctccacttctcactttgtcttaacacaaccgctggagaggagaaagggttgattggaggaagcagagaaagtcggaatttcacctgagaggacagatgcactctgctcgtaccgtcgtcggtctcgccgctctcgccgctctcgcccagctagctcgacggtgtcccgagagtgtgtgagaggattgtttccgggtttcccagcattgttgttcccatcctcatcgctgcgattcctcccacattgaaactccctcattagccagatcaacttttcttgatcttcatcttagccggctaatgggcttcattccaattttaacatgtcagttccatcgaggggagcaccgacactgaattcacgttgtggggggaccggatcctacaaggtttgtacctgaacgataaagagagcggacatgtcgagttttcttgttctttgaacgcaggcgaattttttttgcctcaattttagttggtttgccctctcgttgtagacaactcctctgctgccctgcatctgagccgggtacaccagtccccgatcccttctgattccttgggctcgtggacgaatcacgaaaaagactcccatgtgaactcggacgctcctgcaaacatgaacccaatttccaaaatataagtgttttttggactgatgagctgtgttcatcaatcttacactgcagtctctgtgttgctcctggcagtgccgttcatcgctgtgttcgtagcgtgtcgttggatgctagacggtaacacggaattctcaaatttctctagttaccaaagacgagaggattcgtcccgcttgtatgttttttccatggatcatgccagtgcgtgtttcctcccgcgattgcagttctttctgatagatgcttctattgtgtttgatacgtgtgtccgcagcgtatccaaga

SEQ ID NO: 3424 - DNA, 1461 bp, Toxoplasma gondii
  source 1..1461: mol_type = genomic DNA
acctgcgtctgcgggtttctccgacgaagacaagagaggagtcttctccttcttctgcagaaggcggcgcaccccgacactgatgggcaaaaacgccgcgtccagctcctccggcagtgtacagacacctgggggctctctgcgggtcggcgccttggtgagtggcgaggagcagacgttcacgaagtactcgagcgtctccgagatctctcgcgcctctccagcttcttcggcgccttctgctgcctcggtggagtcccccgcagggagttcgacgatcagtggcggcgcagaaggcgaggagacagagcgttcctgcttgctctgctgggggggtgagatcttcagctgagcacgaatgacgaagcctggccgagggcgaaacggtggcagcgaacgcggagccgcgcgggatgatgcctcgctctctgctctctgctctcttatcgtgcttctgcgagacacagaagaagaggaagaacaagaggaagaacaagaggaagaacaagaggaagaagaggaagaaaaggccgaagaagaagacggctggctctgtcctctggctgcatgcaattgctcttgaatgaaacgttgatatctttctgggtcactctctgcgaggtcgtcgagcgccgcccagagcgcttgagcctggaccgcgaggccgccggtcggagacggagaaaactccatcttcagagactgtctcttcgcctcgaatggcgacgaaacggaaactaaaaagcgagaacaaaggaggagatccggacgaagaggagcgaagacaaggacgaagaagagagacaacaaggaagaaggactgaagatcaagaggccttgtcaacggcgaccttccaggtgagaagagaggagtaggtgcggcatggtaaaagagaaaggagagtttttgagaaagagaaaggggaaggcgacgactgtcaggagggaacagaagagagaagaaggtacggagaatcgtgattctgagtgcactagtaggtatatggacgatgaagaggaaatagagaaaagagaaaattcgcgtagatgcgctgagtcgcactgaaacgctggtgcaagccacggcaaagctgtactctgcctgtcaagcatgcatccgaactcctcgtccgacgaacggcaggcgaaaagttaaaaacgaatctctcacttgtttcaggttttcatgttgtgcgtctcaccacctgttctttaaggtcgtttttctctcgcgttgttctgttctgcgtctgtgtctggagtcgtcgctccttacgtcaaaaacaggggcgtccctattcttgctttgtaaaatctttcattttttctctctcctttctgttctcaattctatcctatcgtcccccccttctctatttcttgtcttgtcttattcgcttccccgacttttttctcctcccgtctcttctcttctttcttgtctccgtctttgtaaaaaga

SEQ ID NO: 3425 - DNA, 3832 bp, Toxoplasma gondii
  source 1..3832: mol_type = genomic DNA
gaaacgataaactcgatcaatcagaacccacttccttggcaacatgcgtttgtttgaaacatgggcaacgcgttcgagttccagtgtgtgtttgtcatcgtcaactccctccacacaccctggtacagcttctttacaaaacaggaagaccgtaatcagtggtgaagcgaaccggtccacttcgttgtttcccacttgactcaacgaatcgcatttcccgtcagtgttttgcagctccagcggtgaagacaccggcgatacatgggcaacgaaggaattagtctaacaagacacattgtctatccatcaggtcctctgttacggactcggactcggtacgttttccagagaagcgctgaatccgcgatctgacctgtggttttgtcctttggaatttccagctgtttaatgtcgccgaatggtaaaaaggctgcccgaagcacctcctcctcaacctgctcggccaagcctccgacgtacaatgtccgcttcagtctctcttccccagtgttcgccaacagactcgtctgcccttgaaccggcagcattgtgacggataaagctctagaagacgcccaaagcaagaagaaaagctccgcacgaagtgctgtgaatttaaatacatggaaaaatgagattaccagacagtcttggagtttaagtgtcaccgccttgagaatcactgctcgccacaagtctgcaagtgcgttgcttgcagtgtcttgacactttgatggctttgtcctactgccacttcctgcagcgatttgaagaaaacgaaaaaggttatctggcgaaatgccgtaagattcaacaacaatcaaccaatagagaccgtttcagtatcgctctgacactggtccgccgccgccaagcaggaagttccctccccatatgcgaagttcagagccagtctttgacacaaagaaagccttttgcataaaaaagagctcgaggcacagtttcacgattgttccgattcgtcgaaattgcctttgtttctgttgttcaatacgaagcagctgtcaccacgcatgcgcgggaaaaccggcaccaggcagcattcgttcccgcttttaaatgtccacggcgtatgcagcgttcacctagattttgtagaagtcacgaataatgatgcgggaacgaaaatcaaaagcttcaggggtattcactgtgtgtcctaaaacaggattttgcagtgcgtgccgcttgttcaaagcgcccgtggttccgtcgctgcatgcgtgtggagtctcgacgattcgtagcgttacgtgtgtcagccttacgccgtccctgtgagctgccctgtgcagaggtgacttcaacttccgaactggcctggtgagtgtattacaaagaagaaatagagtatgcaccttttaacgtggcgtaagagctcagacgagtttcgctccaagcccattcggcgttgccgcctcaatgaaggcaacgagttgtgcaattcagctttttagtttgctcaggtatcccagtcgtgctggtcagttttaaattagcaacaatggtgttccactcgatgtttgagcactgggttacctgaagtctttccgttagggttggggtccagtagaagttcccattcctttcggtacaccaaacaagcagagctacaaatcaagaatttctggtcaagagcctaggagccttcgtcatgtgcatgagtgctgaatcacaagaatatgcaacttgtacataacgtttctgcaagtgcataagacgaaacagtttatctttgtgcaaagtgccgccctccggtagccgcgacatcccaatatgggggaccgtttccaagtttcagacgttactaccccctgttcgatggtccttgtcatactagcacctcagcagaagtttcctctccctgttgataagtggtaaccagaatccatatactacacctacagcaaaaccgctggggaatgtgtctttaaggcagcagaagcagcatgctggtgcgtggcgaattcctccagtggaaagaatttaggcgtgaagtcgccgcaactcatgagagtaacagtgctgatgtccaagtaaaacaagccagatcaacgatcgttcaattctattctcggttgccgccgtacttcaagagcgtattattattgccccgacaacgtggaacatctggcgcacatgctcccctacactcccgagaggtctggtgactgaccgctacattccaatgcagtctatcggttgtgcctgaagtgtggcggtgcctacaaagtgagtcggttgaggtcttctataactcgtttagcaggattcctccctgttgctgacgcccgccatattaacctgaaaagatagtctcattcttgcctttgaccaagcagagggtagacgctcgcctcaaaacaaggatgctcagtggaaatgtcagacaaaacccttggtggggggcaagccacgagcgaacttagttttgagtagatccccttgtatttttcaagttgctgacatgtttgtcttcctttgtaaccgcaacctcccaaacactaacggagacctccatccacatcttttttccgcgttctcgtgaaattggatcattttcgatcagcggggggaagctgcagtttggtacggttccggccttcacaaaggaacccaatccatactggttgacgcacctctctgttacacaaatacgcatttccaaggaccaattccagtagccaaacgaatgtcacgcgcagcgttttgcgccatgtttgttggcggtcaatatgcgcaaacgagagactcgagaggcggacttatgcgacacatctccccgcgttttgatttccctgtagaaatcaaatgaagttacacacggtaaaagcactcgatgtggagagagagagtccttgtctgcgtcgtgtctgtcagtgcccagccgtcacaaactgcagcttattttcgtgtgcgacacaacctgtgtacggaggcggtgcatgacacgtgtacaagggaactcattttttaacacggaaacacaacttcgtccgcgcgatacgtgtcttctgaggacctgtcaggttacgtattcgctttaccacagaggccgagcgcacgacacaacaaagcttttgaaagagtcacgtttgctggcggcctcttcgccgaccatctacaaaaccctggggccggccgtcagccgttcatgtgttactaaatcacaatcgggcgttgtgctggtggcaacagctcctgccacgtttccgtggattctagcaggcgcgcggcggttagagcaagccaggcgctgtgggaccgacaacagggcgcgggctagcgagtgaacatgacacggaaatacgtggctttcgctggaaatgagtttctgaatttgcatgtgttttttattgccaactagtacgattattggctttaacaaacgagaggcactgcggaactggctactcacttgcggcgcttggctgaaacgtcatgcgtctcggtgtcttgacgtgacattgaaccttgctaaaattgagcttgagggtttcctcgttttggatagtaaagactcatccgacgcaaaaattgcttcggcgaagttaaatgtgctttcgctgccacggtccaactcaagaaatcgaaaaggcccggtttttcgtcataggacgacagttccttcggccgaatttgttcggtgaacggggtcaaggtctatcctaccgcgcctgacaaagcgggctcaagaattactccccaatgtggacctttgatgagacgttttgtcttttacacgactactaaccgggaatcctgggtccgacagcatgaaaaatttcgatattcgatgacccctttcgaa

SEQ ID NO: 3426 - DNA, 4008 bp, Toxoplasma gondii
  source 1..4008: mol_type = genomic DNA
aaatgccgagaacagcgactttcgcctcttgcgcccaggcgaaaaaagaaggacacagatgcggactgcctgcctcatacaccgacgcagggcctccggagagaatcactgccgaaggtgagaaacctttgatttcctaaacaccacacagacatacaaatgcatacatgatcatacatatacacatatatatacatatacatctctatatagacatgtatacatatatatatatatagacatgtaaatgtgtggagagaagatcggagttttgaagccgcgtttacggaattgttgaggtccggtttgtgtggagtcccttgatcaggtgaagaggcaaagatctaccgattttttagaaaaaggtttgtcatcaacgcacagtctgacagttccatacgtttagacgagcttcgacacaactgcccgcctctttgcgaagttctgcttacttggagaccaatatcacatcgtctgagttcactgtacactccaatttccctcagtctcctgacaatgaggtgactgtattgacttccaaagtcgaggacgaggacgcggccgccatcgaactcagcagctgcgctgctgccgtcgcaaccgactcccgcagcattcgccattttgcctgaaaaatctctgcgttgacaacctctgccgcaaaacctgtcgttcctcgtagacaaaattgtccctgtcgcaagaatgaggggagagactcacacgaaacagcccagtggcaccacctagcggggctgcatgcaacttgccagcgaaaaaattcggcttgacgaatcttcaaactcgcgagtctctgcatgcgcggaagaaactactttgacaaaaacacctcaaagggcacgcgcttttgcatgcgacgcagaaaacgacgaaattggcgtcaagcggaagatttcagagtcacacagagtctcaggaacacacagactcggaaaagctttcctttttcccggcagagaaaggcggaacttgacaagagccgctgcgccgcttgcttacgactcaaaaacgatcgacaaaaaacgaggatgactggcaatcagacctgggaggaacggaagaggcacctgcttcttccgaaagagaaacaatttcaactcgctgaaaacgcatgcatcccacatgggactcaccgcgtcggagagacaccggcgactcgcgatgttcgatcgcatgcagctgcgaaagaacctcactgtgaatttaagaggttctggcgtaccggatcctagatccaatgggtgacgagagttaaaagaggcattattgcacacgcagaggacatgacgaagtcctgcagtttacctctctgctcattctcgcttcttgctgggcggggggagggatcgacgggatgggggaagaaaacggctctctccgaagccagacgcttacttcgaggaaccgcgtcgtatacctcactttttgttgaagcgcactgaagtttttttcttgcgctcaaaataccacacatttcaaacagaatggcctacccccaaaaacaaagagcgaacacagcggctccgcagaagctggacaaaacttcctcgttaattgcagagtccagtaggtacataccggacaacgtacaagcatcaatgatgcctatctctgcttctctctctagactgggtttatacgctgggtatcgattcgtatattcgcaaattaaaatcctcatccaaatatatatatatatatatatttctatgaatacatatgcgtgcatgcttcttggcatttctggacctcgccagttgcattttgcgctggggtgagaaatgccaaagttgtcggcttgcccaggccagaagtcaccatttcctggatacgcgtccttgcggacatcatgcctcctattacttgcacactctcctgcagttacgcacaggtacacttacttgcgaatacacagataactctctctctccatatatgaatataaatatgtgtatatatatatatatatatgtatacacatgcatatatgtgtatatatgcatgtcctcggggctgtgcgtcaaactcgaaatccgcatttgtggagcagcgaaatggagaaagcgaaatggaggaagcgaagtgtggcgacattgcaggctgagcggtgcctccaaatgttttctcttgatgcagccgattgcggtcttttctcaattgggtctccacaagagctttgggagcgaggtgtgaatctctcggactgctgattgtcagaaattccgccatccgtttgctgggctcccccttgatgaggaagaggacaagcgaagcacacacgcggtacacagggagagagaacagagggagagaaaacaagaaagaacagcgggaagacagggagagagaacagatggagagaaaacaagaaagaacaggtggaagacagggagagagaacaggagggaggagcaaggagccgacaatcagcgagcttgggtttcgcggacactcgcatttcacaggtactctgtttttccttcatcgttttctcgttctctgcttctccatctctcgttttttatcacctcttccgccttctctttgtctccttccaccgttcactgtctgtgtcactccggaaatcaatcgtttgtcggtaccaggctttcaggaagctctcgtaccttttgctcgagtacagagctttctttggacttcgtaactctcgcagcgaaaccagttcgctgcccaaggaaggaatcagagattcgcgcagtctctccaatcatgcgtggaagtgatgtcttctgttcacttttggagagtcacttttttccccggtcgttcacagcagacaacgccgacattccctagcggcgtcgctgcacaagatcgcgaatcttcttgctgacaaaggccttcacaaagaaggaccttccacatatcgtcgccaaggtttcttcaactggcaacttctcacaggtttcctctcaaaaaaaagagaaatccacccagcctggctaccttttgctccttctcgctcctggcctgcgctcacccacatccaccaggcttgtttgccggagagctgtcgtcctctgtgcagccacaaattccttgtgttttgcttcgccgaggaaaaagccaaaaacctgacttcccgacagtcctgcggtcggttctccgtcgtgagtgcctccgaggagactgtgactttgagtcgcgcggacgacgccggagacgaggagctccagttcagttccgagaaatatccacaagagcgttatcggaagtccagcaatgaccccccgactccacagagtccggccgcgtccctcgctctagcgaggaagaaaaaaaagcaaagccatgaagactgctgactgctgtcgccgcaaaagtgccttttcttcgcgttgtatgtcgggaaagtgtgcatgtgtcgcaaacgtttttcggctgtttttttccgcgtcctaatcgacatttctgcgtttttgatttttttcgctcgtttctcagaaaaggactttccgcggaatcccatgtcgagcctgtcggaacgcgtttgcgtgcatccgacagaacgcccccgcgaaagtcacctctttctgctctgacaaacttttgggaagttccgccggctctctcccggccttcgcttctcaaaggcctcgccgtttgctcctcggaaaatccccagagccactgcggagttgcaacgtccgccttgtctggtcctgctgcctgggcagcgccgctctctccttccagccgccagaagcgttgaggacctaaaactcagcgaagaaaaaggtctcttcagtccagtcccaagagaagacgaactcgcatgtagactgcttgacgcgtttcctttgcctgttgcccttctgagactttcatgtcgtttcctgcacactggggtacatgcacagagagtcgtcgacacagaaaaaacaaatatttccgtatctgtctgtctacatataaatatatatgcatatatttgcattcatgtatgtgcgtgtatatatgtctgca

SEQ ID NO: 3427 - DNA, 1089 bp, Toxoplasma gondii
  source 1..1089: mol_type = genomic DNA
tgtaacacttcggccttcaagtgttgtcaggcacttatctcagtacacccaggctggatgctgttgtgtgagtacatcgtgttcgccggagttgaacgggttttgtcaccaactgtaaagaaacgcagtagctcgagacccatttgaacggaagcaagaaaatgcatctgatttagaagaacgctctatcctcatgctaaggggacctttggtatcggtcaagacgcacagatgcaactgtagatccctatggagtgcaggagatctgcaagtgcttcagtttcagtcctaccggtgctgaaacgctagtactttaccttgggtcggattgactgccagtcacccacagatttgtcataacaagactcagaaagctgagaaaatgccacaatagaatcacatagagaatccgtatgttttggaatggcttcctcggaagcggagatgcactggctgctccgtttgaagcctgaacgttgaagggacaaattgacgccaaatacctatcttcttggtctgcatcgttacagtcctgtcttggtagaggggtgaatttgcctttttcactggtgtcagttcaatgtcatttcgttgtccgctcagacacgaacgactaccaggtacatccattctcacggaagtgcagcgctcttagtacacaaatctgactgtaaagtgtgttctgtgtacaagcattcgctttactagagatgccagctggttccaagcgtggcgttcgtagtattgattacaggaagcaaacgttcggggccttgctttggacgattttttgcttgacacttgaaagccgtcgaagttggctcccagttcctcaagaaaaattgcacctttccttgttattacagatgactccatctggaacaagctccgcttgtggcaaggtcgagccggttaccggggttcgcctggacagacacctgagctgccatcagattttgccaaaggatttccgaatgacgcagctgactcactacagaatacgcaccaaagaactttgcgggagattcgcgaagaaaaaaccaacaggtctgacgtgaaaaccttcgtgtgacgtacgaaaggaaaaaa

SEQ ID NO: 3428 - DNA, 1865 bp, Toxoplasma gondii
  source 1..1865: mol_type = genomic DNA
aaagcgcgtccaccttttcgttggaagaaggttcgcgctaacggagagagttgtttcgtattctgcctcgtcaaaagcgttgaaatacagctggcggacatggcgagaacagaggattgttcgtgtattcgaaaggcctacgtcgacagcaatcgttttccctgagaagtctcgaaggtgcatgcgctccttgacgttgctgtcgagccagttccagagtcccttgactcccattgcttcacgcgtttcctcaggtctggcttttttcgagtttgcgaaagagaacggaagtcggattcgccctcatcgggatcggtctgggtctgcttcggcaggtgtgtctcctgtctgttcagtgatgtctgggtcctctgcagacgcgtctgcagtttctcttgtcaccctctgcctcttttatgccatctcccagaacagactctcctcgagcttctcctctctttgcctcaaaaccgcagtgtgacatctggcggaaacgtctgggctatctccttctgtggcgcgtctctccttctttcctgtcttcctcttttttcgcttctctttcgcctctctttcccttctctgtgtgtcgcctcgttctcttctctcctgttattcttctcgtcgcttcttgctgtgttttcttttctgcgttctttacctcttctctctcctgtacttcgttgtttcccctctacctcctgtcctccctgtgtatggcgttcctcgctctctttctccctcctccgcggcacagatgagggcaggaggcgagcaggctgaaggcagagttccaagaagttcaccacgagtggcggggcggcgccagagaaggcgggaagaagaaaaagttcctctcgcgtcgcttcatccgcacaggagaatcggagagaactgcgcagaacgaagaatgaaaggcgcgaagaacctgagtaatagatggcgaaaaaatccagtgtccctgcaggtggcggacgagacgaagcggaggaaaaaatctgggacggaaaaagaaaaaactctttgcgaaagaaagaagagaggccactgtcgacaagacacacatgtcctccagtgcacactggggggctcgagtgagaaaagcgcgcgtgcatgcaacagaaggaggggagacaaggctcttttcagtcggttttctcacaagacaacacagcagagcagacgcagaccaggcaaagaattctgaggagcaaatgaagagaactcttcttcagaaaacgtctcttctcccggcatacgcgcgcagctatctaggcccctggcctcccgggatgcacactcacaacagactcattttcacacagggcctgctttccgctgtgctttctcgttgttgtgtctcgtcctttatacagtgttttggacttcctttgcttctcgaaaaccttggcctgctctgccggcctcttccaaagacacagagagggcgtgtaaaataggattccgacggtccccgtagtccagctttttctggcgtgtagatacggcaaagcgaggccgaccaccggctccagagctgcatctgcagcatataaaaccccacgcacagaagcgcgtcctggttttgcctttacatcgcatctatatgttttgtatacaggtaggcagacgagaggttctccggccggagcttgcatcttctttttggggaaaaggaattcctagacttgcacctgcggcatgcggcaccgtatcgatcaccgagttctctatctgactctgtccggatgcccagatgtagttttctccacgtatataaacatatatatatatatacatatatatgtctttctgtgtgtgtaggcatttgcatcggtttacgtttgccttgcgtatttgtcgca

SEQ ID NO: 3429 - DNA, 1808 bp, Toxoplasma gondii
  source 1..1808: mol_type = genomic DNA
atctatgctgtgagcagctaacaactaggcagtcctacaagttcgatgttcacttacatatatgatcataaatacatacatatatataaaaacgtacaaagctaattaaacacaatattttattcgcgcatctatccatctatagtatatatatatatgtatatgcaatatgaatctagatgtttgattcgtaaggattttgtacactttcgtgaaaaagcatattaccacattctgtttcagtcccatacgtctgcatatacttgtataaacttgtatgtatatatgcacacctgagttgacatatatatatatatatatatatatatacactatatataagaaatctgtctacctatatagtttatctatctttctatgtctatctctgtaactacctatctctctatctacatctctgactatctatatctacctatctatctatagctatttatctctatctatatctctacttatctatctatctctctctctctatatatctctatctctctacctctatctatctatccatctatcgtctatctcacgtatacagttcatgggtggcagatgcagattggagtgcatcggccttgttcatgcgccctttgcgcatgtatcattccgcgaagatttctgaggtttggcatgtcttccgtttgctctcgctgatctctgctttctgacatcctgagctttgttgtttttcagcgaagacagccaaagactgagcccccgggggcagacgcgcgttttctcccagtcgcagcggactttgcttttgcgacttttctcgctttctggggtcctcctttctcgctctcgctctgcggcctcgtgtccgagacgacgctttcgaaaaagagagacaaacgaatgagagaacgtttcagctcctggaaaaagaacttgaggtcggaattctcgctccgaggatctcctctcttcgcgcaacgccgccgtgcgaaaagtaggcaagacggacggcccgaaggcaccgcaaagaggccgctttttgcggaattgacgctttttctcagaagagacttttccagacttttaaccgtcgcagagcgaaagccgaagcgtgcgacgcccgcgagagcgattcggggaaaacgcaggggatagggaggggggcgcttccttttcgtatcgaaatccggcaccgcaactcccagcttcgtctcgctcctctcgctctctctgttcttttcgaattttttggttttctcctttttggagtcttttccctcccgcaccggccgtgtctccagtgtacgtacaccccaactcacacgctgcgtgtgcccgaacggaggttcctgcgggggtggaggaaaggcgttttttccgcgaagctccgcttttccctcttttgtcgcgctctcacccgggctgcaagcaccgggaaggccttcttttctccgtgctttctgcctgaagtttttgtcgccgcctgtgtgcgtctctgtggaaagcctcggatgccgagacttcgagggcgccttccagctctcttgggttctcacgaaacctggcgcctgttctcaccgttcgtctcccccttttcttctgcttgtccacctccatcttttccacctccatcttgtccacctccatcttttttcaccctgtcttcttcttggtctcttttgtctcgtgtgctcggtgctgctggtgtcgacctgttcgttctggggctacactcccaatatcccagaacccagaaccgcgatttgaccggcgcctttctctcttcctctctccttttcattggtcgccgtgtctgcgtctcgcga

SEQ ID NO: 3430 - DNA, 1750 bp, Toxoplasma gondii
  source 1..1750: mol_type = genomic DNA
ctggtaggaaccgggcgacttactcttcatgcctctgtcgtaactgccgcgtgactcgcgaccacgtcgcgcgttgtgcctgccattcaaatgcagatttgtgtaagagcctccctctcaacgatccatttatcacattgtcttccacttgactatgttttcatcgaactggatgtaggactacactcgctgttaagagaagtggatagttccacacaagtccgacgtggagaccgccgtttctcgccgttatccggcttcgtggaacctttaaactgatgtgcagtgttccctcctagacctactatacgcaagactggccaagcggccctccgttgttgcttttcgccttgtgtgggacacgagcaaagactttcagaaactcccatgctgaccacgaggcccgctaaacatgttgatgtaaaggtcagagaatggtatctttcgtgtgggattggaacgccacatgtcctcacaggcgagcacgcacttttgaatcttgttcgttccagtctcatccccacgggagcacagctgaaacgcagccaaacacaaagagtaaacctgcgtctaattccaagggcagctcagtctttccacaacaccagatagggtggatgcacatccgaatttgcttcagcctgagaaatcgtaaaaggtggatagagcgcaagtgccttattcgtacttgatgcagacgagggcaaatgtgtgctgcggtgcctcagtcttcctctcacagccacaagcatgaagttctccttttatgtaaaacttcagctgaactgatgtccggtaccacagtttcttgtatttggggaggtatgcctgtgatgtgccagtttccttcaactaggcaacatctgtctcccggggactctcgcagagtttccgatcttgaagtggaactgtagcactctgggcactccatatccgagcaaggcagtggatatagtgaaaacggaaatccaaggagtgaatccggtaaaaggaagccttcaagatctaaaccagtagtcaaaaactcgcagtgtataccccccagcaaacacgtcgtcgacaacacagccgccaagatcgcggcggcacttggatatgtcatcgcaactcgtgctcttttgtgttctgagttccagtttgttggttcaagcatctttgcatcccaagcggagaagctgaaaaaagccattgaagagcagggaatatggagcgcgacaagtgtagatttgtgtagctgtcgagcgcatgcagcggcaaaaaagcttccacatgcagagccacaagaagcctcaaaaactcctggaatttgctttttcttcaattagcctctttcgaaactgccgtcttcgcctgtgtattttttctccatatgctcctagttccactcactcctctcccgctctcgctgcgggtctgccagcgtacgagacacaaactgtagactgaatgctgtcggctactctccgacatcccttggacgcgaaaccgggttgggatgtctcctcttttccttcgtttcgttcgtttttttgtgcgtgtttgttctcgtccggcgtcctctcgtgcttttgcctctctgtgtcgcctgtctcgatgcatatttctttgcactcgcagttttagctctatagcccgtcgattgttctgctcgttgcacgcgctccatttcccgccttccctttcttgtctccgccctcgtctgacaacctcgaagttaagcagttcttcgttcacagcttggaccgctgca

SEQ ID NO: 3431 - DNA, 4816 bp, Toxoplasma gondii
  source 1..4816: mol_type = genomic DNA
aagaactcacggccaagaaaagacagctgtgtgctggactcttgtctcgcgcgtcgtcgcgtagtctggacagaactttccccgttgtcccagggagtctgccgccttcttccacatgccgaaacgactgcatgcgcctcgcgagaacgcgcctcgcggcccaccaaaaagcagcaacgcggcgccgttgccacgaaccggcggggcagacgctcaggtgtacgtacctgagactgtcgggagcatggcggagatgcgcggctggtgagtgcggcaagtctgtaagaaggcgagtttcgttgaaaagagcagtggcgaggtcgaggaaaaggcagggaaggagagaaaagagaggagaaagaggaagaagagtaacgcgaagggatcgacaccagcaaagacaaggagcgaagagaggtgagaggagagtgacagcaaggacgagaggccgagagaaagtggagaactcgagaagcttttgccattgttttcatgaactgatgaggaaacgagaccccagaaccttcctggggggcgtacagacaagcatggatgctctctaccgaccgcttctcacagtcggaactgcaaaaaacggagagtccttcaatcgacgaatcgcagagaaacgtcgggatttagaggcatccaccacgcgggacaagtccgtgatagtgtctaccttggtgctcagagaacatcggggcaacgttgaggagttcggagatctctcgtccacgaattgttactgaaaacctcagaagatgctcttctgtcttccaaagataagtcctctgcattagccttcgacattcggcgggtgacggcttgtgacctgacgcgcgcgtttctcttctgctcggatgagggccagtcgaatcggaagagagccagcttgttcgagagtcgaagcccttgtgaattcagaagatcctcacttatcagaaatcttttttcctgtccacagcacacgcgctgtttgagtctgcggccgcttcctcgcacaacagccgccgctcctcgggagcctggcggcaggtcaaagtccctttgcccgagttcgtagacagcaccgaggattttccagagagtcctcactcaccagcatgttgacgtcctctctgcttctgtggaaagagaagctgggtcgaaagacacggaagaaagatttctcacggtcgaggaagacacacctgaaaactgcatgtgccgactgtcggcgacggcgggcgcaggaaacatcgaagagctcacctgatctcctaaagctggaggtgttgctctccaatgttgagaagcgaagattgttttcaggacaacgggacggcaaaccgacgggcatcctttgcagagaacgcgtcaacaggaaaaacacccgcggagtgcatgcacaccagctttccgctgtgcaacgttgccggcgcgagatggaccatggaaaaaacgagacaggcgttgagtctcggggaaatgtctgatgtttaaaaaagggggaagaatgcaaacgaaggggaaatgtttcagcgcgatcagtgatactttcttgaaagcgcacattggaagggtagcgccgatgccccttttccgaactttctttttcagtctactgtgtgtaaacagtcgaagtttcgaagtcccggttgcaggaatgtcagaaattctcggccctcctgcacagacctacgggttctttcgaggagcaattaatgtttttctctttttgggattaaaaccgagttggaagttacctcttgggtgtctatgatgcccttcatgaccctacgcagagagtcgagcgagagtaccgtgttgtcggcggtaaatagatctgaaataggcctatcatctctcacaccgcaagaactaaattacgcagaactacagtgaaacacatgaaagtacacttctacatttcgtgaaagtgaggcgagaagccctaaggtgcaagagcgttctgtgagggccgacagcctgttgcgcagtcacaggtccttcatttttttcatttttgccacgttgattcgtcgaagaagctccacgaaaaacgaaatctctccctggcagcatagccaccatacgaacgcactgccggatgagccttctgctaaaaccagtgcttcaagtctgcgcaaaaaagctgtcggtgtcgcggtgacagcttcacgggaaccacgccccctttcgaacaacgccacaaaaaatgtttcgccggcctttttctgtatgtttgtgggtgtgaataccatcaacgcgtcactgaaacactagcaccctgcaggtatggatgccgcgcttaaagttgtctttcatcctcctacgttagtgacaaatgctcaatgcctgtgtcatctacagttgtgatgatcatcttacaagggcaaacgatgacactttctcgattagctaacagcttttaacagctggcgagcaatcagaggcaacaccggcagggcacacagtgcgtggcgctggagcgatgaaattacagtggcggatttccattcctgttaccgggcgatgtgagttgtgccatgtgaacaaagcaaggagtcgaataatgggttctgccgatgcatgcaacggcatcaagtgtaaaacaaaaaactctgtcctcaaaccggacatcgatccacctagcattttccacgagctgctcgaagcattcactggagtccgtggttcggtttgcgcgtaactctctgggcggcagcgttaccatatcttgtctgcttttcccgaattttgccggctcgtcacccgcgatgccagacgttcctccctcgagttgtcaatggtgtgaaaactgtatcccaaagctgcgcatctaaaaagctcagtggcagcctgaagttgctgcgattggggcagctgtgaagctggtgtctaccacgattctgtctgaacttcagcgccagtgaaaagcatcgcagggtcagagcagcccttcaaacttgccggtataaagtcttcccgaggcatcggcgagaactgattcgcaatgtctcgtctgtccgcgctgcacgcagggtggcgtcgactgctttctcaacatcggagaagactccaaacactcaaaaaacgagcgcagcatcgactcgctgcgcttaaacacactccaggaaaaacgctccggcggttcgtagccaggattcgttttttttgccgtctggtatcggaggtcaccgagttcacgaaagtgcgagcctcgccacacagacgcgtgaattatgaaattttggaaagttccccagtgcatgctaaacgtactcgtcgactggttttctcggctctttgcgttctctgcgagaagctgcctcggacatgaaacagtctcttccagaaaccccccttctgactccgaggtagtctgtacctgagccagccgcactccggggggtacgggacttccgcgcctttcggcttgccttggaacttcacacgactaaaaggcactgtcgaccacaaagaagaaacctgtgctttttcctccacggcttgggtccacaacttccctgggacggctgcgctggaggcgcggaagaagacggagagcgcaagaacgcatgaccgtgtcgtgtggcgccgcacagttggccagccagcacgcaaaagagtcgagagccctcaatcttttctggcgggacggaggccgtttgcggcttgattccgaatcgaagcaactcacattagacaacggagaagctcttggaacgagaacgcccgcgaaagtggagagttttctacttttccggcaccttgcggccgcacggtgccaccagtcgagagcacctcgcaatcgcgcgtcccttttgtgcgcacaacggtttctacgagacgaccaccggtggactggcagctgcgtggctctcttgtcttgcaacgtttcgtgcgaattctccgcgaaaaaacgagaaaggtgccggcgggtctttaccgagtctctggggggttccgctggagaacgccgagccggttccgctgcgtttttcccgccgcgtttaggggaacctttcgtcgcacaagctgcgtcagctgctcgtgcagcgatctgcaactgtcgcagcatcggtttgaagaatcactgcacatttcagcagccgccgaccttctttggtcgcaaattttcacgaaccgctttcggaagccgcccatctttgcgtttttcccgcttcttcttccactgtcgtcgccgcccttgtcgatttccagcgctgaagacgcctggacggccttccagcgactttttactccgggcgcggcggcgcagcagctcaaagcgctcgggtgtacatacacctcagaaactgcgcctgtggctggactgaatcttcaactcatcttgatttcaggagcgagttccctttcacgagattctccgttcgccgccgcttgcggggtcgccttccgtggtctcgatatggctaggagcaaggcaacgccacagaggccgctttgagaacctccttcccatgctctttcgtctcagtttcttcctccgccttcccctccaacactccctgacctccccttgaccgtgggctctccgcgttcctcgtcttcgctcttctcttccgtaccaccccgcttccttcaggcaccgctctctcttccggttcgacgcacatttcggtttctcggtccgtgagctctgctccggaaatccgatcaactctctggtgaccttcaatgcatgcgcgaatcctctcactgcctgcatgctttttgatgtccgtgttcgtccttctctgtctctaactcgccgaagcctcgccctgctctactctcgcaccgcctcctctcttccggttctccaaaa

SEQ ID NO: 3432 - DNA, 1542 bp, Toxoplasma gondii
  source 1..1542: mol_type = genomic DNA
cgcaatcgacggcttaactgaacacaaaaggcagaattcagcatgaattagaagttagcaggtcacaggacccggtcgcgaagtcgtgcatcacaatggccacggaccggcaccagaatcgaagacgaagtttatttccttgttacctcgagatcttggaaatattccagggtgtgaagacgaggaattctgagtggcgacactgtggtaccgatctatggaatgggacggagccagaagaaaaggcatctgtcgcgcagcttcccatgggatcgctgcgaaacgataaaaactgctgtatttctccagttcagcttccacacacagaacacggcaaaacatccagcactgtagaaagaagcagaataccgtgtgaacccaaacatcgtgacaagcccacttctgcggcttgtatctctggcggaatttacaatttgatgaaatagaggaacgcagcgcaagcgaatagcgcaggacggaaacccagtaagagagttgacattccctaccgaaccaaccttgtggaaagcgctcgcaggaggcccaagaaacgacagcagaataaatacgatctcgtcctggagttcgtgaatataacaaaagtccgaaggatcttgcgtggcaacaaccatctgccgttcttgctctgatgcagccgaagaccgcccagcgaaattcgtatctggaaacgtggtaatcgcttttgatctggcgtctgacagagactcgccctttacaacagaaaacgtgcttgtgtcctcggtagaatgaagtctgagaatcgctttcgcagctcttcctctgggacatgtgtccatgttttcaacaacttgcgacgtcagccacgcggaaggaatttagggctgcagcaaatcgtgaggtgtccagggggttgtcacgcgtttgtgatctacgccggcggaaaaactcgagactacggaaagagacagaaacacagacgcgcctttcctctccgccagcgttggcattggctgctcagatgcaacggcctcgttgagggcgtcgaacgccgacgatcgctaatacggtacagatgataggatacatgttttgtgccatctgataaaaaaaatgagttaagttgaatgttcaaactgcaggagaaaatcgacatccagtgatcactcaaaaacgccttttgagtcaagtgagcgccaaacaacccggcgccgacatgatgatacaataccgaccggtttgtagagcacgctcacaaccgtacggttttttcattcgtgcatgccattggattagcgcagatatcaagcttttgacgttgacaagtcacaattgacggaaaagactactttttagtctctctagcttttgcagacataagtaacgggggaagcctctactctgcctagcatctctaaaagagcatgcatgcattgttagacgagctgtagaacaggtccgagcgctcgcaacaggcttccgagaagatgtgaagagaaaaacttaccggcggaagacgcagacgtctaagcggtgcaccgggtcttccattcttagtcaata

SEQ ID NO: 3433 - DNA, 3291 bp, Toxoplasma gondii
  source 1..3291: mol_type = genomic DNA
tgggaaaaggagttcgaacacatggaacttagggaaaaattgtcgaatggggagcagtatgcctcctgcgcggatgcgcttggtcaatgaacactttgtatttctggcgtatctttgcatgtcatttgctagacgaattcgtggttcatgcgcccttgtgagtggaacgcttggtctttgaaggcatttcatctgatatcctctgagctgaaaactgagaacgatgcgcaagattgggatgatcaacgcaacagtcacgagaagacagaagggtacaaactgtcaggcagaattcagcaaggttctcgtagttgttcttttatatcgacactcccactcgtggaaacgacacaactagctttgtctagacgtccaagcggacccaacaatcgaaaacgggtggcacaagtttcttggcggtgccatcttctttttgtagatgtgactttacagtgagaatgacaactcaggcgcacttccggcattccgttttgccggaggcccgggcaccagcattaatgcgtgcagtaaaaccaaatctgatttgtttaatccgcgaaggacggcccctggggggacatccgaaggaaacttagcagcgcgggtaggtccggtataggccgaccaatagtggccctccaactgatgggggcagaaatgcgccgtttgtgtaacaaacatatgggcttaatctacgccagcgcaggatcgtccagttgtgaaaaaatgaagcgctgcaagctcacgacgtcgactgccagagttcttgcggagttcactgtctgtccagggcgctaaatatagttgattacgtgcgcacgcatcgcttacacttgcggaagctgcgaattccgcaacacaactagatgcagcagctttcctgagccgatgatggatgaccacgagacagcgaaccaacaggatagatttgctccgagcacagtgaacgacataagcacaactgtcgttccccatgaatgagcacgcagaaactcaaacacaactttttcaagggctgacatatctttttgtgaacagccacgaacacgttaagcacgttgccatctgactcctaactatgcagctaacgcggtgatatttgtgagcgccacatcactaccgcaccaaaatggatacggtgtgatgaaccaagtttcaaaaaagtggtgatgaaggaccacaaggcatggcggtacacaggtttacacacgaagtgtctgtacactcgcaacgcgagcttgcgtgttagtgagcctctctcagatgtatgttccggatggttgtctttacaacactttccgtctgaacagcgaaacatgaagtttatttgcctggtggcagttggcgttttgcctaccctgaggacagcggcgcagcgggctccggtaagtccctgcccttgcatcattacgctctgtggctacataaaattcacagaatggccccgtcccgtacaaatttccagaacgacggggagcactcgctcctcctccgcctcgctcgctatcgcttcaaggtacatgcaaacgctacccgacttgcttgagacttacgccgaacattctgcgtgcactttcgtgtgaagcagcaactccgtcacagccggcacctctgacggttttccccaggaccggtcacgcgctaccaacttatttcccacatgacgactacgaacgagcgaaacgtgaactaacggaaaaaggtagagactctcagtgatctaaactacgatcttgttggaatgccaggtgttgttcgttgcaccgcagaaatgaaaacagagaagactccccctccatgccaaccgactggtaagcgatattctgaatatggatggacgccgatgcgccatgttagtttagggcagctatgcacgggcagccagtggcagggttgaaccagagaagcatcgaaagcagcacagtcatccattctgaaactggaccgtatgggtgagaccgattgttttccctttcaaaggggtacctgagaatctcccgcgattcagctatgtgaccgacgccccacctgcgcggacgaagacagtcagcctcattcccccgccaccgatattcccaaaaaaagaggctcctccaccgctcccaaatgtccgaacgcttggcgaagtgatgggaggattcctagaaaaagccgcaaccgtgcttcctcctcaccactgagtactttacattttcagccttgcgtgctctacatttctaagcagatactgaaaccgtgtacggcttgaccgacatagattcgatctctttgggcggccgtagtactgcacgactatgtttatcctcagcaaaaacaccaccagaactgaagcaggagtataggatgacaacgcgaagacgatagagtggatccccgcctgcgttccgctggctgtctccacgtttattcgctgctgcctctggccacttcagtttcatgaggtccatttcctgcaccgtctgacacagcagcagagcgcagtctcttttcctcttatcgcctgaatcagatcactgacaacgttgtaagacaatatgcaccgtagccaggcgcatgctgctgttcagtgacaaactggcaatgatggatgataacagtgtggctgcaaggcaacaatgccgtctacggcttctctcgccgtacccttcacagaacatttccttcgaagacgctaaacatgccgaagatttccagcaagaacgcaacgttctccgttcacatctgtgtccaacggccttctatggaagtctctcttcaccgtccgtgcatcgctgcgccgcatgcaactcggcgcggaattggcaacgtgtgcatgtcccttgggatggaatatctcccaggcagttgcgcaaatgctcggtgcacacgagatgagaaacgagctaattttaatgactattttcgttccgttttctcagggatacttgaataatgtgcgcgaactcctcacaggcttctctttcacactgcgaggaggtcggcgctcgtagcggtttcccaacccgtagagtctcggactgatcgtgcaaaatcgcttgttgaattattttatttagcggaacgtagtgtgcgcatttcggttgttggagcgtggctctttagtgttgtcccgccgtgtgtctgtacccgtttccgatgcgtgttacgtcggcagcaaggctttctgccgcggaccctccgtgaaaagggtctccgggtctgtcggagtctcgagcttccgcatctctcgttgtcctgctagctcagtttttcaaaaatcctgaatgctggcttagctcctgtgtgacccga

SEQ ID NO: 3434 - DNA, 4570 bp, Toxoplasma gondii
  source 1..4570: mol_type = genomic DNA
agtgcttgtaactggttgaattcctgatggacctcgatgaagtgcatccgacattattttattcctacgttgtttggtatcgtcgctcctggccttcgaatctacctcagttttcatgttcggcacaaaacagacagattccaatctatgggctgtttccaacgaaagatgcgccccatctttttcttggcacatgggcttccgatgaccctctttctttgcatcgacgccggaagtttgtagtgggaacaaatctgaggcttgtgaagtctcggggaccgtaattcgtgcgtctttggctgctggcgaaattgatataggggagtttgctccaccctccatacgccctgctttggttttgatttctccctgaccacaggtcttttgcgcttcctcccctttcgcgcgtagtgatgacatgtagagtacggtggccaagtctggtggagaaggttcagggatgctctgcgccttaccggagggaaacgaagatggaggtggggacacggacgacgtgcaaggtaacgaggggcggttctcatgaacaggcagacgaatacggtcgacagcgacaagatccctgtcctcaaatgttgcaggattattcgagctactggatgaaacaggcagcacggtggcagtctggcaagaagacggctgaaccgaagacactccgatggtagcctgcaccgttcctgtggcaatattttcggcgtccttgtgcggaggcgaggatggatcgatcgatccatgagacgaccttgatgaggcgcagtatgaagagcggaacttgtcaggctttgttactagcgccttttctgtgatgtctccaacaatctgcccacaggtggaattctttttctggaggatgtaagttggagtggtcgggattatacccgcgccctgcagaaagaatttgggcgaaggtttgataactgcaaacgacacactctggttgtggtcgagtgatgttacatcagtcgacgggtccactggagaaccactgatggacctcccatactccggagtaattattcgacggaaatgctcctgctgcgtcggctgcagcactgtggactgcacgctcacgtatcgtttttcgggaccggaatccggcacagaggtctcccatcgaaccatagtgacagacttgccatcgaaacagtggtggactccaaactttagtgtaggatatgatatggcgttcgacactccgtaagtcaagaggtcacatgctcctcgtacgtgtacccccagtagcctgcactgtccaactggttgaccgtctccagatcgccgcaaaattttggaacaatcaagtgaagaaagatcgacagctgtttcatttcgtagcgtcgtttagtctgaagtgtttaacacagcgtgacacaaaggaaaaaagaaactggagggattctctgctttcttcgctttcaatcagaccagatacaacgatcttcagcacaacccagtccagcgggcagaggcgagcgcgcttgcctcggtttacagtcaaccaatgttgttctcgaaaggcactgggcacaggaagcatggtgtattccagtatactttggtcgacacaggagctgaaatatgacgcctaaaactcactgatgataatttgatgagcctccggcaattgctccatgaagaccatgaagaagtctagctgcggctgctcatccaactcactgcgcgaccctccatgtacctgagtccttgcaacaagcaccccaaacgagaaacagtcacgtagcttttctgtccagtttccattggggtgatcaatccgattggaaagcacaaatcatctgcaacagaggcatatttccatactgttaaccacagctgaaagccaaactacgggggggcacccttaccgtatcggagcgtggatagtggacactgcgtagcgcgcgaggcggtcgcaagacccggcgagggaaaaagcgatcagagagctgtgttatgtggctgttgcaggccagggaaaacagaggtgaaggcgaccggccgacaacatcaggtgatttagtgatattccgcccacgcttctagaataaagctcgttactttcatcacggctcgtgtattggcgcgctggtgtcctgcgagctcgagacaacatgtgtcttcattcgatgtcttgcttgtcaaacgcctgtctggagcaatgccgttagctgtgttcgccatatgcgaaatacgggaggaatgtgcacacatatttatagaaacggagctggtgacaccatagcgtcctcgaacctggcaaaagagatgcggagcaaaaaagctagctctgtccagccacgcatactgtgctcgcggaaatgtgtgaaaacggtgacagcgtagtaccaagagcggcgaaggagaagaaaagactcacaagaaatgagcaggtgcaggataaaactttgaaaaagtggtcagaaagatgtgtggactgcgcatctcacaacaactatcgaaaagtaatgaccctcaatgtgtaagccgatgtggggattgatggagcccagcaaacgtagctccacaatggttgtgcacccaatctgaggcgccgcagcagcacactagtcctcgccatacgatggacgcgcagtgcgaacgtcctttctccctgtgaacaggaacccgtttacagaatagtgcaggatgaagacgtaccgagtggaatagtgatatctgtacgtctttaggtgatcgacggtgtgcggtacatatcagatgccacgttattgtgagcatttggaagttactagaccaggtggccctgcggtccgtggtacgggttgcctcgttcctgggcactaaggcaacctgaaagagagccatcctggtacgtgtttgttatatgccacattgtttcttctatgtctcatggctacatatttcggccgttagtcaggggaaaaaacctacaaccctagcaacctatgagaattcatcaggcggtagatggaaggtgacaaatgctgagctgcatgaacggtagacgttcaggtggtggtcgcttcgagcgatatttgcagtctttgttttctctgcatacgactagtgaaaaacgaatgaatgttgcatgcgggctcccctccagcttgagcagagagcggacacattggtaaacgagtaacatgtgactcactcgacctcgtcacaatgaaagcaggtaaaaagcatggcttcaaacctgctgcggatatactgaaacacgggtacgccgctctcttgtttgttcctactgggcggcgtgagcggcagtgtgccgttttctgtcgaggatacgcttgctgcctgacacggtgtgtcgactggctctcaagattttcaaggaaaggaatatccggccaaattggtatcgtgtggtcgagctgccgcgctgcagttcatattaattaggccaactgaggccccttcaaggaaggtcgctgtgccgaagtagaacacgacagccgagtttggagatatattcagacaacgccaacgagaagataccagccacagtacaatcggccatgatcctgtaggacggacatcatgggctgagctgatgcggtgttgcgcttgatgcggtcacaggtttgcctgaacacaacttcataccgccgaccgccgcgtcttcacaggagcaaaagcacgacggatgaaggaatttttctgcctgcagatatgctaattagttaactggccaaccatatacactgtacagaaccaaccttgggtccatgtgaggcctcggcagttactaccaagacgcatttgcgcagtggtgctactatgtgagagggacacttgaaatgctttatacattggcgacaggtgtattatttcagcgtggccaaacagccgaaacgagcagacgattgctgagcgatgagaacggtgctggggaactacgcggtgccgaaaaatattcactgaattactagctctccgtcttttggcttgacgtcaatgtcgtactcagacgcttgctgggaagaaagcacgcggccctgccttgattccgcgacgcacccgggtgatccccccacttactttttgactgtggcgttctaggtaaccgttcttgttgcccacactgggttcgcatagccgggtgcattctctccgtaatatagaaccgttttttaaacagtttggagtccagaagtccgctgtttgtttttaccctcaatcataaactccgcaggggaactgttatgtgtctgcgcaccgatacgcgtgtaggggcagtaatcgcaccgtgggcagacagtggcaacatagttgtttgttcatccagtttgccacaccagtgacgtcgtccgctgttacaggacatctggaaaagtgtgtgccagctgcggtggggaggtggcttaactcatgatcgtgtcagttctgtggcgcagttgggactcgcatttaacagagaggcagttcatgcagcgacaagcagggacgtgtaagccttgacaacctgcgtttcgtgtctaaaagcaattcctcgcagctcaggctgttgggtccatctattttctggtcatatttcgacaacaccgtcgtttttggtgaagga

SEQ ID NO: 3435 - DNA, 2143 bp, Toxoplasma gondii
  source 1..2143: mol_type = genomic DNA
ggctttttaaactgcggtggtgcgggcgggagtgttgcagctaatggtggcggcgccacaggtgctgtgtagcgatcgcagtgtccgttttatgcggcacggacaatctctctccgatatggtgagcttataaggagcattacttctccggagggaggtactgctgcccggaaactgcgagcgtggttttgggtaaggcttggtcacaactgcaactacattcccccaggtttcctacttcagaaaaaacctttttgactcaaccgagggttcgagcagtgtatgcttctctgcaccgctggatctcctggattcgtaagcgtggaggatccgcacgtctccctggctcacaacacctgcccagttaagtgttttccgtagagcactcaattgatgagaggttttccgtataagcaatcgaacacaatgtcacgttatgtcccaaacacatgcgcacgcgaagtgttaagcagctgatggcacaacaaaagcgcgcagaagacagacacagcctcgcaagaacaaagttttccagtgctgctttgtggaaacacattcccggctgacttgatgagtcataattacgcaagatgtcgaacagcagtacctctacgagtgtcaggacaaagatttccgtgcgctggtattactgaagctccatgcgtcagagagcgaatttcaaatgtcatgcgaaccgtatgaacgtgaagaagccatgcttggtcatgtgctggaaagccctagatatctgagacgcacttaagaactgatcgaaccggcagatgcacgaagcaacgtttgatgctcattccctcctgcactgattgctcagtcctgtacggagcaggtttttgaaatcatatggatgtgcttagtttcgtattcgatagctgccgtggcactgaagcgagaagatcttattgtcagctcgatgcatcaatagttggtacacgtctttactcgactcaaaagaataagctttgattgcagaactggcacccccctttcacacaagggagctttccagtttacactagccggctttaggcccttttctgaacgtcttggtgctggaaccccgtgcctcctgctaagcagtccgtgtcagagctgctttggggttttgttttccattgaggaacacattagctgggcaacggcggtcaaggttgatcgagataactcgtttgactgaagctgcaaacataggcttggttcgacaattctgcgcgatccgtttaatctgctttcgatggcttcaatggaacagagtcttcaaccctcagtgattttccggattttttagccacggtaaccgttccgttcaaaccaaagtcgtccggcctccttacggggctttccctcaacgaagtggaacttgtttacaaaatggagaccgaaagtttgaaggttgatcactcggtcgcccaccgatcgcacgttattttgattctttccgaaacgccttgttgttaaggagacctcagtccaacgcagttgtgccatacatgaacacgaatcctgcgggttctcagcttgctcattgttcagtcttcctcacggaagattgccgtgagttgtctaatcaagactaaaaactcaggcacaattcgatagatctctccactagacgcattcatcacatgcacattcgtttgcaactccgtatcagcatgcaaagctcagaccgatcgggagagaaacgggccccgctttttgtctcagtgcacggaccgtacaactgactagctaccattgaaaaaaacagagaattgagattttgcctgcttgttcttttttcagaggttttaactgacactagattcaccgccgatgcctgcgacaactcaagtgactctagttacctgcgattgccggttgatcaaccgctggaagcgctcctgatgcgctgcggcatgcgccagtagatcgcatcaggtacatattccgagaaatagtgtgttttttaccttttcgtgcgtttatccccgaagtggaagaacgaagttcattcgggcgtgccggaagttaaagacttgcctccatgtccagctctattcactctgtcgtgattggatcgcacgtcgctcgctagcgcggccacgcaaacagaaacgaaagttttccttggtggtcgtctcaa

SEQ ID NO: 3436 - DNA, 5025 bp, Toxoplasma gondii
  source 1..5025: mol_type = genomic DNA
ctacccaaggttcgaaagcgtattactggacgtggtttgcgcttattcgcatgtgtcggcagtacactcttttttgagtaaaagcgcggaaacatggaaccgggtgttatatgacacgtcattaacttcagagaacatcttacccaagtccccggttcgtcggagagagtgacaggaggaagaacggtgctcgactggcggcatcgacggagagcttgcatgtctttgtattgggccagaaggcgtgttttttcatcagccgcgcaggacgctcgcgccgagtcgacgttcttaggagtccacgtcattttgacgaggttttgaggttccagaaacgttaagagaaatgggggttctcgaaacgtgtctggactcatgcagcggcctggcgctccgcttggtgttcctcttcaactgcctcgtcgactgttggctgaataagatagatgagaagaggacgacaccatttaatggcgcaaaaaagaacagccacggcaagagctgcaccaaacacaaacacgacggacaggtacggctgcaagaaccacagaacgactccgcccgaggccaagaagggaaacagggtccacagccaccgcaagatggctgcgtaatccattgaagactaatctgcagcgatggaaagcacagatgtggtagtcaattctggataccaatatacgaaaattctaccagaggaacaagactcgtgttgtgtcagcctcttgttcagatcgctcgctctagccaacgtcagtgccggaagtacgagcatttccggatcgttgagaggtccacagcagtctaattgaagaattcgagtttgacctacgtgttgcgcttcaggcaagctgtgtagatggttctcccgtgattctgaaaaacaggagcactcgggatcatgtaacgtggcgtgcaccgttctaatgtcctgtttctctgggtttacagttggtgggtgtccgcagtcagacttacagcacaaaacaatggagaaagcgcttatcaggtgagctcctaccgttgataatggatacgcatttatgtcgcggatgcgtaggagattttatactgctactgaacggcgaaaccaccaccaacgcctcaacacaggagttaacacgctggtcccctcttagtatctggagttcatagatgccacctaacagaacatgcagcagtttcagggtgaaatgactcaccgcgagcaggataaatgcctccttttcgttgaaaagtggcagtgagccgaaggatgacagaactcgaaggaccgtcgttttctcgtcgcagggtctgttcgtcgatgcgcgaaccagccgcgattcagcggcacacgaagacacaaagcctgcagtactgcgttttgtttacttcttcgagcgcctgtaagttggttttcaccatatcgactcacaaataaagtagagagaagtaataagctgggactttctcttgagacgagtgctcgttgcaggtggcctggccttcgatgaaactggcacaatgtggcaaagaagcaccggaacacacccgtcagacatgccagtctgtctgaaagtggccacaattaatcgtgcctagagagaaaaaaacagtgccgctccacgagaggacatatacattgctaaaggaaatctgtgtgcgacagagatgcttgtctgactggattcagcgtcccaaggtcggttttaatgcggaccgggcaatggaaagagttctgtcgtcaaatgagtagtcgtgtcttcaccactgcttctcccccgctctcttgtccctttcttgctaacctttccagaaaattcctcctcgaggaagcttagctaggtctatatgacagggacaccaagctcaacgatttctgggtctccttttagtgtgacgtttcttccacagaggggcagagacgtgcatagtttatcgctgtgccagtccttatacacagaggaatgatgcgacattccttgcgcgacttgagtaattacaccacttctgcaatagaaaaattccccctggtgaacaaagtcaacgaaaggcgaggagcatttgtatgtcatgcagtgtcttcgaagatatactctagaattcgtgcccacctacagctgcagtgaccgttgtgtttatccgctacagttgtttcagaaaatatatgaacaaaaacaagggcagaaatgtgacacaacgagaaccttagaatctcgtctctgtttttggcatgtggttagactggctgaggctgaatgctccgcggctaagttaatgaaggttgccttttttcttattgatcagaaacgcacgatgccacggcgcctgtatagcgtttccctggtgcgggaagggaaaaactcaacatacgaacaagcactaactttatggcgatgtttcgtgcgccgtggtacctcagccacacccactcgtgattctgacagcgcgctgcggactgaacagaagcgcacaaagtatcaaatttcccactctactatccgaacatgaaacttccaattctcaaacttcctgtattcacagcctgcactgtcagatcttcaaagcaagagcttgtttccagcgccgtgctagagactactacgccaaccctagagtcaccctagagcctgaccgtagaaagtgatgtgacgtggatcattgagccgcagcagagttacatggtgaagacagaatcgaaataggcaggccgattggccagagttgaccgtaccagcacgccgttttacgggtgtcgctgcgcagagattatactacgtgcatgtatgtatgcggatgtgctatcaagatgcgacaagagatttcccggtctcgcgttgttcctggacaaacgcaccaatggcttctgtcagcagttaagcctgtatgaaacaacctgttcgccagttggaaaaatggctgtacccgcatagtcctctttctcgtatgcacagggggcacgtcagtggggattccctggtactaaagttcctcgacagtcgtaatgagcaggtaaatcttcatcgattgttcaagcatatactttcatttagggctcgacgccaagaaagcgataactgctgcaaaaacgcttcttcagcctatgacagggcagatgattgaacatcaccttgcttcggtgcatgctatggggctgatccaactatcctggtatcacgtctgacagctagtgttcgaggttttcttcacgttgtcgaagcggaacatcgatatcactatttttgaagtcgcgttgaactatgaaatagatgcacacacgagcttgcgtgtcaagtcgcagtcatgcaatctgtccatctcatgtaagtcttttcactgttaactgcacagaacttacttgtaactgcactgccacgctaatcgccggtgcgcacgtactcggtcaagacatccaacttctcaggtcttactccttttcccaaatagttgataatgcaaagcaaagcaaaatgaattcgaacagaactcttgccttcgctgtactcatgctctccagtgacgaggaagcgcgctcccacccttgaatcacagtagccttgtcggtttcacttgacctttctgttgcttctcaagacttctaagatacactatcctagagtctgaccttagtggaatagcctgagagtcgcgcaggactgaagttccgccacttcaccctattaggattgagagttacgcaaaggagagacccaatccccattatctttgttacattaatacacggtgttcaattgattctatttctacggtaattatcatcttaactccagtgaatacacatccaaagattggataatttgtaattgcgacagcgcggctctccatgctgcttcaacttgacacccaaatctagtctttctcaagcgcaacctcattctagcgtacccgtcccccgtctcgtcagattctccttagatgccatacaggccgtctccatactcttaacgctttcgtcggtactaacgccgtgtgcgtttctatggcaaccacgagcacatcacaccgtcgtccactagcatcgaacactgctagcaggcacgtttatttttaggagaaaccggttcgtctgtgtttgtctccgtatcgctctcttcttaatcaatcttatctcctaagctgggacacacacttttcagtggcaacgttgtctcattccccaaggcagtcaggtatcgtgttaagtttgagattttctttcagtgacgtatgcgtgttgcgcatgcggtagaatctctaaaaaagcctgcctaagagcgtgttcagcgtttcgtggcaatatgcggtccattgaaaatcctcccaccttctcctgtattcttattcattcgttttttgcgtcgtgttcccttttcgccgcatgtgcatccctcgtccctcttaccgtttacgttttttccagtcttgccgcttcttcgcactgttgtcctcatagaccgagcaaccagtaactctcaagattgtgcatttgtttgccacttggtaacatgtttacttctcacttctttcctcgaagtaccagctgaactttctgccccccgactgcgttgtctgtggctttctcctctccccgtattgcagttgcggtgacttatgggtcatagggagaccgtgctcgtctttggttcagcagtgaaaaaagtttgatctgagtgcgattctcttgtatgcctgaacgttttcctctttatctctctttaaattttgtcgagcccttgcagcaacgcagtcgactcatcgcattgttttttttgacccagatatttcgtcttgcgcctcgctccacattcctttccgtttattcgcttcctacttcattctccaagggcaacttctgaaactggggtggcgagaactcttcaaaattgcacgtttctgcatggtacgtttcttccaacgagtaacagggtgtgaatcgtcgatctgcgccctcgcagccgacatctcgtttttctccggtctgtcgaggccaactgccacaattctgcccgaggtctctgctgagaaatgcaagtgcagacaaga

SEQ ID NO: 3437 - DNA, 2129 bp, Toxoplasma gondii
  source 1..2129: mol_type = genomic DNA
tttatcggaatgtctaaagcggacacacacgcacagaatcgcgcttacagcgaccgaaacgtttctcatgtttttcaacgtttcagcacttgaagaatttctcgagtcgcgctctgtgtccttctctcgcaccaggctctgtctcgcatctggtgcctcccaagagaagatcagttccttccttctcttcgtcgcctctcgacacacgctgtgcagctctcactaggttgcttcagttttcgcgcggcatcttttcaagtaagaagaaacttaagtggtggacgcaagtccgagggaccatgggaagtcgactgcaaatctgcagaacctggtcacagcgagaggttttacgttgaacgcgtctttcgtcacacatttgataagagtcgcgtattcgactctgaaaaacggcaggcaagaggtttacagacggaaaccagaagggtattgcagcggcccacagcgacctcccggccagtgcttgcgtgagcataagccttgtggctttcgcgtttttctcgcgcagaagcagaatggagagaagccacaaaaatccggtgttcagcgttttgcctgttttcaaagagagtgcgttcgttttcctgcagctccccactcaggtccagttctctgaagaattcctttctgcctcagtcagccagatccagaagctgcgagaatccgtggatttcctccattgttgcgcaagcagcttctttcgcagatcgtcgaagctctaaaatcgctcttgtcggaaggaaataactatgagagagcaaggctgcgctgcctccaggtcaggcgggcttgcggatgttgctcagcgcttcctctggctgaggcgattccaacaagagggagaatgttcctctgaaacgtcttcaccaacgatgacaagtcacttcgtccactgctgttttctgttgacaccggaacgtcggctctgaactttcgcagggaggaggaaagaggcactgcacgttctagaagaaactttttttcgtcgagaaaacatctaaatttcctcttcttcataagttccattctaggctcacttgttttctcttcctgctctcggttccttgtgaacttttgcgttcctcacacccccgacgagacacccttcagcagacgactcgtcgcgtttctctgctatgttttccccttcgtcgaagagtttcgaggacctgtgaaaggacagaagaagtccttgatgtttttctcgcgtccaaattcgctgtgtctgcgttctcgccgcgcggcattttgcctgcgttgcatgcgctctctgaaacgcggcatctttacctcgaggaagaaggaggcacaggaaagacacgacgcgaagaagctctctccgcgctctctgtgctttgtttcttgtgaagaaatctacatttttcaggaatcttgtcggtcgggagactcgttattggcggatcgacggagaggaagcccccaagtggcttggccggtgactgcagcgtttcgtcgagtctgtactgcacactgtctccgctgttgtcgtttcttctttttccaagaagagactgttttccctttcccccttctgtgccattttttcttcggcggccgttgccgtttccgcgggtcttctctctgctggatcttctcgtttgcctgcttctttcttggctgcagaagatcacctctcacatctttgtctcttcccagcggccggcgagagtctttcatctcgcgtcaacgtttctttgttccttcgcttgcatgcttcttccatcttctgtggcacctcgccgttttccggcgtccttctcacctgcctccctcttcgtgacctcttcgtctccgtctgtagttcctttcctctccgtttgtagttcctttcctctccgtctgtagttcctttcctctccgtttgtagttcctttcctctccgtttgtagttcctttcctctccgtttgtagtccctttcctctccgtttgtagttcctttcctctccgtttgtagtccctttcctctccgtttgtagttcctttctcctctctgtctcgcctgcctcctgccttccggtttctctccgcttctctcgctgttccccgctgtctctcctcgtgcgatgcttccttgacctgccttcgaaga

SEQ ID NO: 3438 - DNA, 786 bp, Toxoplasma gondii
  source 1..786: mol_type = genomic DNA
accacaccactggattgcttgatgactaaaagtgtaaataggtaagacggtgtctttttgctccggtaggctaaccactgcttacaatcaacaaatctgaaaagtgtgtattaaaccttaagaggacatctttcttttaccatagtatcgtgtagtgatatgttcgtgctgcagagaagaaaccagcgctgacaccatgacgacgtgtgagccgcagcgctggtttcttctctgcagcacgaacatatcactacacgatactatggtaaaagaaagacgtcctcttaaggtttaatacacacttttcagatttgttgattgtaagcagtggttagcctaccggagcaaaaagacaccgtcctacctaacagggaggaaagggcacctatgacgtctgtttccgcagtggtatcagcaaactaatttacagggttgggcatggcagatagaaggcgctgatcctagcggagagtcaacacaccttaactcagtttcgtccaactcgacacgcacatgcgatagtgtccaaagcaggagatggcgcctgttagacgtgtacatttccagtgctccgggaaaggtctcacctggttgtcgtgccctaatcccacattccacagttgctgtcgtgtcacacttcagtcataacgactgtcgtacgacacacctgtatctggcggcatcctctgcatcgcgatcagcctctgagttgaatacccccgggttaccggacattagagtcgatttccaggcacaatcggcacttggcttgagcaagggtgggta

SEQ ID NO: 3439 - DNA, 2093 bp, Toxoplasma gondii
  source 1..2093: mol_type = genomic DNA
tctacatccatctctctgtgtctacctaccaaaatgcatttatttacgtatctgtatctatgtctatatccatttgtagatctatatatctctatatccatatatctacgtatccatatatctacatatccatgtatctacatatccgtatatctacatatccatatatatccatatccgtatatctacatatccaaatatatctccatatccatatatatctccatatccatatatatctccatatccatatatatctccatatccatatatatctgcatattcatatatctccatataaatgaacgcgggtgcctgccgcggaaatgagtacgcaagaaatgtcgaaggaagcgcagaaaccaagctacacagttgcagggacgtcgacgcatgcgccgagcggcagaggtcagtgtctagacgcatgcacagatctgggtgtgagtgcgtatgcgcgaatgcgggtgtaccgtcgagctctctgcagagctttttgcattcgtcttggagcttatgaaatgcttcgtggcggtagaggaggaagtagctgacgacctctgagaagagaccgacggcgaggcccagcacaaagatcaggagcgtctggctgaagtcgacgccccagagacctgcgcccgcaggagcagaggccatggcggctttcgcgtagaggctaggagacaaagagacgaggacgagcggaggcggcgactggcaggaagccagaggcgcagagaccccagtgggtgactcacgaggagacagggagacagggagaggcaagacggagaagaaaaagagtgcagagcgagtggagaacgaaggagagcagaggacagtgttcagagaagaagagcaacgctgcgttgttgtccgagtgccgaccagatggacgttgagaacacaggagagagaaagcctgagagagaagacgcgcgacagagacgtttaaaaacctcgcgccgagtctggcctgggaacagctcctgcgcccacgaaccttctcaagccgatggctttcaagtttctgaaggagtgcgagagacgattttgcgaagcgtcggcggctcggaagaaatgtctgttctgcttttttagcgtcgtttcgtttttcctttccccgagagagcattcacacagggagacctgcgcttggttgtcggacgcagggcctcggggaaaacagagaaaaaacagacacacaggaacgccgaatcttacacacacacaccacttgctcttttcaaggaaaaagcgaatctctcaacagagcatgccctgaattctccagctgtcgttcatcgggaagaagcgtccgtcggctgagtccaagtctttgcatgcagttcgatttctccgggggagaaaagggagaaaagatgcgctggcgcgatctgctgcgaagatgccgcagatttgtggtcgaattctttccaagaaaaaccactcgctctcttcattcaacttcctcttcgactcggagacgaggaccctcccaggctgtttcccgcctcccaggagatacagagttctccttctcctcgtcttctcttctttttctctctccggttcttcatcctttccttctgctctgcttctttcgcaccccactcatcctccgttctctctccactcttgttctctctccactcttgttctctctgcttcgtcttcgctgtccgcgctcctcggttctcctgagagagcttcccaaaaagctctggttgagtcctccccaaagcacagcctcgtcgctctctcggagaagcgtaaacgcgtcgctttcagttcttgttttcgtcctcgtggtttctcaaggctattcggcctctgcgtcgcgcaaacttgcttcgttccatgtcgttcgcctcaccctgggtctctcatcgtcctttcaattttccgtctccgatctcttcacttccacctcccttcttccctgctcttcttgacggaatcctgtttatctggggaaaaggactgcctcttttctctcctttctcgtctgagttcctgcgtcgcgcttttctccgcgggactggagatcttctgatctttttttctgtctgttccaatctccttcttccgca

SEQ ID NO: 3440 - DNA, 1765 bp, Toxoplasma gondii
  source 1..1765: mol_type = genomic DNA
ctctccgcgtcagagaaaggtcttctcgacgcatgcgtgctgaaaagccccaggaccccagaggactcgagtgtctctgcggcctcgaggcgaggaagtcgcagaggaagcgagaaggggacagagcagagtgttcccctgtgaagaaggaacggagaaaaaaggcacgacaagagggagagcgaagaaagcgacgcggtcagtcgaagggaaagagaaggaggaccggcgcaaaggtgtggcgctggaggctgaaaaggaactgaggaactgggtacgtcgtaaggaaggacggcgaacagaaaaaaggagacactccagtcagagatatgcagaaaaaacagaaaagagagacacacatggaaacgagtcaagggacaggcgtggaaagaagtcaacacaggaaacgatgaggaaactgacgagacacagagaccgtgacagaatcaacaacgacctccggccattctacagtcatcgctgcaaacagtgtatccacagagccccccccccccacccgcaatctcgtttgcccggcttccgcgtttgctacaggagctgcggcaggccagcacacccgagaagagagagagagagaagcgcgtggaagccggaatgtgacaacgaaacccgcgaggaccgacagcacagagaaacgcatgtggtagtgtctttttcaactcaggggctcgcctcctgtcaactaactgtcttgtcggtcgaaaggagcctcacatgcgattcggcgccggccggatgtcctgcggcatcttgttttctgggagagagaaacgggtgagaaaacggggggaaggcaaacgccaacttgtagagcagacgacgcgttcagaaccagggctgacgacagatgaacaagtatcccagtcgccgtgtgtcgcaggcgacgcttggccagcagcgattgtctttcggggacgaaaagcagtcagaaaagaggataaggcgtttcctaggacagagagagggaaatacaccttggcggagccgttgcttgctggcacggtcgccgtctacgcaaacacagctgggggccggagaggattttcgggaacagaaatagtgaacgagaatagacgaaggaacaagttaatagccgtttcaggtcctgagcaaccgctctgttttcgtcctcttttagcaaccctttcgttaggtaaagatgctcgacttctcgcggttctcccagccacgctcaaagagcggaaaagaaagcaatcgcagcaactgctgtttcttgacgctttacgattgtggttgcctcacattagctggccagcggtgtgcacagatacttactcgtctgcagatttttcgaaaaagtttcgtcgccgaatataagccgacgtcgttgcaatccgtttcaacgagtctctcttaagagccggtcgtcaggtgcgcagctcggaacgcgacagtctaaagacaatcgaggcggcggccgacaagacagaacgaggaacgaggtccagtgtccccatggcgtgttagacttcgagcgattcttgtctattcttttgaattattgaagccttttgcgacgtagaaacgaagtacggcatacttttcgggatgggcgaagctgtaccgctctggtccgatagtactacgcccgggactcgcagtgtgtgcaattttggcctcagctcgttccacttgtgtctgcagctgcagaacattgtgagtttgtctccgtagcgaaagcctctttcttcccttgccaagttactaaccactgtggacacga

SEQ ID NO: 3441 - DNA, 4505 bp, Toxoplasma gondii
  source 1..4505: mol_type = genomic DNA
aagtttcttgttaacttccgcaatagatatagtctttcccgaaacgtcgacggtgacggcagcggagacagaaggcacctttttttcgtcgcgcgggatgccatccatgtgaccacgggtagtgtccaagagactcgtcgctttcctcaggtgcttgatagctctcaactgcatatgctcaacaaaaaagggacaagcactggagtgctgaatacttcaagactcctgctcctggacgaggagtcactcacatccaggcctatcatctcgcacaggggctcttccagcgaagaggcagaatcagtgtgtttcgtgaatggaaccgcagctagttccagcgcaagattcttgtgaaagcttgaagaatccgcagttcagcaggttcttaggcagccaggaaaatggtcttgacccaccgacaacactgcctgccaaggtgtgcttgtgtcgtggtccgggctccacgcttgcaccggtgtcagtccaggctctctccttacacgcgagacaatgctcttcacgaaaaacaaagaatacgaaagtataccttctggagactcgctacacactgcgtctgcacaaccactagtcacattcacgcctgctgccattagttgaaaaacaagagcgcgattcacttacggtctgcttccacgccatatgcaagagcagcgggaaatggactgacggatcaatcatgccgtgaagcagggcctctttgtccgctgcaggcaatttctccaaaaacttctcctctgttgggtcttctggcggcttttgttgtgcaccccccgcttgaggcacaggagtcgcaatcgcaacaatcggctgcactgacggttcctcgtggtgctcgtggtgcttcgctgcatgcttgtgtccttcatgctcagcctttttgtgccccttttttttgtctccgtcatcttcctcgtcatcatcttcttcagcgtccgattgaagaaacgagaatgctgcgttcgatctgggtcgcaacgagcgaggtgtaagaggtgcgcgatcgaaactcatgaccctattttgattgtccgagttcctcatagagccccatccgtggacgagacttggaaaaaaaaggatagtaagagctagagaaatgcccagcaagttcatcgtgactgcaacgtggtttgccatgagagacattcgggtgctgggacccgagaacaacggcggcagatccaggcccgtgtggatcattcgaaaggggtcatcgaatatcgaaatttttcatgctgtcggacccaggattcccggttagtagtcgtgtaaaagacaaaacgtctcatcaaaggtccacattggggagtaattcttgagcccgctttgtcaggcgcggtaggatagaccttgaccccgttcaccgaacaaattcggccgaaggaactgtcgtcctatgacgaaaaaccgggccttttcgatttcttgagttggaccgtggcagcgaaagcacatttaacttcgccgaagcaatttttgcgtcggatgagtctttactatccaaaacgaggaaaccctcaagctcaattttagcaaggttcaatgtcacgtcaagacaccgagacgcatgacgtttcagccaagcgccgcaagtgagtagccagttccgcagtgcctctcgtttgttaaagccaataatcgtactagttggcaataaaaaacacatgcaaattcagaaactcatttccagcgaaagccacgtatttccgtgtcatgttcactcgctagcccgcgccctgttgtcggtcccacagcgcctggcttgctctaaccgccgcgcgcctgctagaatccacggaaacgtggcaggagctgttgccaccagcacaacgcccgattgtgatttagtaacacatgaacggctgacggccggccccagggttttgtagatggtcggcgaagaggccgccagcaaacgtgactctttcaaaagctttgttgtgtcgtgcgctcggcctctgtggtaaagcgaatacgtaacctgacaggtcctcagaagacacgtatcgcgcggacgaagttgtgtttccgtgttaaaaaatgagttcccttgtacacgtgtcatgcaccgcctccgtacacaggttgtgtcgcacacgaaaataagctgcagtttgtgacggctgggcactgacagacacgacgcagacaaggactctctctctccacatcgagtgcttttaccgtgtgtaacttcatttgatttctacagggaaatcaaaacgcggggagatgtgtcgcataagtccgcctctcgagtctctcgtttgcgcatattgaccgccaacaaacatggcgcaaaacgctgcgcgtgacattcgtttggctactggaattggtccttggaaatgcgtatttgtgtaacagagaggtgcgtcaaccagtatggattgggttcctttgtgaaggccggaaccgtaccaaactgcagcttccccccgctgatcgaaaatgatccaatttcacgagaacgcggaaaaaagatgtggatggaggtctccgttagtgtttgggaggttgcggttacaaaggaagacaaacatgtcagcaacttgaaaaatacaaggggatctactcaaaactaagttcgctcgtggcttgccccccaccaagggttttgtctgacatttccactgagcatccttgttttgaggcgagcgtctaccctctgcttggtcaaaggcaagaatgagactatcttttcaggttaatatggcgggcgtcagcaacagggaggaatcctgctaaacgagttatagaagacctcaaccgactcactttgtaggcaccgccacacttcaggcacaaccgatagactgcattggaatgtagcggtcagtcaccagacctctcgggagtgtaggggagcatgtgcgccagatgttccacgttgtcggggcaataataatacgctcttgaagtacggcggcaaccgagaatagaattgaacgatcgttgatctggcttgttttacttggacatcagcactgttactctcatgagttgcggcgacttcacgcctaaattctttccactggaggaattcgccacgcaccagcatgctgcttctgctgccttaaagacacattccccagcggttttgctgtaggtgtagtatatggattctggttaccacttatcaacagggagaggaaacttctgctgaggtgctagtatgacaaggaccatcgaacagggggtagtaacgtctgaaacttggaaacggtcccccatattgggatgtcgcggctaccggagggcggcactttgcacaaagataaactgtttcgtcttatgcacttgcagaaacgttatgtacaagttgcatattcttgtgattcagcactcatgcacatgacgaaggctcctaggctcttgaccagaaattcttgatttgtagctctgcttgtttggtgtaccgaaaggaatgggaacttctactggaccccaaccctaacggaaagacttcaggtaacccagtgctcaaacatcgagtggaacaccattgttgctaatttaaaactgaccagcacgactgggatacctgagcaaactaaaaagctgaattgcacaactcgttgccttcattgaggcggcaacgccgaatgggcttggagcgaaactcgtctgagctcttacgccacgttaaaaggtgcatactctatttcttctttgtaatacactcaccaggccagttcggaagttgaagtcacctctgcacagggcagctcacagggacggcgtaaggctgacacacgtaacgctacgaatcgtcgagactccacacgcatgcagcgacggaaccacgggcgctttgaacaagcggcacgcactgcaaaatcctgttttaggacacacagtgaatacccctgaagcttttgattttcgttcccgcatcattattcgtgacttctacaaaatctaggtgaacgctgcatacgccgtggacatttaaaagcgggaacgaatgctgcctggtgccggttttcccgcgcatgcgtggtgacagctgcttcgtattgaacaacagaaacaaaggcaatttcgacgaatcggaacaatcgtgaaactgtgcctcgagctcttttttatgcaaaaggctttctttgtgtcaaagactggctctgaacttcgcatatggggagggaacttcctgcttggcggcggcggaccagtgtcagagcgatactgaaacggtctctattggttgattgttgttgaatcttacggcatttcgccagataacctttttcgttttcttcaaatcgctgcaggaagtggcagtaggacaaagccatcaaagtgtcaagacactgcaagcaacgcacttgcagacttgtggcgagcagtgattctcaaggcggtgacacttaaactccaagactgtctggtaatctcatttttccatgtatttaaattcacagcacttcgtgcggagcttttcttcttgctttgggcgtcttctagagctttatccgtcacaa

SEQ ID NO: 3442 - DNA, 3280 bp, Toxoplasma gondii
  source 1..3280: mol_type = genomic DNA
cgacttgcccaaccgcgaatagggaactaagctgttcccttcagacgagtccaaatcctctagatctgtcatcagataacgcgacgcacccgcgccccggggctcgagtgtcagatctgccatcataggaccccgacgaagagcgcgggcgccgccgcgacaagccgggcgcgcgatgcctggcggttgggccacagaagagaagggcagcttttccaagaaaagcaaagacagaaaagccggggactaggaaagcggggactagagatgtggggactagagacgtgaggactagagatgtggggacagagaaggcgattgtgagaagggtacgcacgagcaaaatacgccaagaacaaaaccgaagtgaaattatcttaacgttgtatgttgttgaaattcaacacttttagctggacgtgtgcaggacacagaacgcgtgcaagggtggaactctgacgatcacgagagaagcatggccgaatgtgaaaaagcaggggcaaggtagtgaagcaagagggagagaagagagagcgcaaaggctgcagaggaacaaagaatccgacagtcgggggcgcacgctggccagcagggaaggcactgaatcgcgtgagacgcgaacaacacagtagaggtggaggaaacgagcgtctccccagaagtctcgaggcgcagaggggaaatatgacaggggtatgaacaagggaaaactgctgtcggagtcgaaatcggttcttgacacaaacgtgatcgtcagcgtggcggctgttagccgataccagccgcgcagttcgaaagcagagagaaacggtgtgaaggtcgcaaagcagctgcgctctggcccgaataccaaagttctttacagcatttgcgtgctacatgcccgtttacttcagagagcgaggaaacaaggaaaatacaacagcagggagaaaggaagtggcgcatccagttgtttcccaacggctcctgccacaaccacaggggagagtccagcaggctaaaattggaggcacagcctccaggagaaaaggtgttgacgcaattttagatagtagatagggaacaaactctctcgagacatttttaacccagcccacgtattacatccgacggtgaactagcgtacccaaatgaatcgtggtcaataaccagggagaaatgagccgacacggaggtgctgctacaatccgacacggaaaggactgaagttctgagtgttttcagttgactgtaaaaagcggcaaagagtgatggaataggagaacctgaggaaatcagagcaccgaagccttcgactcatctacgggcatgaaacggcgatcgagtggtacgtacggagtcgagggtagacagggacagacgagaggaaatctggtagacgccgggaacaagctaacggggaatggacaggtaagttccagtagacaggcggttccttcgatttggcggagcctcatgctagagagctgaaagggccagcgttgctgccgcaggacggagttatttttgacagacgagagaagccattgaacgctgagtaggtagaacgagtcggcaagggggcaggtggccgaaacagagaagggcaacatgcgctggcgtgttttgagagacgaaacaacaaacgccacggcaagcgaaagaggacaagggccgcttgctactggtgagataggacgggaaactggacaaatttgactacttccagcgttaaagtctccagagatcatggtagtccgcaagcggagtacacacaaaatcgttgtcacaagagaatggctatgcaactggtctctaaggtcgatacacacgcggattgaaagccgcgaaaggttgcctacgcgagcagtgaaattcacatccctctgactggaggtgtaagacaaattcaagcgactcggatttggtttaggatgcatcgaaacgtcagccatttgccgggccggaaagagtgcacctcatcttgagtcgcttgagtccacaggctgagcgaaagcggcgttaactttcgagcagggcggacaactgaagcggcaaagttcctccctcatactttatactctcatggatctacaaaacgaagtttcggaggaaaccgttcactgggaaaaagctgctgctggagacatggcatcgatcgcgaaccctcgtcttggctttgtggctagaagcgagccgggcatgcgttggcggagctaaccgctaacaaaacgcgtgcaggaaaaaacgaatgtcgccgataaagtctgaggtaaatccctgaggatcacccgagaacacttcccgcggccagcacacgaagaaaaaactcagacagaaactgaagaccgatgataccttgtggcacggaaccaagggcagagatatcgagaacctgaggcaccgctacaacaagctatcgaaaagagtcaacaaatgtggagcgaaacggaccgggtcctgcacaacagtacacctgtgaaataccctcgtttccccttcgagggttctgtcaacaaagaagtcgcgaattcgagctaggggtctcattcattctcctctatgaaaagcgattcccggtaaagcgagaattcatgtgggatcatcagacccgacgcgcagctgagcgagcggcgcacattctgcaattcagccgtaccggggggtacggaattcgagacaaaagcaatcctcctgtcatctcggcgtcgtaagacaggtctctgcactctgaaactgcttttcaagaaatggcacgagccgtctacaagaagagcacgggccaaattgtcacgctgtagtcggcattctagacttcagtcctgccctttgctaacccggtagtctcctgtcctcgctgtgggcatctctctcaggggcaaatccataaaatacgcgtagaacgtagccgatgtgaaaagcagacgcatatgaaaatgtccacactgcttactgcctctgcccccctgaaaacgtcttgcgatgccgccctctagattctcctcggttgctgcacacggggttaacagggcactcgcaaggatacagagtgtaacagccgtgaggaaacatgtcaccctatgttagcggcaacaaatggcgtggggcacttcgttttgcccagctggagagattgacatgaaactggaggctcgcttgatccacgtccaggtgcgtgtcgtaggcagagccgtgcttccaaaccccggcatgtgccgcttgcgattccggagtgcacagttcccgacgaaagagaagttctgacaggcgtattctcatcgcacgctgaaaggaaata

SEQ ID NO: 3443 - DNA, 4277 bp, Toxoplasma gondii
  source 1..4277: mol_type = genomic DNA
ttctgatggaaaaacaacaaagaccatcagattccgtacaaacacaaagtatgtctatatatatatatatatatatagttatagatatattgcgtctacgcagagcttcatatctattccaatgtatgtatttgtgtaggggaatgaaatgcgtttgtatgtgatggactatcgcgtttccacttggagagacgcatgtgggcacatggtttcttggcgcctcgtggctggcaagaaatcggcctctcgctgtgttggtgcggcttcaagagtgccaaatttgttcgtggtcagtgcatgcaaaggaaagaaaaaaaacaggacacctgcggacacaacagcgtctttctgtcgacgcagtcgacatcgaaaaatagacgtgcacttccctctgaagaaaggaaacattcctatagaatcaaacctgcagcttcctgagcgggtgacggcttccggatacactcgttcgcgtagagattgcagccaggtcgtgtgtttctttgtttgagcggactggcaattagccccatagggaacctcttcgaatgcttgcgaagaacgaagattgacgaaaggcaaagatcgactctttccacgacttcgactggtaagattcaagcgagaggaaggcctacacctggagattcttgggagctgctttcagattccccggttgtagaaaagtgcctgcagaattgtcaagcctcgtctgatggcatgtctgcacatgctcgcgtttccgattgtctgttcttttctgcccctcgatacaaaagaatttccgtcgggaaaccaacctttaggtcctgtgtgctagaaacgaagaccgtcggaggggtgtgtacgcctctgttttcgatgtcgacgccgccactgctggaccgaggttaaaacctctttaccgaaccgagagtgagcgtttccgtatgcacgcgtcggcgtgcgttggtgtgcgtcggtgctgcgatggttcttccaaagattttttacagagcaaggacggcagtgcacggcgtcgcggtttccgcttgtcttttcagcgtgcgttttttcatgaagtgaaggacgagcagcagaaggtacgtgactccggaaagagccgcgaggagcgtgagcatgcccatgaagccgctttctcccgacttcaccgagtagtcgaacatgggcgtggcaagaagcgacaggagaccgccgactgtgcaagtgaatccgatgagtttccccagatggcgctgcggaaatgtggcgccgacgtagaagtagatttggttggtcattagcgacatgttctgcatgaaaagaaatgcgatgacgtactcgagccagacggctttcccgggcatgaggagcgtgacgagagaaaggaggatgacaagcgtcccgcacgagttgaccagcgccatgcagagcaaaatcccgaatcgatctgcgatgtaccccgcaatcggcggaaaaacgaacacgaacccgatgataatgtggagaaacgtcaaggcgtcggggaccaggtcgtgcgacgcagtgttgaagtacacagcccgaatgagggtgatggtgaagtacggaacgagaggcaggtacagactggagaacaggtagttgctggtgaaggccaccgcctctctaatcgcttgcctaactttgtctcgccggcctctgtcgcacggctggccaaagaacgacgcaagtcgccgttcgtcggcgcctgcgttcgagttccccaacgtacccagctgccgcgggaagtccgcgctgccgcattccagcccgactaccggcgtttcttccaccgtttcgtctgtttcgtttcctctgagacacggcgcctctctggagaagagcgaggctgctcgcgcatccggcacggtctgctctggcaaggccggatcggaagggcgcggaatgtagcagcctgctggcgcgtcgtcgtggaagcgtttcggggaagaggaaagactaatcatcgacagggaacctgtgtccgttggaatcgcggccggccacgagtcaccttcctttccagccgggtgtttcaacgagtcgactgtctggtccgtcgtcacgggtgtccttgcggaggtttcgtcgctctctccctttccactttcgctatcccaggcgtttttcccgcgcggcttctgcgccgacctcgcatctgtggcatttcctgcgccgtcaacacagtgagagtccgccttgttttcttctttcaatttccgggggaagaaagatgcgcagagccgccaggtgttccgcgggatctctgtgcgacggctggtctgcacgggcatctgttgcaggttgtttgccggcactccatccgctttcccccccgcagtttcatcattctccactccggagcggccctcccagggcttccatggggtcacgaaagcagcaatgaggagcgcgggaccaaaggccgtgacggcgtagccgaccattatgtctcggtaggaaatgtggagggagctcgcgacagtctgcagcagcaccggtgtcatgtagctcacagaccgcatggcgacgaggactgcccgcacggtgttgcagtgcccagggaagagtgtgccgacgggaagagtcccgtagaaagccatgtcgatgccgagaccgaagaggaccattccgagttcgaaggcgcggaacgtttcgcttgcgaacgcgagaagcagccagccgagcgtcatcaggagcgacccgcccacagacgccaccttcggtccacccacgtccatcgcgagaccaccgaagaacgacatgccgtagtccgcgaccgtgcagagagtgaacagattcccgacgtgcaggcgctgctgcgcgcatgtctgcgttctggggtcgacaaatgccatgtgcgaggcgtctgtttcctgcggatcgcaaacccagcggtagacgccattatcgaagagcagctgacgaaacggtgcccagttcaggtacacggggccgacgaggaccgagtagcaacagagaagaacgagcaagtgccaccgcgtgagcgaaaagagcagccttccttggcgtttcagccagggcagacacgccaaggcgtcgcgggcacccgacgggaggggcggccgcggagggctgaaaagcggaccgactcgctgttttccactctgccctgaaaacgcgtctggagcttctcgcctcccatggtcttctaaggacgcgctggggacctctagtctcgtcttcaggaggacttctgcgtagggaaggtacatggcctcgtcttgctcgttggggatttctctttctggtgttttatcgcaaaagttctcttccctgacaggctcagttcgcatccctatgagagagctcaaaggtccttccccgctgggggtcagcggcctctctaccacgcctacgtctttcatgtgagtcacaatcccgttgttgaatgagctgcacagactctccgcaggctcgagagcctcgtccttcgcgtaggccacatgttcgtcttcgcgaaaagcaaaagcgacatgagacaatacgcccatttcttttgcagtcaactcctcgcgccaggcattccagtgtcccatgcgcctgcccttctactttcaacggaagcaagctcacgtggacaaacaaaccttttgcgtgtgtgtatgtatgtaacgggtgagacgagggcctttaagtccgtatagatgtgctgaaaccaataacgtggatcgttcgccacctcccttagaggaatccgtgcatatcaatgcaagcacatacgtgcatatatctatggggattcatgtgcctgtttgtttgtgtatgggttctctctctcttccaccgtgtggcctgtgtttcttggaaaagacggaacgaccgtgaaaagatatgttttccgggggtgtgtctgaggcggatctcccagcagtgtgtactcgacgggttagggcctggggctaggcgaacttgcttctttgaaggcaagctgccgagtgccccctctggtgatctgtttgaccaagggaagagcttgtgtcacgaaggattgtggagcctttgatctttcagccgctttcgtttgcacggggacatagtggaaagtcgaggagcgcggcggccctctgtcagataccaaaactcgcaaaagaagcagggagaaacgcggccgaggagaacggaagaactcctcgaagaactgggaagacgagaaagaaaaacgtagagagggtatacgcactgcagaggcgaacacgaacggacacacggacgcgccaaaaaggcaagagaagtgcgcgcgaaaaccgccaaagaga

SEQ ID NO: 3444 - DNA, 2323 bp, Toxoplasma gondii
  source 1..2323: mol_type = genomic DNA
tatctctgcgtatctgtgtccgtgtatgtatacttgagcgctgtcgtatatatgtataggtcatgtacatcgcacagctggcaccggagtccgggcaacgctgatccttgtttgcgagtcatcggcagagcgtgtgctcgacaaaaaacagaaaataccggttgccgcagttgcggcgagatggattgtgtacgtgccgtcactggcaaagggtgagaggcagtggtagcgatagagcggaactacagctccgcagatcttcgtagatggtttattcgcactagagaccgacaggtccctttatcaccgtctgtgaacgatttgttcagaagcaattgtcacctctgcttctgcgttgtgtccaaagtgaacttgaaaagtcgattgtaaaacatgccatgcagatgctggccctcgttgtgctaaaccctttttgtgattgtaattgtgtgaagcgcgagaaacgattcaacaaatcgaggcgaaacgttaataggagggacacggacagagactcagtacggcagtctgcaacgcggtagttcttttggtcgtttccttttaatgagacttcgttgcacacgcacgagaaattcacagccctgtcagcttgtgcaggagccttttacggccattaaaacagtattgaccaagaacgcctggtagtatgttttaaatagatcgactggcggcttccgtgaaggtgcaggttctgtataacgacagtgaacctggcatttggttcccctaggaccaatactggcaaataagagagttgcttgcatcgagtcgagacgatctgtcgcggggcagaaacctcgaatttactcgaaccaagcaacgctacagttacaggagcaatgatagcaatttgttttgcggaaacatgcccgttcccagtatttcgcttatgattggagaactaaatctggtagtaatcgaatcgctgtgcgggttctgtaaagtcttctctaccggataatgtttcactttgtgtttgtcagtgtttggctggtgttctgtgggaggtgttgattttgctgctactttgattccgaaaacgtttcaccgtgtgtgatacgctgctgccctcgattccgctggtggctacgggtacccaggccgaggcggaatttcttgggttgtgttcagcacaaaagtctcctttgggaggaacttcctgcaaaaggtcccacctgctgtaaaataacagaatgccgggcgttttcctgcaagctgcgcatattttaagtatgaccgtcaactaagtccttgacattgctgaaagtcgaggggttcgccctaggctggtcaggtgtgcttgtaatcacttcgcattagtgcgacatcctgatacaagacaacaatacgcgaagttgttttgtattaataccctgctattcagctgttggacgttttgattcgcgatgagatacgtaatatctgtgccgccatgacgaaagatgactgcagcacggacaaattgtgatttgttagggggctggcgtttgtcgctatcatcgtaggtactacagtctcattaaatgacacatcattcggtcatgatctgtgatgggtatttataatcgtcagttcaaaggggcatttctgccgcgagaaatgtggccgagaaaaggcacttgaagaaccccggttcatgaattaaaagtgtaactgctagtttggtttgccacacagccccggcgcgtttacgcgcgtgggggagaagagtcggagagtgtccagcgcgacaccgacgactagatagacttggcgggaaaacagcaatcaacatgggctgtcactttcccgctcatccgaagtctacgagcttatcggggacggcaaaagcacgcactgcaaaggttcattgcggagaaaaacgaaatacttaaatacatcacgactagtttttgttgggttctgacgtaacacaaacaaggtccatcgtccatcgaatttagatggaaaacagtatacatctcatcttcggtggtagtccatcgcttttgaaactaggcagatcataggcactggcagcgtccgaagttcctactctgataggttcaccgagtcttccagcctcatttctgctgcgactcacagcaaacgttaaatacctatgggattctttgtatgtggcgtggccgagtaagtataactttctgagagtcatactctggcttagtgaaaacctcgagacgtgacagttcagaagcagtccgaatgaaataggtactcgaaagggtacatcattttccgacggactctttcgggcgcttgcgttagaattcttcacagaaccattggtgacgaaacatga

SEQ ID NO: 3445 - DNA, 4137 bp, Toxoplasma gondii
  source 1..4137: mol_type = genomic DNA
ttgacttctacagtttctctgaggaactggaagccgctatggtttgcgagaaggtcgtagatgagaactcgcgtgcagacgtcctggagtgtgtggctgtcctcgccgttccggttcgcacctgtgagccaccgggcgccagcttggcctcccgccttacgattcacaaagaggaagacgaatcgggtctttcctcggcagggccactgagctgcgacttgcgtggcttctaccacagagacttttgtcgcgcctggggaaaacttggcgcgaatcttcggcttgggagcaaatcgcagttttcgctctctcgactcttcagtcggcttgtccgagacgttcacttcgccttcggcttccacagcccgcggcttcgtcttttctactgttggagcttcgacgagcttcccagacgcctctcgcggggatatcttgtcctctgcttcgtcggcgacgttggaacgaagcacttcagagagaggcgcagccttctctgccgttgaagccgccgtcgtgtccacctcgccgaggagattctggagaaacgcgggatcgacgaccgcaggttgttgttcgagactcgcgaggtcggcgtcaacaggggatccgtcggcatccccggtagctcctggactctggacagctcgtcggttgtccgtggggtgccatgaggaggacggagtggacgccgaagagacagcgacgagggagagcagctgcagaggcacgaggaggcgccgaagagacaaaggcaacgcccgcgacggcaggagcggcagagcgggtgcagcaagagcccccatggtctctgaggagaggggaaacggccaacgcggcgagatccaggtgcgtcgactccggaacggaccgcggggcggagtggtcacaggctttccagatctaccgcagcagtcccgctcgtagaaggacgagagggagaaggaagctactggtcctagcagtgcgtgcgacgccaggagcgcagcaaagacttcgagggctgcgagttgggccagaggaacgggcggcgttttcgagaagtgcgtcgtcgttcgcgggcctcaaaattgggcagaaaaaaactttcgcggactttcgaccccgcccgccagtcaaacagtcgagtgcgggagagaaaagaggagacagggaagaaagaggcgcggacaaaggtagagcggaaacgaaggaagggaaaacgggggaaaagtcagtcgggagctaaagcgagagccgacatctcgcgactcggtcggcgaagttggaccgcgcgcacacggggagtcgtggcaacgagacgagcctgccagaggagacaagacagacggatccagcctggcaaaaaagaggggcaaaaagccccaacggagagcggccgaaaagcagccgaactgcgcgccactcctgagagcacctctgagacaaaagggaggaaaatcgggcgacgcagagcgcgaatatagtgcaggagagagcggctccggccccgagttacgtcccaaagcaaagcacgtgcacgggaaagtctggaaaacccagagactcacaaaacacacctccgcaaaacgctggcgcacagacttcgagtacggctgactacatctcacgagagtctccgctctccaccgcgctgctgtgggccttgccgcctctcggcctcacaacctccctccgcttgtcggagtgcggcgcgtgcgcggaggaaactcgggcgcgaaagatcatgcgacgcggattcctcgtctcgacaagacctgcaagacgcgaagtcgcaccacagtccgtcggagaacgaacgccagacccttcctctttcgaatttcccttttttaatcttcggaggtgtgttgcaactcctacaacctgtggctctgataggggattccggaggcactctacgcagagccccgccccggctctcagtagcacgtttttgctcttcctgtcgctctggctacttaacagatctggcagttacgcggggaagtacgtagaccagatgctactttctacggttgttcatcggctgtccgtttttctgtgtggtatcgagaaagatagagaagcaggaggagcctccgactgatcgagcccgatccataatcgttcgtctcagatcgaaaaaaacagacaatatagtgccaaggatactgagtatgagtccagttatgagatacagataaccacgtgctgtatgactgctgcacaccgtcacggcactgaactcctaagatagatgcgagagttcaatttcaacatcctagggccaaaggtggaaagcatagccacacagacgcgcagaagacccgtttctctgacttgttgacgcacttgacttccatgactttgcatacggagagggtgattgtgcagccgatgtatatttaacaaggaacaaacagaaaacaaaccgaactgggtgaccttgctggcaacgagaacatgggaaatctcaagatgcgtcagcgaatttgtggacactttgcgttgccaaccacccattgaaaacggggaaccttgcctatcattccttggtctacacggcagaaatcattttcgcttacacaaaaatctccagaactggttcacgaggaacctacggtgcggcggaaccgatgaatccggatgaacgaaaaggatctcagaaaggaaagtctggggcggtagaggcacctctcactcgcgtcggcactggctgacggcttctgcctccggcccttctgttggtttctccctcttccggacgccagttcctgttggacggtgtgcagactaaacattcacgaagaaacacataggacacccggttacaagtggatctgcatgggagtcttccacaaagtggccgccagccatgcccatgcgcaatgcctcctgttagaattacacataaacccagacacatgcgcaggtgactcactccacgcgtttctctaatgagacacacatagtagtctgcgtaaatgaagacccacaggatcttcgtcgaatactttgtagggcttcttcgttcttccagagaaacttactcctttttagtcatgttgaagcgttgccactgcctgatcggatcggtgcaccgtcagcgtaagggagtaatcggttcagcgtccctcagcgagtctgatgtacgttaaggaagacctgcgatgttgcaaagggactcatcccctcgccgtccaattggctgctccgcatgactagtctctcgacacaacgtgcttcaaaaggcggtgctgaccgtggtgccctatcgaattcacacatgcggattcaccgtcacattctcagctcttctcacgtacttttcctcttactgtgtatgctactagcgtgcaactttcgcacgcatatatgcatcactggtatattgtagatgtgcacccaaacacacgaattcatgtacagcggtaatcgcaacaatatgcatactttttttcacattagcggctgcagattgatctgaactggtacgtgcggagtgacgttctcacagaacaaatgaaaacgcattcccagcctcacaccagttggcgaataacttcgctcgcctgcttagcaaggctgtttgtttgagcgtaacgacaccggagggaaaccgagatccacgccttgccggctccgctgctcctcactagtaggaaaatacgcagattcttgtcttctgattcacctccctgcgtactcgacagagtgaccgtcaaagtcgagatgtagaatggcgaagatttacgcacggcgctgcattgatttttgccgagacacgaacggttttccccggtgcccccgccttagccgcggggaacgcatttccacgcggacgttctgcagactgcagcttatcatatgggcaggctgggttccggagtagaggccgaatggaaaggggcagaaacgttcgatatttcgtcatccactacacctgcttgaacctcggtttatcgcgtgtaacattctgggaaccatttctcctgcggctccctacgaattgacgaagcccgagtttcggcgtctcgcaagactcacatgagactcgccagttgccccttcctcttgccatcttccgcgtcttctgtttgtctcgcttcttcatcgtcgatttaacgacctccgacctttcccgtctgttctaaacaa

SEQ ID NO: 3446 - DNA, 2785 bp, Toxoplasma gondii
  source 1..2785: mol_type = genomic DNA
aaaaagaatcagcaacacgagagacaagatgacgatctgccagaagaacgaatgcgcgcggttgatctcgcgaactgctcgaaaaatcagctggctgttcccaaacattgtcaagagagtggccggagtgcccagaggcggccccgtacccaccggaggcacagccacgaaccacgagggaggggtcgccgcgacattggacgattgagactgagaagaactttcgctgggtccagaacgagccgaaacagcggcgttgcggtgggcagctgcgtgcaggaacggcacccagtcaaagggtggaggcgagcgtacgcaaaggtacgaacaacagccttggccattgtcgagagccttcgcattcccgtacaggtccacagactgcacctgcagaaaagtaacacgacacgctctcgtcttttgcccggaaaaacgtcggagccgctcgtaacgcaaacggagttcttactcgatttgtgaagcacacacaacgttcacacagccactcggcttgcgctcctaactacgttaccttccgtacaacggatacatgacctgtcttttacgcacttgaaaacacgagaggctgacatcggggtgaaggctggtcgtgtggactgcaccacgctccacacataaagaactgatacatctagttgacggacgacattgctacaggacgaccaatcgaaatatccagtgaccgcctgactccagttgatgaatcaccttgctaaacaatgaacaataacacggcaaagccaggtccagcttcgccgcaagaaacacagcttcaccacttcccaaacacaaaccctcttccaacaaaccgtttttttgctttaatccccttccgacagcgcccccacttacctcaggattcagagcgaccgccggggtcatagacaccgggaggagaaccaaaggcacatcgctgccggaactcgagataaccctggcacccgttgcaggcggaacctgtacacatgttggcgactctggagttgattctgttgcagaattcccgggcacagttaccgtcccgttgtcctgcggccggtaataacgttcgttgccttccccctcgcgactttgaagcaacggctgcgccatggtgcaggccgcccggcaaactcttgctgacagccgaggaattcaaattcaacttggatcttcacgttgctagaggcgagcgggaaccggggaacaaagaacctcccggtgaatcccttttgagatttccagatccgcgccagacagtgtgcagaaactaatggttttctgaggtacttagcaggacggatctcgcgattctcttttcaagcagaaaaaacaccgcagcaacgaactccgttccgtgaagcaaaaagctcttcgcatgcgaacagccagacctccgcggaccgctgccgtgtttgatcaccccagcaggaggagcaggaggctgggaaaaggtagaagacgttcacggatttagaacctacaggcaccgttaagcgaagaaaagatgacgggaaggcgtaaatgactgttcggatcaacttccgcgacccgacacaaacagcgggaaggagagacaggaaacagagacgcctggctgcacacgagcgcatgtgcgttgcagacttacggagggagaaactcgaagattttctctagatcctgacgataaggaagccttttttgcgtccacaagtagaaatgaaggcgccaacatcgacgagacggaaaagttggcactgacgagtaaattcttttctaaaagccgcgcgagacaatgcgcaaaaagcccctggcaagagtctcttttgctctgaaagcacaagagagaactgcagcccagcagggcgcttacatgtttgcgcagggtttgacatttcagcacatgagtagaactgtagcaaccttaatcacagtgtgcacacacttgaagtttttgccgcctcatcaatctacctgatttgacgttttgctgatcagctcctccccgagctgcgttccgaaatctcggccatgaacaaagagccgccagccggctgcgccacctcaaccgacggtaaattcaggacgaagtcgcagggtaccgactgaaggcgtacctcgttcccctttctgattttgtactttatcgcgtttgtctcaactttgttttcccacgtgtcaagctgcttaattttctagtttgtgttgcagtttttctcacgcgcagagttcgagtgcaaacaaagcggacaaagcctgtctcgcgacaccgagaggttgacgccagtgagttgagggcgctcaggggattctgggactttcgaattccaccgctcgtggacggtgtgaagtccgctcttcttttccgaccatttcacccctctgtacatttgtcctgtcactcgtgtcaacttcggcgaccagagtttggccagtcacctcgctgctcgaccctcaaccgtcaacgccgtcgtgttcagtcctctgtggcagatagcaaattgggtgacagcttcctgcacaaatgtatgcagaaaaaacaaatactgactgcgccggcgacgtatctcgtcatcacacttgcacagacacgccgcagccgctccgctcgcgcggaggtttcggcacaccgcctgtccgcgtactgcggagtacacatgaccgttcacaaacccccccgtccttaagtgcactgaaagttcgattctcagcgagggtatacccacatcactgcgtcggttgttcactgacggtttggttcttaggaatctgtagttgagtttgaagcacagaggattcacga

SEQ ID NO: 3447 - DNA, 2313 bp, Toxoplasma gondii
  source 1..2313: mol_type = genomic DNA
tccgtgtgtacagtgacagatgtggaggatttgcatcggtggatgcgcaagtcgtgtctgctccacccgctttttgaggaggttcccctggcagatttgaaagacgacccgtgcattgcagcgattgaaagcgataccgaggaaggcatgaaggtacggcaaggtcttcttttcgagcttcgccgctactgctgggacagcaaattatgtacttgggcgagtgttatcaagcctttgcttccgaatagctttcatggagaaccagaaaaagttcgcgtgtttgactgtagcatgagattatcagtcgcggttttgtaggagacaagaatgtcggagatctgacatttgtcattgaagtgaacgccgagttacgacgcgtttctatgcaaaatcgtggcgtcaacacactggtatgaactggcacttcatcgcttcgtccgcacaaccgtcgactcgtcacttcgggtctcctgaacgagaggcgtgacgaggcacacaacggacaaaacacccacaaaatctgcgtcgcactcgtcgattttgcgttcaggtcaaacgcatggggcagccgtgttacacttgcgttttccggaggaaatccgacttgcctgtcgactaagaaccgcatgtcgagcgcttcgccacatcgcagtcaactttctcgttccacagcctgctcggatacggcgggggttcgcggccaagacgcaaaaggcgggaacctattgtctgaattgtttaaccgagtatcaacatagatgcagagagtgccggcacacatctttgggaactgcgaaaaagactgggcttcgtcggcgcctcacttcgcgtttcctgcatacagcttcctgtcgaggttatggcggggaagttcatgcttgcgcaaggcggtctggtcgaaggaccacacagactgaatcacgctggttggtggttgtctttttttttcggtggggggggggggagggacgacgcaaaaaactcaaagttgctgcggaaattctgcacatctctgcggctgaagtggcacaagcaaaacagctttacaggctctcctcagtgaaagaggctcaccgttaaagttgagattgtgcgaaagtcgcatgaatgctttgtctgtcacagcggcagaagagtctttcgaacctgacgcacctgttccggttacaccccgcaagcacagggaactaacactatattgattttgtgtatcatatccttgtcactagttgctgtcgtaccaggcaacattctgaagttccatcctgttgctacttctctaacaagatcttgaacgcaagaaaaatcacaagactcttctgaggtatatctaaacgctaaagattaggtgcctacacagttttgttgctatgcggagacttatggaggcagtgaacagctttgtagctatgaaacagaatcactacgaacgaatcagatgtccacatcccacaattcagtttctcgaaccctgtgtaactgtgtagacggtttctcgaccagtcgttcattctggtccatgcgcagtcataccatcctttttacgtttatggtaccatgtcgcacaccgatgttcccgacacggtggacatggtatttcacagtttccacgtcatgccggatcccactcaatgcagtcacgttttatgacactaaagtaacatggctgctctggaaacacttgttttgatttgatacttaaaggaatcatgcccaacaggtccttggcagcaccagcattccccgatggacaatcccgtggtttacatatcagctgcattgctcacgctccgtgatcgaccctgacagatctgatccctaagccgcaggtcaccctgttgaagctggaacctttcgtcccacattgtacagggagtactcgtgtgtgagacaggattatttataagcttattctatggaggagtgtacacagcgagttggagtacaggtttagattttgaaggtcgtcgttcaccagatccaagttctagcccatagatctattttcatgaagggtgcgaactagtcatatcggtgccaatccaattaaagttgttacaacgctgtgactgtgcacaggcgctgcttcttctttcttacggtcatctcactgcttccacactcgggagttgcgagtgtctcgaccagcttttcagagttcggatttgacgcccatacgatacccttctatctgaagctttgcgggcagcccttttctagtgttaagtggcgatactgtggttttttcacactgctttctcaactacggttagagctgatgattgggcgacggtcatccgcacttcactcagg

SEQ ID NO: 3448 - DNA, 3050 bp, Toxoplasma gondii
  source 1..3050: mol_type = genomic DNA
tgaaggaaccgaacttcttcgcagtttaaggtaaacgaacgtacacgttcgtataaaacgcaacgttttttctcgcgctccttcagccatctctcttctcccttccccctcctttccccctccgtcccccctccaccgcttcgcatccctctccatgagcgacgcggaacgccatctccctcccctccagctgcctcgcgggcatcctttcgtcgtccttctccttgtcgtccaccgctgtgtggttttcgcctcgagaaacggaacatcccggaccttacctaccgctcttctcctctacgtttctgtgcggtttcctcacccagtgtctcgccttctctgctgtcgtgcctttcctcctctctgcatgccgcgtcctcgtctccttctgtggcagaccagcagacgcgtctcagccaagcgagcggcctgagtgaatgcgtcaggttcggagaagcggacggggattcgctctcgccttcgagcgggtgcagctgcgccgtcgcctccgccgcgagcggatgaaatgccgaggaagagagaggcaggaagctcctctcggacttctcgcgagtcgcagatgtctcgtccatcgtcctttccaccgcagggtgaacgtactcactcacgctgccaagcaggtcttgcaacgcggtgtcctgactgtgcttccgaagcgaagaggacgaacggtccgcggctctgagggccgccagtttcgcgacccagtccatgccgtacggagacgcatccacgaggtcagcaagacaagcagcggcatcagtctcggctgctgcagctgctctgtcgacaaacgattttgcgtcgacagagcgacaagcagctcgccaccacggcgacatcagcagcgcggctgcgagtctcgcttcttgttcctgaccatttttgttttcgccgtcgccttcgagcggagaatcgtctgcggcaccctcgcccaggatcgccgctgagtctccgccagcctcccctggcttcgagtcctcattcgagtgtacgtacagcgcacgctcccagatgaggtgggcgtctgcgagcagcatcgctttgccggcgtccacgactctggtgaaaaaagcttctccattgccttctgggaggagttctgcgaggagccccagcagttcgacagggactcctgtctccgattcggctcgacaagaagacgacggaggagccagcgcgagaagatgggaggcgacggtgtcgtagacgagctctgcagcgacttcggcgttctgcccgaggcctacgccctctgtgacaagcgcgcagaaggctgcgaatggcgaggcatctccgccatcttcccctgtgagagaaagggcgttttggcctctttccgagccagtcttggctcggccgtcgggagcacccgagagaggccgagtcgacgagacagagagcgcaggctgtagagacacccgaagggccggctgcgtgaggacgtagtcgcggacgcgggacgagaatcggcgaggagagaaagcagaagaaatcgtctgaggggaaagcggaaacgcactcaggtccaccgaaagagaagagtgcgaggcgagaccgttgacagaaaccgcgggatgcagagcctgcggcgtcggagaagaggaggaagacgaagaagatgcagaagacgtagaagatgcagatattgcagaccaaggaggagaaggaagagggtcgaacgtttgaaggagcttgtttcgttccgctgcagctgtcgcagcgtttgagaagcgaggaccgttgtgaggtcgattcgtcgcctgtcgtggagtctgagaaagagaggcctcgccgtcttcagtgtctgctggagatctcgactgcgagagaaggtcggcggtgaaacgccggaagaaaagaggagaagacgctcgcgaacgggaagcgaaggcagccgaggagggagaggagggagaggacggagacgagggtggacggcgaggagggtacgtcatcttcagagaaaaaaatgcagacgcgcagatgagagaaaagggggacagaacgagggcagcacagacggaagccgagagaagagggagggagaggagagagtcagaggagagaatcagacgagagaatcagaggagaggcaaagagagaagaacagagcgaggagagacgaggaactaaggaagagaatacccctggggagacggaggagaacagacgtcgtggagttgggagaggaaatctttggaaggaagaagaaaactgaaggacgcagagatcgagaagaactcgggagaaaaagagagaacgaagtcagagtggtacacacaacgaagccgacgcagaagagaaagtccatgcgaaaagcgttcgctttgtcgcacagcgccgcggttacatcttctagggaaacgaggtagaagaaaaacaataggaggatcagaaagcagcgaagacaaggaactcaagagactcgaaaaaacagtcattttttctcttcttctcgaccaaagatagactgtctttcgacgcagcacacaaggtcttcttttcgtgagcactctctcctcggatatagcacacagcgtccgtgtctcgtctcgtcgagtgagttgagagtccttcctgttctcctccgtctctccactttctcggattcctgttgcttgttgttgtcgactgtttttctcgagtcttggcatcgtcgtcttagatgcgaaagggagaaagggatccctctgtggtgcgcgagacttttctcggtgtcttctcacggggccgggacaaagttcgtttttcctcgagaacttcgcctgttttcctgctctcttcttttaaattgtttcctccggcaaagcaacgctcttgtcgcgcaaatgctggcgtcagaggcgccctggacgcgcgacagcagctgaagcggtgttcgttccaaagcgttcgctgaaaaggactctgaggaagcaggaagagacctgaaacaaactcagcggctttttccccgagctgcttggagaaaccacaaatcaaagcgctcttgctgtgtccgtttctccgttgctctctcaacaaca

SEQ ID NO: 3449 - DNA, 906 bp, Toxoplasma gondii
  source 1..906: mol_type = genomic DNA
ttggactggctcctgtccatttgctcatcctcagatccatctccttctccgtcgcattctgttctctcgtcttctttctctgacattctcatttcaattctctctctatacctcgataggcgccatcctgatgtttctttcctacgccgtcctctgcactgcttccattctcgcaccttctctcacttctttctctctgcatgtgtgcgtttctcattcgctctctgcgcatgcctatctatttcggtctccctctctttccctctctttctctctctgtgtatcgcgttccttctctgtgtgcgtctctctgcctccatcttctttgccagcgaggttacctgaggacagttccgtatgcaggagtgccgaaggacgcagtggacccgataatggtttctcccgcctgctcctcgaaggctccggcgcccttcagttcctcgatgaggtgcttaggcgactggatgcggagttgggcagaggccagctggccagagttccataagagagcgaagaggccgaggcagccgaggaagacgtgtcggagacagtacgcgcggtggggcaaagagacagggagacaaagcgcaaaagagggaagtgaagcgggagacgcggcgtgtcgtgcctctggccgcctgcctcgtctgcggctctggggggcagcagctagttggaggggaccaggaggtggcggcggcatcgctgaaagactgtgtgttgacatctgggaaacagtgaagacaggaacctgtgaagaatcttaccgacccctccgcagatccatacctacaccgtctcgggtgtttatccataaatgcagggatccggacagcgtttctggcccacaaaacgcaagaaagggacacgcctgcaggcactcggttctgtagagtctggaaaata

SEQ ID NO: 3450 - DNA, 2499 bp, Toxoplasma gondii
  source 1..2499: mol_type = genomic DNA
cttctgtggaggatccagacggaacggaatcagacaaaggagagaaagaagaagagagagaagaacctgaagcagaagaagacgaaggagaagaagagaacggagaagatgccagagaagcggaagaagaggagggacaggaaagacgccttgtgtcggtggagaagcattcttctcgggagagagccagacagttggaaggtcgcgaggcgtcacaaaaaagggatttttcgtcatttctgagcgcctcgtcagagggaggagaagcaactacgaaggcaacaacagaggcgcctttgccatttggctgcctgtcgcatccgaaagtggaagagaacagaccgagacagaggaaaagaggaaatagtctgggccaccctgttcgtgcgtgcgtcctgattaacccctgagatcttcgtgctttctccttctcctttctcgctttcttttgagcctgtggggaggtgtgagtccactgggagactgagggcggtctttcctctatctgttcacgagggccaggaaggcgcttggagactgactctggcgtggagaagctgccgttgcttctaacgccgttcgcaactgaaagggaacgataactgcggcttggggacagagcgaggaagcgcctgtgctgcgggcaccgccaccagtgaaccgcctgctcagcagccatgcatccctggtggccagacgctgctgttgcctgcctcctcctggcgtccgcttctctcttttgggggctcgttttcttcgctcgtttttcgccgccgcggaaatggagacagggagaggctgcctcatccatggttttgcagcggatttagagaaggcaagggaacacggacggatctcggaacccagccactgtcaacgaagtatcgacaatgtgcccagcaaagcgatgtcgacacatatgcacatgcaaataatacacatagatatgcacgaatatgcaattatgtacatgttttatacgcttgcacgccgtgcgcacggaccctgtgtaggtttctttcgagcggatgttccggcaggcctgtggggagaagtggagaaaagccgcgcctgtcaaacaaaaacgtctatgactgttcctggtgtccttgatgatgcacagagttcgacgtcggcgggaaagcctcttctcgactcgacagcaaattgcccagcgaggctgctgacatgcatctctgcccgctaaaatggataccggcgtgcgtgtttgcttacaggtgtttgcggaattcgccacaattcacacatttgaaggcaaagtgctaaattcaccggtttacatgtaccgtaagatttgcttgtcacgtcggggccagcagctcggcccagctcgcacgttcgccggctggaggggcagctaagcatgctcaccccgctacaaaagggacttgttcagtgagcctaaagtacctgtataacggagtttcaacggtgcagggcagaagcgaaaagctctagaaagcggtggactgtacggccaagttttcacttcttaaagtccgccgcatgcgcgtcacactgcggtgttctctctcgcaagacagttgaggagcgctgtgctgcctttgaactgagttcgcctccgtagtgtgcctccctacaacctgcgctgttgaccggctgtgttgcttcggggcatgagtacaccaggtttcccctcgaaagatgcctggctcggtgtttctgagagcaaaaacatatgtttcgtgcgtgagacacagagtaagcgtcgtgccaaggaagaatcgctctgttggctgtattaaacaaaaaatagaagggaaccctgctgtcgtcgccgcacgcgcgctagcgacgtcgctccagtgtacgtccccctcagagtgtcgtccaccgttttttgccaagactttccgtgcgcgttcgcggagttaacctctattgtgtggtagagcgtccagtttccacaaacggtttcgtcggacacttcggttgccggcaagagaaaggcgaagacacctgctatggggggaggaagacagattcttctcaacaaatctccgccgtagacaacgcgcccgcgcgccagcacctacggcgactccgtccctcctggatgggtgtggacgcgcgacccggattcctcccgcagcgcgttctctcgctggctgttcttcggtgacctcgcggattctcgacggaattcccggggctttctcgcctgtctattccgaagttgacaggtgtatgccgatgtctccacactgacagtttcactggaacgcaaccgcgtgtgtggcgcagagtttcgctcgttgttaatcgccaacctttgtaccgcagcgcgtttgctgctcgtcttggcggcaacacatagttcacggggcttcggagtgctctgtcccgccagacttttccattgtacctgtagagaaaaagcgcggcgcagaacggcttctcgcgatccacggattcaggaaaacgtttctgcgctttgcaaccgcgtcttctaaaaaa

SEQ ID NO: 3451 - DNA, 1348 bp, Toxoplasma gondii
  source 1..1348: mol_type = genomic DNA
agagagagaaagacagagagacgtatgacaaatacacagagaggatcatgcaacgaccggctcggcaagggatgccgcctgtgttgggtctcctacctcgctgaatgaggcactgtgagagatggtagatgtgcgtttcaattcctccgagagaagggaagaagaagtcactgaccatgcaaatgcatatctgtctccttcgtctccttgtcgaggcttgggcgttaccgccccctctcggcgcctccatcctcctggaagaagcctcgaacgcgcccaagttgaggcgatctacaggtacgtgagtctctgcatatggctatctgctgcagtcgagacaggctccagaatcctctgcatgcttctctcgactgtcgcatgcagataaatccgcgagcttgttcccagaaaaaggcatccgcaagcgtggagcaagtgaagagagaaacaggagacgaagaagagggtgaggaagacaaggcgagaaagcgaagaggaagaagagaccgacgagaagtgagagacaagagaggggaggggcgaaaggaggcagaaaggaggagactgacgagagcgaacaggcagaaggggacgaagaatgaaggaaagaaaacatgacactcgaaggcgacttgctgggcgagagagcgacgacgagatcgacgacgagatcgacgacgagagcgacgttttctctcgccaccggaggccgcggcaggaagagaccgggggagagccgtaggcagcggggactccgctaaacgacacagaagaaatgaaacgtgagactgtgtttgcttggaagcggaaagttgaaaagcacagcaaaaaagacggagagaggtcctcggtctggcgacttttttcgagcatgcatgcagccccggaaaaagccaacgcatgcccgtaggcgagcactcgtctccgcttttcgaaggccatccataagtcgcgtttcctttttttctctctctcactcgctttctcttcaccagtggagagagaggctcagccttgtctcttctcttcgcgcgtcttctctccctgcaggcgcggcgcgaggaaggtgacgcacacacaagacacaaacgcgagaaggtatctcgacctcgctccagcttcacctgaaaatggagaacgccgacatcgcaagggagaggagacagaggcgaagaggcgaattcagacgtcgagaaaggagacagagaagaagggcatgaacgaggcagactgacgaggcgaaggtccgtagggaggcctctgtcttgcgcgtctgctgctcctcataccctcttcggaggctgcttctgactcgcgagcaagttctcatcttagcttctccccaaga

SEQ ID NO: 3452 - DNA, 1524 bp, Toxoplasma gondii
  source 1..1524: mol_type = genomic DNA
cttttgttctttgatatggtcgaaagggcaaccctctttttcacgctaccacaaccgtgcagttgaagcagctcccgagttacagccttggtgacgtgtgcccgttgttggttgacaccagtggaaaggccgtcagcaacacgaaatcaatcttctaacaggagctggtgctgaagctgccgccatcaggttcacaaccagcctacaaccgtcagcattatcgagagcaaatatattcagagcgtcggttctgcgccaaacgccccccccctccctgactcagtgcgtgctcgatactgcaagcatggttctagcttgcttgaaactacgaaaaacgaacctctgtggagacatgcgataattgcagaagtcaacctacatagacacgacgtcgggatatcactggaaagcgctgtatgagcacaatagcttcgcttcgcctgcaacctcgcgcagtacaggttacataagaaacgtcgtgtgccttcagtttccagttaccgatacctctcttattcgccagttgccctcgatcagccttcagagcaatcttctacagaaaaaggcgacactctcaattcccttgctgtgctaccccacacagaacgttgtcgcacgacgtcaccacgctaaagttctgcaacaatgatccattgatggcacgaaaaaaaatccagcacattgtctgtatttactggcttccatgcttctgttcgcagaaatccgaccacactgtacaaaagcatcaacgatacacggagcacggaagaacactcctacggcgttaaacgattcgcaagagttcgcacccacgccaacaaattcacccaagctggaacaaacatgggtgacaaattgtttgtgcccggcacaacgacactgtcaatgacttctcgtgacacccgaaatctccttcggaaaggcgttataggagttacaaaaatacaatgccagcatatcaaacagcccctctcccggaatttctgtacgaccccttcgaacccctgcctgtcatgcgggaaccccgcgaattttatctgattacaaaacaggtttcaccaaaatacagcaaaggagtcgcacaacaaaccatggaacactgaaaccggcgagcattgcgagaggacaatcgccagcgccttgcggacgactttttgtgccgaaactgaagcagggagacccattatcccattagagacgacagtagaacgcagtcacaacggcgatttggggaacggcctactatgcgaaacatgatacttgtattctaatcaggtataaaaacgtggaacaggcgcgtgaagttttattctagagtttcgaaggtatagctaagccctcagcgtaacaacgtttgctgacgctcacctgtgtaaagctgcgtcgcatctgcgtgcccatggggtaacacgcaactgctgctaccaggaaagtgtcgctactgtgaaatcgctgcttgtttacctgctttccccctgctgacatttgtttcagacaggagagagagagaggtgtccactggga

SEQ ID NO: 3453 - DNA, 1601 bp, Toxoplasma gondii
  source 1..1601: mol_type = genomic DNA
atgaaacattggagacgaggcatcctgtttcgaggctcttcgtttcctttcagggaattctctgcctcagaagctgttcaagagaagacctagacttcatgaaaaaaagtttacgagacagcgagagagtgcagtggagagaaaggcttgaattgcatgggcgtcagtttttctgaaaagagggagaaataagcgaagttaacagcgagagtaggaacaggtgtgatcagctgcgcggcgagcgggagctctcaagaaaagctgtggttctcgttttcctttaaaggagatcgatcgcctctctgtgcgtttctcagcgagagaagacgaaaggctcatttgaatttcgcgtcaagaaatgtgaacattttctccggctcctgcgtttccgctccaagagaagcttgacgcttcacctgtctttttgccgagaacctctttgcatgaactggtttgtcaacgcgttgtttctaatttaaacgaatgttttggaacttcctgtgctccaaacggaggccgtatggcgagtcgaggcgggcaggcaatttcgagtgtcacaggcgcaaaccgtgacagcgaaaatgactccttctctctcttttgtgaagaaagtcatcttccctgtgggtccctcgcagtgcattaagagtccacaggagggtcggttgcggagaagaaagccaggaaaaacagagagacatcgacacagagaagagaagtcgactgcacagcttttctgctagtaggcgagaacaaaggagacgcttcctacacgaggccaaaaaaatttcgtttttctctcagcttcttcccagtgccctcttctcttgaaaaacaagagagaactcgctgagggcggaaagagagattcgagtgctcgcctttcagacatctgacaggcgacgacaaactggctctctcgccagaggaagcgggaaggctcgctttccggctggcttccatgcaggacgaatgactcggtgtttttttctgaggaacgaggatttctctcctgccctctgtccgcaggaaaacaggttctgctttcctcacgttccccgggactcaccaagctgcttcttgccttcacaggccaaaacgctttccaccgttctcagaaagaatgatgcgtcttgcccggactccgggtcgccgctttcaagcgaaaggtcacagttttttctctcgcgagaaacgctggacttttgtttccaggaaccacgagatttccttctctctctgctcaggctctgtccacagtcgaggcgaagtccggctggttccgcgccttcccgagttctcacggcagtgattcagagaccatacagacggtgtttcttctcgttgtcttgatgcatttacttgcacaaactataaatagattctacagaagtaaatgcatgaccactggaatacacgaaggtgtaggactgccactgaacctttgcagcgcggtgtcgcttttttttgtttgtcgctcgtcgtcgtcagtcgcgccgagaacctagactgaagatgccgctaactgacttcgtgacggtagagaggcaaccatcttggagagagggaaggcgcagaagaatcacggcaactgtgaaaaa

SEQ ID NO: 3454 - DNA, 2208 bp, Toxoplasma gondii
  source 1..2208: mol_type = genomic DNA
ttttgggagagcgaacgtttccacttggctgggccggacttcgacgcatgcacggccgtcttcgcgaacgttgcaggcaacgccctcctccagataaagcagctcggccccgcacagcagtcctctgccgcggcaagccgccgcccccgttgcagaagacgcagaagaggcagaagacgcagaagaggcagaagacgcagaggaagacaaagacgacgagccggaagaagagaaagaagaagctgcagccatgttgatgtgcagaaggcagcaggtccttcgagaggcgagaagaagacggagaggagcttggacgggggaagaagaatgggccgaagaacagaagagagaaagagaagaaaccgaagagagaaagcgacgaaggggggaagaagaaaggaagcgaggagaacgagagagaagcgttcgacgtcaagtgcgagtgatacaagtcatgaaaggcggcgcgtgaatttctagaaacaaatctgtcaacagctcttgatgtaagctggaaggagtcaccttgaaggctcggcatccacctccatttcgtcgaccccctcgctccgcctttctctttgaatttagtttcttccttgatttctctgttttcacgcggccttcttagcgcgcgtccttctccgtgtgttcctgatcttctcctgcgtccgttgcgttccttcgcttctcttcttctccgctctctctctcgtctctgctgcggctcagaggctgttgcgcgaggtgactccgtctgcagctcttcagagaaggcaacaggccgcctcgacggaagaggcgagggaagagggaagtcgagaaacggagctgcaggagaaggaagaggagttgtgaagcggcaagagaaagaagagagagaagagaaagagaagagtgaagagagaggaaaaagcagggcgttcagaagacgcaagacgcacacagagagcggtccacccaagaaaaactccgcaaggagacgaagacaaggaagacaaaggagaagagaagaaaggacaagaagaggaaacgacagatcctgtttagggaaagtcgagtcgcccctgcgtctccagtggaggaacagcgggaagtcgcctgcagacgcagaaagcagatttttgtcgacgactctcacctaagcaacagtgaagaaggcaagtttccttctttgttgaaggtctgaacaacgataggccgctccctttttctgcacgagctcttgtttcttgacgttcagcggtgagagtggaggaaaaaggagctggaggacgcccgcgtcgtcttcgacagctcgaagaaaaaaaagagacgcggacgtcagacactagccaacgagcgcgagaagcaaggggagaaccgaggcaacgacgctgccggagggaaatcgaagcgcaggcagatgcgaagaggcacgctgccgaatacactggagagccagacgagtcgacagcggcctttcgcttcttcagcctggaaacagaaaagttctcgtcgcggacagatgcttttgaggtgagcaaggaactcgtcttccgaccggaaagagtcaaaaatcacggaaagaaaaggaaaaggcgcggcttgtcactctcccccagcgcgaatcgcagaagactgcatgcagtcgcgctgaaaaaaatcgacttcggagacagatgcgggacaggaagaaaaacgagatcagacgcggtgtctcgcagaacgtcaacaagaggaaaagagacttgcgaaaggaaatgtttcttctgaagaggttctccctcgaatattgcctgccctgttcctctccctctcctcttctcgcctctcaagtccctgcgtcgcagtcaccgaccgcgttgagtccccaactgcactgtcgccgctcttttccctctccgcgaaatcgctctaaaacctccggcatttctttctttctgagtcttctcaacgagcttctgctctctcccgtttctccctcgctctgctagttctcctttatctcccctctgttttctcttcttgactcttcctcctcttctctctcgtttctttcacttccccttgttctctgccgccatcttcctcttctcgcgttctcgctcttcaactctggacctcttttccgtttgctctcagcttccttccccgtcgctggcctccgcctctcttctctctccctctcgtttccttctcgccggctgagagagttccttctcgcaa

SEQ ID NO: 3455 - DNA, 2762 bp, Toxoplasma gondii
  source 1..2762: mol_type = genomic DNA
gaaataagatgcccaccacacgaatgtacggttctgcatgtacgttgccgcgagttggaacgctggctcctcctgtgtatccgccgtatcgacactcgcgtgttcccctggatagggtccccaagtttcaaacgggtccaaaacaccgggggacgtcctgattgtctggaggtggcgggaaccgaaaaccgtctggcagcaggaattgcttccataaggtgataaagaaaagtggacaccaatcgggccctcgaaaagccgtgatctgtcccattcgctaagatcaacctcgtctgcctctgtggacggcttgcaatctcgcattgcttgtgcttttgtcgcgctgcaggatacccagtccagagaaggcctttcagcagcctggagcttcagtctctccatcctggctgccgctgccttcgacagaacatgctcccagggttcgccaaacccactgagagcagtcagagctgtaccaggccaccctcccaagatccactccgtatcgaatccgccctctccagaaaaccacgtttgatgcttagccagtgcatatgttcggtcgctgcgaccacggccaaaaaagctcgccgcgtctccacgagaattcagcaccgactgcaaccgtagtgcccgacagagtgcgaggattctcaccgcgaaatacaggtatacaaccaaaaggacgcagcaaatgaatgatgtggttgacaggcaggtacccacaactagcctcgtccacggagcgagaaactctgaaacgaatggggcgtgcattttcgctgaggcagcgagcgctgaaaaaaagtctttgttgctctccgcttggtttgataggttgctttcgtcggcggcaacctcaacgggctgctcggcggggacgaatctcctggtagcatttttgagggaggtacggtgctcggcctcgtaaaagccatacgccctttgtggtttcaaatgggcgccgccccccactgcggaaatctggtatacctgttcatgagcctcgtggttgctcccatctcgtgaagacttaccagagggccgactcgtctcagcagtcagctcgcgagcgccatgcaaggtgaggccttccttgttcggtgaggtgaaacggttcctaatcaaatgtgtcagcgtcttgcgcctttggttcccgacgtcttgatccaatactctcttcggatcgcctctagtagaaaccgattcactttcactcctgcccagcagcaagagagaggcctcggacccagctcgtctccgctgggggcctgaatgaacaccgtctacatgggtggcagtcggaggagcgtgatcttcagctgaagaactggtattgatagtttcttcaaaaaaactggttggacgcgactgacggacacggtaactcaacgaggccacgtcaaatgtggccccctctcgctgaggtattttccttgtgaattcagcaggtctcgcgagggcaagaggtccgggggtgaagacggatgataagaaagccagtagaagtgccagaaagatatgaaaaccaatccgtgtcaggagcgattgagtccctaggcctgtgctgcgaaacacgccgcggctgctaggttcttgctcactgcccggcgttcgagacaccatcatgaccgcgtagggagaccatcacgtctccgaaaagtgaacgacggccctcccgcaaatatgacacttttcttgtcaggttacggaaacggagcctctctgtttcctcgtgaaaagctctgccccacggagaagacaagcccagtcgaagctagcgtgggtgggtcacgtccatactagctgggcctgcgaatgagctccgcgtcggaggcggtgtcccggacaaacatatttcaaaggtcggaagataaccgcagctgacagggccgattgaagaactttcaaccaaacgtttgacacgagtgctgaacaaagaatgcagatggactcgggcgcagaaggaagaagagaaacagacacacgcacgcaggtcgcttcacgtagctgtcttgactcgccagacgagtgcgctcttcatcctcgcccgtaaacgcgatctccactccccccggttttttctgcatgtgtgcggcagaaatttgaggggggcgccacgcgaaagtcttgggacggaagatcttggacacatgtgacaaggtttttttgcggcggtcaacatctttccagaactgcggaacattctagaaaagggtttctctgccatgtgtgcgaagaaacctggtggtgaacatcagaatcgcggacgttgttccggccactcgctcttcacccattgctggcttcaccgcgcttcgatcgaaaaaaaaagtgacgagtagaaaccctgaagcggaatctgtgcttctttggtgtacggatacgggcggttgactcgcagtcgccacaggtgccagcgttgtgatcgtgttcgtaggcgggcggttgaggatgagacgcaacgggggcactgcatgagaggagggtgagagggtcggcaccaagagctccgtatatattttcgacggtcatcatggaaagtccgcaaagtgaagaaggggacagagaagggagcgggtgtctggacgggaaagaaacatttccgaagaatgtaaaaggtggtgacacaggggccgccattttgaagcccgccttccccagtgagtatgcattttacaggtcgctccatgaacgctatctgcttcacctcaatgatgacccattttcactcgaggcgtttctgacgcagcatttgaaga

SEQ ID NO: 3456 - DNA, 3230 bp, Toxoplasma gondii
  source 1..3230: mol_type = genomic DNA
ggagggttttgacatttctcgttcaggatgcagaaactgttcaggacgctgctgctgcagttcctcactcttgcgtcgttggtgttttgaggtttagttctggaaaacgggcattgaatctgacccgcagttcagccacgtgctgctgaagtcagacaattagtgttgagtttgattttttttgtatcaggggcgtttcggaagtgatgtctttcagtcgcctatataaatctagtaacgctggtcaaggtccttgaatctaggtggctcaccgaattcctacgatcagaccgaaggaggtcacttgtcttctgtgcagacacggattccattttgtgaaacgtagaactgcaatccttgcagggcgtctgcacgagaagacggcggggaaccctgtaagtggcattcgaaaacacacacaaacgcgtctttctgtagacgcatatccggttacgacgtaccacaggcatttcaacgtcaccgagagtgctggttctttcccttgtagctctcgccgtctacgcaaaaaacgtaggacagtcattcatctgctgagctaggggttgcaccgaaaactgcgtgtcaaagtggcacagcggttgaagccaacagtagaatgcacgtgaacataaaatcagctgcattcaagtggaataagttctgttaagtgagcatcatttcctctacagatttcagttgttttccgctcatattcccgcagcggctttctctgctcgctggccagcctgagcgagtctagatgcaaacagtaaaagtctgtcttaacagtgctgcgagtttgtgaagcgcctgcgtcgttcgtttcctgaaaacagaaaggacgttcatctttcacgtgtttcacttcttttggtgggcacggtaacagtagcactattcggtgattctacgtactctgcagatacgggttagactacaggtttagggcttgaaggtctttgcttcccaaaccgatgtactatcgtgttctgcatgaccacgtgaagtgcattaaatagcgtgagtggtcatctctgagacaagatggtttaaaagctttttattgagaaggtagatactacgagttaatctggtttagatcttggtggtctttgtttaccggatcaaaaccctatttgcatgaccatcatgtggggtaccacagcgaaacgaactggatggagaaagtacaccatatgaatcgcggattttgatgtcaacgaatttcgagttttgtctgcgaacgtagaatttggtcctttatccctgggaggagctcgataaaaaactgcacaaaccggataagttcgtgtgggacacgttttagtcactatctttgttttcgtatatcggacgaaaggaggttttgtggccaagatgtcgcaatgttttctgtcgcgtcgaaacgcttcgtctgtgtattggcgactcagctgcagttcggtctcggaaggaatgtggcgcatgagctccgaaacaactgtcagttcggggtgcggtttcagttcttgtcttttactaatttctttagcaagccaactagcccatacagaaagaccatcgaccgtaaccgcgccgcattatgcggcggttctggccgacacatggtgaatgcgtacgtgtgcctctcatgagaccacacgaaatccgtcagtttctctgctttcttgccagttatccacaagcaagacgcgtggcctctcaactccttccgttcattgtggtttttccgggcgctctcactgcacagctgtgggcgctcgttgtgtgccccctctcgccgttagtcagggggaccgcgatgtaccgaagtgcatctgttttcttggatctgtcctcttctcgtgtccttttctgtgttagcagcacttctccgcagcggcaagaactttccgttcatacttaagtcgctggccattcgccgcagacaggcttttgaaatactgacttcgtagtcactcaaccaggaggtggcttgggcacaaggaccagccaaggattgtgcccgccgcttcttgaagccctattttgcgagttcttcccctcttcctttacggaaaagaggtcttccccatccgatacagtgaggacattccttgttctgagtctcggaaagtgatggcaatttctgcattcgaggtgactagcggacggttggcggtgccttcttatcgcggtttgtgctgcgcgagtcttaccggctcgcggcggctgggcacggatatggcagaaaaccgcatttcgtccgcatcatacatgacaggttccatgttttctctgccgcgtatccttgcgtcctcatgattgcaatacgcgcgatgattcctcggaatggtgtcgacgcatcccgtcccgtgccgccgctctgttgtctgcctcggtccctgtcgagcatcgagctgtcgagcgtttttctccgatgcgttgcttgggcaaacagacacggtcaagttaccatgcacagaacgctccacacgtgagagcatggactgatgtagctggactttcaagaggaacgttgatgcgtcttccgcgagccaaggacgttgtgttgctttcctgagtttaaacccagagtcgacgtgtgaggggcgcgtaaacccagcagcgcctgcttgcccaaatcggtcgtcaaatgaaaaaaaaaatccaaatggcgaaacccggtgaataagtcagcgactgactgaacctgtttcgctgaagtcgaatccaggtgtatgtgcaccccctgcgttccttcgcaatttctcactgaatgaccatgccaccattgctcaagagaatgaggaccgctttgctcgcgggatggacatccaccttggcactttccgctaggtcgtttcatccgtatgtggttcgccgacggtgtctggcttcctaggaaaacggttttatgaccgtatatgcctatcaggctagctgtgtctgagtccacgggtggtttccgccttcggacccgaaaaattggttgacggtttcggtgaagaccaccgcgagaatcaagctgtttggatcaccggataactaccgtctttttgcgcttcgtgaattcgtggttctcgcctggcaaggcgataagcctgaatgttgagcaggggatcagctgtcgctccggcggccccccgcctgccgaggacttggtataacaagcaaaaggacatctccagcgaacctcacggcgttgttctctttcgttacaccggaagatcgcgcttaccatttcaaca

SEQ ID NO: 3457 - DNA, 2974 bp, Toxoplasma gondii
  source 1..2974: mol_type = genomic DNA
gttcccttgttgacgaggttgaaggagaacaagactcggctttcgtctccatagggatgaccacaacctttcgccgaggccttgcagctgcggtgtacgtacacctcgcgtctctcgcggagggtcggagccgccatggttcgcgctgactccctcccggttggagacggtggaaactccccgaggaaaggaagcagttcgactctgagttagctgccggaacccagcccccagaaggccagacagaagcagccgcagacgaaagcgggggcgaactggtgagggagaagtagatcgaaggaccgggggcagatacgcgtgcgacgaaactcgccgccgacgcaaaagcagagctccgttgggatgaagaagacggacgagacaggggagaccgagaagcttcgcataatctccagacagaaaaacgaacagaaggagcaaatccaggtggtcgacaactcgcgacggcttggccgcatgcaagtgactcgctggctagcagggcataccgcggacgacgaggagacagagagagtggcgaggcagagcacgaggcagtggggaaggactgggcagagaaggacagatcagagacaggagggcctcggtttacgtgcgacgacaagggagcagaagagttcggtgcttcagtccagaaaggcgacggctgagaagcgacgagtctcgaggaggcctgacaatgtgaggcataagaggcagacgacgaagagaagaaggacgcggacagaggacacactggctttaccgacgaagaaaacaaggctgccagagacaccccagaggagtggcttcgtgagaaactgtggccgccggcatctcgcagactcgaagcgctaccgaatgcggacgaagagattgctccgcaggcgcccgaccccgaagaagcagcaagacgacgaggagagactcgagagactggcgccatggctagacgcaaagaaaacagaaatacagtgggagtcccagtgtttacttgctgccacttgtaatcgagtgcaaatcaggcctggagtcatgcgcgcctctgctcatctgtacatacaccccaacctggctgcggtgtatgtccacctcaacttgattcgcctgtgctgttgatgccgacgcagtcccacttgcaaatacatctccctcgacacctgtcatcagcggcattccacgtgaacttgcgttctgagtcatgtacacctcacgaactgtcgagggtaccaaaacctgataaaaacatctgatcttgcttcaggcatgcgtccacccgcactgactgcgtcgaccaagttttttgaatggcttgtcgattcagtctgaactagcgcgctgaagaggtgtctctacacagtgggcgcgccacaggcgacgaagactgtttctcccattttctccaccaagcgaatgacggaggcgacgaaacttccaccggggacctgctgcttcacctccctgtctccgccgaggcgtccctcttgcccggcgctcttctgttcagagagtcaaattgcctgcatcgagatccgataaatgctgcagattcccctccccggcctcccttcttctgctctttggcgctgctctctcctctgcgccttctcctccggcagtgcagaagcactgcagaagaaaagaactatacctgtcgaagaagacggggcggaagaattttgtctgattgctctctttcttgtgggaagggtgtctgcgaggcagacgagagagtggggcgaaaaagggagaggaagaaaccaagaagccagcctacgagagagagaaacgaaacgaagaaaagtctcgactccgggcgagtcaatcccgttttcacctacgtctgcttcgcgcggagagacacaacgcgtgcaatcttgtcgcagcttgagtcgacagcggccaaggcgtcccctctgcagacgcgcatcgcgtaaaccttggcaatctgctcgtcctcgctctctctctcctgcccctcttcttcaaaaccagggagaaaaatgtcaagaaaattggaaaacgctgaagaagattcgcttttacctcagcagacgcacacgcaaccacgctggagaagctgtagacgcaggccgagagaggcgctgcagcgcggaactgcttgccttggccacggcactgggagaaagaagtaaccggttaccgagcttccgttttttattcctggagccatcttctctgcagactgagactgaaacgggtgtttttctaccgtactcggattctctggggtctgttatctcgcgccgggtctcctcggcgaacagcgaggtgtctctacacctcggcgccgagcagctgaagatgtgcgcgcgttcgcccgcccttcgtgtctccacactgttcgctgttctctctcttctttcgttgtttctcgttctgtcctggcgtcaacttcttcagtttcttcgtccgaggagcagatctcctacttgtttccacgatttctcttcttccacccaaccagtgtcagctgtttctgcgagggaaccgcggctaaggatacacctgagcgggtggcgagacaggggcctttgcacacgcggcggaaagtcgtcgcactcctggtttctctgttggttgccgttttttctgtgaagacgttctccggccctcttcttctttttccttcgtcttcccgcggttcctgcctaccttttttcgcgtctgcaagtcccaagagtaaagttagatctgagctcggcgcctgccacgaaaaataaaccgccgccgttggaaattcctcgagcttctcccaaacaaaagtctcgcagccttcgcccggacgttggagtcctggagtgtacatacaccggccggcgggtcgagtcctcgtctcggaaacctgcgggagcctcgcgagtcgctgtccccgccgctctgcgaggaagttctttctgcatctctttcctgactttctcgttggtttcttctgcttttgtcaacgccacca

SEQ ID NO: 3458 - DNA, 1617 bp, Toxoplasma gondii
  source 1..1617: mol_type = genomic DNA
ctttctatcctcgcagacgttctcttctctctgcgttcctcactttatctccccttgctcggcttctgctgttcccgtggtgggcaaggaatcctccgcgtatccggtgtattctccctcgcgggccgtccagagcctttctgtcggcaaccgactcgctctttctcccagagacgatacgcctcagagccgattccgtgtcgtcttctctctagagacggagacagtatgagtggggacaagctgtgctcgtgcctcctctcagatccacttttggaaaaaaaggaaaaggtgctggcagacagtgcagaagaaacccggcgagaaagaaagcgcgaatagggtctcgttctgagaagtcggggacccgaaggagacggttcctccgtctctgtgttttacatttccagcaaccaaatcagcgaaaacgcattcagcaagcctatacacattgcgcagttgtaaacctacatggcgtgctcgaatacacacgaagcctcgcagaaggtcattccctcaccaacacatgcatgtacacatttagagatgcatgtatatttatacatatgcatatgaatatgcggctaaagaaaaagtgcgatgcatgtaccgccgtgctcgggttcctgcactcgagaatctatgcattcatctccgcatttcatacggcgggggtccctggtggagcaacaggctgttaacatagttgggctgtatcgaggttctgcgggtcattcttccgtgaggcagccgaaccgcagacaacttcagctttaacatcaaagggcatgcagtctctgcttcgaacattcatttgtgtcacgggcgccaaaggctgtctgcggcgagggcgctgagcagccctggtcgcagtttgcattcgagggaaggtacgggagaaaaggtagcgcctgggggcagagcgacgaaggctggccctgatggccagagacaggtcagacacgcagaagcactgggaagcgcgcggcggggaagtcgctgttcaccgggtctccaaatcaacattgtcttttacggcggaagaaagaagcgattcaccgaagcgagccaaaaaaaggcttttcgagtcactggtgtgcaggtccggccgaccggaaagctcaggtgtatgtacacctgaactttcctggtgtctgtcgagccgaaatctcgggtgtacattcacctcatgtggcgtcgcctggcaagacaagaaggctcgcgggcagggcggaggcagaaaagagcctttcctgcggctaaaacagattcgccaagcgtcgtagaccggaagggccacgtttcgcgtccaactggcggtgcgtggaggcgctggacttttttcggcagtgaaaaccgacacgacgcacgcagcgggctcgccgctctcgaggggaccctctacgtacaaggcgcaggggggcggcattcgcggcgaaaagccgcagaaactggagttctgcgacgacaatcgcgggaggtttcggcagttggggtcgcgagacagtcgtaggaggagaacgaagaaagaatttcttgcgcgaggtcgttcgactcgccgtggctcgcgtgcggtcgttgcgggactggaagacagagagagagcaacacagaaga

SEQ ID NO: 3459 - DNA, 3746 bp, Toxoplasma gondii
  source 1..3746: mol_type = genomic DNA
caaccagcttggagatgcgcttccacgcaatcccggaacctcctgcgcggggtggaggtacagttcggaggtctcgctgctccttaaatcgcttggcagccgacccagtgttcggtccttttcttccaggagtagttctcgccgtccttcggtgcttttggtgttcgccccgattccatcttctttgcgggtgtcttcctcagaaactgacggacggggatacgcaagagacacagtttcgtcgtcatccagaatcgtcccgacagacacccgttgcccgcagacagggaagccgtcggtcgcgcatccagcttccgtctgcagaatagacgccgagaaaaaaacgctcgacacggcgtcctctccgtccccatccccccttcgcgttctctcctgacgtctctccagagtcctctccaggtccgtcaacatcctctgttttgcacactgctccttccccgcctctgggtgcgtctgaagcaccagcgctccgtgcggctcgcggcgcggcacgctgctgccgaagacctccgcgtttttcttctctgcctccttgcaaacaccgctcgccacagttatcgattcagttcctcgtctctcgagatggtggcggacgcttccgcctctctgaaggaacctggtttcttccctgaccaaccacgcctcgcggaccttggggtcctctgctgtggggcatccgcctgcggccttcgcgtgactcgccttctcgtcagagctgccgtcgccgaagagcgctttcccttttttctcgcgaacctctctgtcctgtggagaagccttcggcatgtgagcgggactgtcgtcgtttggttgtgtttgtgcctcgtctccatgcatcttttctgatctctgcagaagtccacgttcgtcacgacagctgtaactcacccccctgctgaactgctggagacaggtagaagaagtcggcggagaaggaagtttcacagagacgaacgtctcctccgcgagaaggtcagctgctgcaaacctgttgacagcgagacggtcagtccgagcagcgacgcccgctgcacattcctgatctgtgcttcttgcgtggaaagactcgcagcgacacccggagacgacggagtgtccggggtcttctgaccagggtgcatctgaagaaaatcgaggctgcgcatgcatgcccacgctcccgtcgagttttatctggattccgtcttcgccttcgcccgcgcagaaggaagatggtagaggaaacgcgacagcgacggatggggtgctcgaggtggagagggagctggagagacgacgctcacgggaagaaggcccgccggtgacatcacggcctggagagagtgtcttgtcaccggagaaatccgcattgttaagtgacaaagaacaaccgccatccaccctcggttcaccctgtccgggtggagttggcaagtccgacatgaccagcgttcaagtggatagaggcacagcgagatagatgaagagagagaggcaaagacagaaggagaaagagacactgagagaaagagaaagagagaggatactgtaagatggtgaggaaggagaaaaagctaggcaaacgggagaggcaagaaggacatgcagttctgctcgcggtggaaagcctcagagaaacagaaaagacccaccagagtatcgccaggaagccgcagtttctcgagagataggaactgaaaccttgtacgagggacaaggaagcagcttgaatcaattagagactgttagaggtgaagcgaaggtgaggaagaaggtctttctctgagaaaacggagcgcgagtgtaccattttttgccagaggttgcgtcaccagtaagcctatttgcacagaaaggaaaatcgactcatgtgaagcagagaagggggaatactgtttatctcagagcaccgaagggataagatagacgtggaaagagaaacgtaatgattttgacagtggcgttgacgacgaggcttctccgcgtggttcgttagtcagttgtccgtacaccggcgccagtttctgtttcgaacaggcgcagcagtccgtggactagacgggaaacgcgtagggttttcgaattcgactaacaggaacaactgagagctccgtgttgaggcgaacaacaagaagagacatgcaaaaaaacgtcaaaaatatgcgccagagcctccattgagtgacacgcaagatttgcgggcgccgtgacacccctcaaattgaccaaagcagcgacgcacacgggtttacggtgtacgccttccgaaattaaaactccgaaatcgatcccgtttatctccaaagactgcaggagcaatacacacaaggagcgacaaaaaagccgcgtttccctcggaagctagcgagtcggccgcgcaggtcacccaggcttcttgttgtctctcatgttttctgagcgaggaaaaatagagacttcctttctgccgactcggaggaatctcgaagattcagagagacactcagaagaggaagcaacgcaaatatctcttttctggagtatggaacaagaaggtagtctctatttagcgcgtccatcctccgcctttgtctcgtagatcgcacactggcgagacaagcgcaaaggtgactccaccctcggtcaagcgtttccgactttcctcagcgtcaacgaaagtggaggctctcccggctgtgacggacgccgatttccagggaaagaggaaaatcccaagagagtgagagaacgaaagttcgacttgcgcctgaatccgcgccgttgtgggcagccgagaaagttcagttctcccgtttcctttgtctcttgtttgagagacacgcagagagggaaaggacttggaaaaacaggaattcgagaggaatcaagccacgtggattcttaatccttccttccagggacggcccactctgtgaaggtgttacatctgttgattgtgtccgtcttcgttttcgatttctttatggtaactgttacacagatgcgtctggtggagaccgacgccgggtcgattcgtgatatgtgctttaggatttttgtgcagaaggcaaacatgtgtatctttgttgctgctcagagagatagaagtgcctctagaaaaggtcccgggaaggctgtgtgcggctgtctcctctgtcaagactctttggtccgtccatcgccttgtgtgtcggggacagaaaggagtcaacgcccttttaaacgttgaaatgcccggagttttcccctcttcgttgcaaatcaaatgccgtcttcgtcgtccttcccattggtgtctctctctctgcgggaagccgcgagcatcccttcgccgcccagttctgtgtccatcgcagccgttaagataaccgccctctcgtaggcatgtctttccctccgtcgtccccggagactccttcgggtgcattgtcgattcgtcagaatcgtgaactttggcgaaaaaactgaaaaatttagactaagactctatcttttcgtccgtggtgccttcgcggatcctctgtctccgtcgctcccactgcctccgacaatccccgtgtgtctcaagtctttctctctttctatcgtccctcgtctctgttcttgtttcactattcttgtctgcctcttcgtccttctttcttcgggggtgtttctcttttcgtgtttccatctcgcgtttgtctgtaactaccgccgttctctcagacgggagtcgttctcttcttgctccggtcgcacaacgcacatttttttggcgaacacaa

SEQ ID NO: 3460 - DNA, 2564 bp, Toxoplasma gondii
  source 1..2564: mol_type = genomic DNA
aaaaacacagactgactacgaaggcagcacgacaagaatgcacagatggagcttggggacggggtcaaaaaacaggctgcagaggaccgaccttcctcggctttttggatcgacaagaaaacaacaaacatatcacaacggccgcagctctcccatgtcaccgcagaccgcggagttggtatgctttacttctgcagttgctgttgccagagagacgaacgctgagatactgccatttcacaagtcgtcgcagcgattcaggtttgaagcaggcgcctccgctcctacagcgcgagtgaatctggaaacctgaagctgcgactgtgactccctctccatcttcgacagctgctttctaaacagctgacagcaactcgagttctttgcttgacgggaagcgaccactacctttcagaaatgtgctttcaacgcattctttccgaatccgtacagttcgcttcgcagtcgtcaagtcacgtcttccctaaacgtttctccacagctcgacgacactggtgcctgccgtcaaaaggaactgagagttgcggtgttagaccagcagataccactactcgaaagcacttgtctcgaattctcgtctgctctcgagcgagctgacagacagctacagatcgctagaaacctggcaagctctcgcgacaggtgagctttcccgcgctgctgttcgcaaagaagagtaggcagaggtgcgtcagctcgtttctctgcttttccactttgggactcggagtcaccagttcggacatctttgttttgtctgcgacttcgcttggccgcagcgtgggcttcccgacagagaacagccggttgacctgcccctgtgtcgaaacgcatctttgtgtccagtgcttgaagagcggctgctgctcctgagactcgcgcgccgtggtttcgcgcatacagtcgctgcctctcagagctgttcgcttccaaaacgcaatttcacggtgctttgtttcttctttttgttcgggaccgccgtccgcaccccgtcagcctgttcgcgagaaacgcctcgcgcaacctcggactggctgcacattcgcactgagatccgacggcttttccagctttcgtccttcacacaagtccctacggcagggttcacacatgaaacttgcggttcgatgcctcttcagtgtttgacgaaaaaaagagtgccgagtttcgaactcaggagcagctggggcgttttttctctccgttcgctcggtgcattgtgttcaccgccgctcgggtcgcaaggcttttcgagtgggattgctttctcgtcgtgctcgtgtgaacaaacgaaagcaatcgatggagcgcggcagcgatgcggctccggagccagttgctcttcgctcgattcttcgtttttcggggggtctgtcgatcacagcaacttgctttgtcgaagcatcccgtcagacagttgcttcgcgacgcgtcgcgcaaaagaccctgttctctctcaggacttcaaggaggagttcggagaattccactccccgaaaaaagaagaagttaggactcgacgccccagtgccttgagaacaagccatcgccagggcaggtccctccagctgcgacctctgtggggggatctctcgatggtcgtctttttcgccagccgcgttgactgcgcgcgcggggtcgcgggtgcttctcggtgtctgacgttcgacgtttttcttccgtgtcactgaagaagttccgagttccctctgcgttctgcacattcaactcttctttcgtccttctttcaaagaagagaagcgactctagcatgtctccttctcagccactctcactctctccctgcgagcgtctccccgaacgagcgaaaaacgccgcgttgtgcctcgcgcgtgtgtctcctcgactcttctctccccacttgcttgctgcgcgattccgctgcgcggctgctgttctccgtccctgctttcgcatctttgcttgtcttttttcgcggaggcgcgcatgcagttcttcgccggttctcccactctcgcccgctgattttctcgctcctcgctgcagctgcctgaacacacggcgcgaaattgatcactgcggaggcagcgtcgaggatctcgtggacagtgtgtgacgcgtccagttctcggctcgcgcgttcctctcttcgtcggtcgaattctcccgcaagaagaaaagccgttcggtcgacggcaaaacactgctaaaaatcgcaggaagaagcctctctcctccagctctctgcgcgactctccgcatccttcgtcttggaaatccgagcacacagctgacctgcacagcgaaaaagatctcgcgcttcgaactcatctcccgcttcatctccaagctcccgaaaagtctccgtcgtcttcagtctccgctcaccatcccggtcttccccgcgtttctctctcttcgtcttcggagactgcgctgtcccctccgcatcgcctctctcttttcggtcgtcgcttctggtccttctggtccttctggtccttctgttccttctgttccttcttcccccgcgatttttttgcttcttctcgttcgcgaaa

SEQ ID NO: 3461 - DNA, 1443 bp, Toxoplasma gondii
  source 1..1443: mol_type = genomic DNA
actgacaattcttcaggaaaacgcgccaggaaaatggattcagaggggcttagacaatgcagcgaaacgaatgcgtcttgtggactggtggaaaaagtcgatttctgtttgcagatacatgtaacacttgtctgagtctcatctccagtttagaaatacggacgcaagacccagacagtgaagacactcgatcgcttaccgtagaacttgattttgtcatacagctgttttcgcttcaccaggaagcgcttgcgtttctcatttttcttttggtgaagggcgacactgtcgagggaggtgatctcctcttctagacggctcacgacttccggcggcagttcctggaggcagcaatgaaaaaaaagactgtcttgaagttcggcaaacggaggtggaggcatgtagccgctaaacagctgcccacacctgtgtctctaggagaaatgagaggagttttgaggcagccaacgccactggtgttcctgttgcgcacctctcgcttcttctgcaagagtcgtcttagatctcgcgcctttgccttggctgtcttgttcctgactttcttatctgccgcgtcttgtttggtaactccattcacttttcccctgaagaactttccgcgtttcatgctgtcgctcggacctcgggggcccccgctagcaatttgaggatgacccatttgaaatcgcctcttttctgagattgaggaacgaaacctcctcaagccggtatcactagcaaaaggctttagccgactaatcgaactggaatgctgatggtctttgaatttcgatacgtccgggctctttcgagactggtccaacaccttgtgcatgcagactcggggttcgttgcagaaatgtgaagaggcaatggcgtgtgaacaactgcagcgcgcccctccgactgagtcaccttcgaacgataaaggccacgaggaaaatatggatagcgacacacgccaaatgcatcagaaactagggctgaaaaaggcgtcttgcacagtaagcggccgcgcattttcactgtttcgctgcatgtacttgtcgcatgcagaagcactcgacgacgttcagctcccttggcttcacacattctacggtagactgtacgctcgcaagtaggatctcggtattttttacctttgatcaataattaagtcaagcctttacagttgtgcagtccacttttcagaaatctggccatgcttccttctgaagtgagcctggggtaaactctcggcatcgggtatgcggcctgtgcgctgttcagccgggcagaagaacagcgtttgggccggtctttgacgatgctacacaactgtgtcattcgcgagtttcatatgcagtgtttcactcattcatggtgcctttcgtcgattttttttgagcttgcgtgtcagcaaagttgtgcccccaattcttcaatgcggtcgagctccaa

SEQ ID NO: 3462 - DNA, 4649 bp, Toxoplasma gondii
  source 1..4649: mol_type = genomic DNA
atttctccacacctctggataccttgatataacctgttagatgttggtaggacgccgcgtaggatattgaaatccaaaactgtcagctctcttaagaagcagtccaggcggctggtggtgtgcttgctgtagtcatcaagaacttgactgtcggtatttcataactggagccgccgactggaggtggtttctgttatcgtcccgcctgcgcagattggaagcaatgcgcactctagctcgtgatttctacaattgctctgaaacagtgctatcagggatcatttctgcacacagggaacacgaaagaaacagagaatacagctagttcgtggcaagtgtagcaggcatgccaaaagacctctaggttcgacgccgagcagcatccacgataaaatttactggtagattttttgtgttggtggaaacagctttctggcgcggtcgtgagtgtataattggcgtccaagatttccacgtcatactaccagccttctattctcacgtgaacacacgagaaaaaccagggaagtatcattcgcagatgttgtcacaccatgccctgttcgttagtctgtcagcggagacagcgatgggcgtgttacgccgagtttcaggatcctaggcgacagtatgctatatcaagatatattattgtttttcggaccagaagcgtatattcgaatcttacgtggcttctgcctctgttcccatttcaccagatgcgcttcagaaaagctgaagagagccgattttgtgtttaaaccgtgaatcaacatcacggtgcagcccttccgagctcatactcagatccaatttttgcaatggggagtctgcgaatgccggtctagcggttttctgaggacggacggacagtgaagcaaacgacttgtgagcttcacctggtctgcttctagcaacagaagtgttctgttagactgaaacgaaggtgtcgcttgtcccccgtttacttgcacatattatcgatagatatcagtgtccgtccctcggctccatgtttgcaacaccaaacccgcagggtgtcgggcgaagaaaaactccgttctcagccgggggttgttgcgccgcgtctttctgctttttggttttgcagacaataggaaacaagaaacttacttgcagcgataacactttctacgcacactgctacgcaggagccgggtggtggcgaatccatccctacggcagctctcttggaagcagctgctcccttgttgtcttgattttcttctctgttgcagtcagcatctaggtatgccacatttacctctctacagttttctaaaaaaacgcttgcctcactaggacaaaaacttttaatggtttgcggcatcttttgaaaacgtgctcgtgatgtgcatgcgtccgttcgagagaaacgttgcgacacggaggaagagtcctgtgcgcctttccagcttgtggttccgcattcagacagggtgagaaagtcgcttcctctcgtgcattgtttgaacttttccattgccgtctctttgtttgtcttttctgcgacctctgttaccatttcctagcctcgacttcgccatggatgttttccggtccttctggaaccggcggggtgcggccccggggggcgccgccaccagctcaggtcgtcccgcgggatgccgcgaggagaactcgtcggttttgctgcagtctctgaaggctaactctcagcagaaaaagggtgaaacgcctctgcagaatgtggccgctgcggactacgtgacgccccagaaatacctcgatgacccggacaaaattcccacctactacgtgttccagtctaacatggtgacagatgaggatctgttgccgggaatgctccgcaatttggaagtcgacaaacgcctgactttgccgacgcgtacgcacattcgctttcttattaccgccacagacgtcattcactcctgggctgtgcctgcgctaggcatcaaggctgacgccatcccgggtaggctgcagcgaatcaacactttcatccagagagaaggcgttttctatggacagtgctcagagctctgtggagcgctccacgggttcatgcccatcgtcatcgaagccgtgagccccgaaacctacgcggcgcatgcaaagaagtggtacaaagactgagaactggtattcaagtggcagctcggacactcgtgaacgaccaggccagaaagtgataatcggtcccacattccgcacaattgtgtcctgtcgtctctggttagagcacaaaactcttatgtggagtgagaaatgcgcgaggaaggagggcaagcccgcgaggacgtgggtgcacacgaccaggcaactcttgttgaaaaacagcattcaaagaaaaatcctccgatttcgcggtgaccattcgttctgtggtaaagtggccagattgagacggtgtggtgtctcatggagaagccctgcgggagggcttccaatgtctccagtccgtagcaagctatgatgggatgaccgcgacagctagtcacgagggttcaacctcctcagtggagtcttgaacaaagagagatcggaaaagatcagcaggaaacaacaaatagttgcatcgcaacgttgggatgaacggcttgcgaaaactgctacgacgtttcatagacgcgctttttccgggctctggaagtaacatgttctgcaaagcacgtgcaggattttcttcgcgtgtctcctttgctgttgaacgttgtctcggtccgtccggttcattgtttgcgtgcgctgcttatccacgtttctccttagtacacaaatatcgcgcatctgggaaatacctttgttgaagacactcaattacttctgccaatgtgatggcaagccctgaagaaggacggccatttgaggacacgtggtagactctcacatattcttcactacatttcttcacagcttggtatgtcaagtagcccaagtgtggtgcccagccaaacggcgttcttcccggtcgtctctgcgtcctccgactaccacataggaaatgcgaaacagtgacgcttgacacgacccgcagagcgtgtattctatcggggggatgctgtggcagaaaacagcgggagatcagctggctccgagcacccgtcagacgcttgagcacttcaggatgtctcgtagcgtgctaatttggataaattagagacttctgtagagctagatgctcaaattttgggggagttgtcggtgaggcgctaacactaaaccagaaggggtcgggatctactgcactgcggcggcggccgtcgcgtcgactgcatctgcactttacgacctggagtttggctcaaggccacaaacgaaaactgaaggacagctttgttgcttatgctcggacagtagtcttctcatttagagagaacaagcgttatcacacgcttcgagaccccgtttctcaccgtctacaaaaattcgggtaggtgtaccgggtttccgtgaaacacgtgatcaactagagaacagtgtgccgctctttacaaacacactgggtgcgcctaccagaaaatccggagccatcttctccgcttacgaacatctgaggcgtaacgtcccttcgctggcaaagcagttggaattattaatccgtatataacaccaagaacgcaaccaatgtggcatgctcaccgacatctcctgcgtggaaactctggacgtttccggtaggaaggctttcaaagagccttcgctggtgtcactgtacggtgcactgcgtacgagaaaggctactctgtccactttttcttccacttttagtgtattcctttcgacgaccataattgccttcctcttacggtcggttctcggacacccaggaacgacctgagcctaaaagcgccgaggctgactacgttattggtaacgctcaggcggagttagtacagcgcggccacgaatgttttcattccatcaaagaagtatgcttcttctttcggaattttcgtcacacatacgttcacggttctgaatctggtgaatatgaacttgaatttcggttcgcgaatgcacggatgacaaggggaaacgcagcgacagtccggatgacctgagttactcggatgaatagtagatgcacttgtgccccacatttccgaagtacaaacgaatttgcccagtacttcaaggtgggtgtaaaaatgattgttctgtcattgtgagtcctgtcaaaagcaagaaaaaccttcctggattttctagttaactggctgcgaacgctgttgttgcttgcttcgaatacaaacagataaaccgtctggcacagttaagcgatctgtagatttcgctcgcaacatgataatgaagaaggcaattgacacctgctattcgagcttttacgctcagttgacatcgttcactcactctcttggcacaaaacagtcggtataatacctcgccgtggtgccatactcggagcgaatcaatgtttcggcgaaacaaaaggaactttggggagtgcatgcagagaagttacttcagtgctgaaagcccttgtctgttcttgggccccacctggactttgtaaactattctttttgtggggtacaaaacaagcaagcgcccgcggagatttgaagtccttcctgggtcctgatatttttcagaaggtgcagaggcgaagagaagaaaaa

SEQ ID NO: 3463 - DNA, 4506 bp, Toxoplasma gondii
  source 1..4506: mol_type = genomic DNA
acacatcagtgtttctctcgacagccatcctttcttcatattcagaaccatacatctaaatatttatatatgcatatgtatataaatgtatatatatatatatatatacatacacctggattagagggacgacactgaacagatgtttgtctgttcaagagtgcgttctagcacgctttgggtgtctctacaatctcgagtttttgtcctgcgtaaaaaagagtttgaactttttgcgttccctgaccctgcgcattctatgacacaagaccttgggccgtccgtcacgacagagtggttttctgcgtgtcttcgaaggtcccttttctgcttttgctgccttcttttggtgcacacactgtaagggaactccgcagctgttactctttgaaggatttgaggaagtttgagtgttgtgtcttgatagagtgaacagttcttgcagtccggccagtgccgcgtcatctgtcagagggaactgggccttacgttctgcacatgaggcagagcaaagtgaagccgctttccgttgtcgagcaggtgtgccagttcttgtcgggtgttttcttcgtcgtcacagagagccgagtgtccgccgatgaggcgggtcgggtccgacaggaaggaaaggtctgcaacgtaggccattgtggaaaccactgagagcggaaaaggggaaaggtgctcttaagaacgaagcggagttgctcgaggcaatttctttgcgggaaccagcgaaaaaactgggtggaaagacggaagaacggacggcggatgagacgaatacacacatgcactgctcacgggaccgaccaccaaaaaacgcgggcagcagccagacagaaaaaaagtgacgaacgagcacagagagacgggggtagattcaagagaataacgggaagaagggagaggcagaagaggtagaccgagacgaccgcgtatcaaaggaaagacagagaagcgctaacagcacgctcgagagccagcggaagacttacgacagtccactctggtggcctttgcatgcccgaaggggtcgaatcgaggaaacgtttctacggccgagaaattgtctgtttaacagctgttcacttcggtggcaactgagttgcagagcagacgggaaggaaagcaaacggagagaaagcgagtccaaagtgcgatgtgtggacatgccttgagagactcgtggtacttttgtctgtgcctgaagggacgtgcatgcgcccggcgcacacacgcatagcggaggtgtcctgccatcaacaaaaatgttttttatgatatcctaagtctctttgaagcttacatggctgtgtacgctccgttgcacaaaccagtctccactccattctcgcccgaagacaaaggcaggcggtgaacgccggttccgcactcgcaacactctaggatggaaatgcatctttgtcttccccgaagtcaccgttcggtagatcgatgtgtcactggagaaatcactcttgccttgtagagagacatttacaagtggtgaggatattccttctccccgttttttcgagcattcgaacctgaaacgacgtgggtacaccccaacgcagttctgaaggggaagggattctcaacacggcacacatttttaatcgcgagagggatcgtgtgctttgtgtttcctctggttttgattcagtggagaggaactggcgtaaagcaataagcggcacggaccacagttcttgacacgcattctcgaactttgaaaagtagggtcgaaactacgccagtggctgccggtgcaagccgccgctacatgacgaggctcctgtcaccgtctcatctccagttcagaacaactctttagatccatggcatctccgaatgctcggacctcctttttacagctgcacacaattcattagtagtgtagactgcacacgcattcttcgcaattatggcaactgccactaagccgacatctcacacgttccacaagattcaacaaactactgtattgcgtttgagaggatatactcaaaaacacatcggtattcttcatgtataaagtggcacacgtttctttccgtgaattgccagaaatggtctacatcgtcaaggtgccatcgatgccgtaacgttcgctggcgcctgaggatgcgaagggcaataacgtcaccgatatagcggtttacagtttcttcaaacaagctggaaaaagagctgcagaacatacagaagacttcaactgtgaccgtcccaccactggctagtttcttgagctttagagcttgatgcacttttctcgttaggtacaaccttgcccacttttttcgtcacgttaaaaaaagatagccgcacagagcagtatcgattgcagtggcctgagattctaacttcgtcgactcgaaatgggaaccgtccgatcggcgtcgtatattaaggtggattgtaaaacaatagggcacatacacttccatcggggagatgctaacaaacgtttttcctccatagttttcgtcacaggatttgtgtcaagtctctcatacacggcgcggtatccattttcagtgtgccaaccaaattcttcctctgattcagagttcccctttttcagacactcggccctgttgttggtttcacacccagctgctctagcaattttctttttctcctgtggtatacttccaaaaggtgcttgcagaacataaaacacagtgcaggttgttggctgctcgtgaggccctgctccgacttcagaaacccacgtgcaatgaagcgctagtctatcaactcctttcttccaaagaagcaatgtttcagtggataatatggatcgtgtgaagatagaatatgtgtcagtgcctccaagatttctgctgaattgttgaccgccttcttcgttgctacacggatctaaaaaaagctttatcagccttgagcagcgaacacaatcgattcttccgttgaattccagaggtttgttggtggtatgcgcaaactacacacgattagtgtttcggtcagattcgaatggactgacacattacatttcgaatctctgtgttactagaagtctgccccctatgaaaaggtgcaaaggacaccaaacattgaagaaacacaggcagctcctgcacatcgggaaactcactttgcttcccgtcatttcgcaaagaaaataagcgaacgtttcatatgtttgtctgtccggtcgaccctatagagaagttgcgtatcctgcactcattgaattgaagcaccactgaaacctgtgcgcccaactttgagaaatcgaaaaaagtgaagcgataaccctgttaagattcgcaggttccagtttgcatacgaccacaaactccgtggcccaggagctttttttaattcgcggcaccaagagcttgcgggtgttgtgcaagccgctgacagtcgagttttaggatgcggccacacagagaacgcgacgtcgtttccttctctcaaagagttaagtacaacgaaacttggtacccgttttcttcatttgaatctgttgaaaaaacgaggcaggctctgttactttgcatctgttcctcgccgctacgcccggaccagctgttcttctttacgatactgtgatctgtcaaggacttgcattttctcgacattctgaatcggagaactgcaagggagcacttgaaatctaaaactggctgtagttctcagcaactgcatggatcaaccagtcactctggttcgttgaacatctacctaaattccaggtcagatattctagcttcgaatcgtttgtgacaaactgtagccgttcggctcgtggtcgagggtccgacaacaaacccaacagtccttgaaaatgttcttttcactttcatgtcatttccccccttgtatatttccttgatttcctcggacactgatcatcaccggagtgccgtagattttgccagaaagtcattcgcatctccggtctcgcactgcggttggaagtccagactcagcaagtttaccgaagaaacatttcgtctagagccagaagaagctcgtatatccgttcttggccctgaatcgactgaacaaacatgatatatactttgtgcacacgcccgcattaaccgatacagagccgccgtcggtttcgctctccaaactgttactggccaccaaatgcacatttgtgtcaatgcatgctgggcgcttctgtttcctggcgatctggaaaacggtggaagcggaaaggtctacccacacactccgattttagctccgtgaccgctttcgttcaacagactggttccactttcgacagctgacctagaggcttctgcgacagcccctagctttgtaaaggctcctgagagtaccgctttcggtatcagagcaataatttaaccaccagccgtgaagaactgttcagtgtttagttgtgacaaggacaccctagtccaaagaaatccaccaagctggtgctcgtaccctatacctgcatatgaggccttgatttctggcaagacacttcttcagcggaaaacaaaa

SEQ ID NO: 3464 - DNA, 1423 bp, Toxoplasma gondii
  source 1..1423: mol_type = genomic DNA
gtgggtgcggtgagaggcatgttactcttgcatgaaagaaagaaaatccagacgtgttgatagtagaattcaaagagtccatgttactgtgcgctgtgttgtcgttgccaatgcactgttttgagaaactctctctgcgtcaacacaacgtgtacccttaaaagcagtttcatctttggtgagggacgccgtgtgcggttttttttgtcagtcggaatctgaaacgatgaccgcaggtggtcttcccttttaccacggaagccaatgggaccctgagacaaatactggtttttgttagatctgatatagagaagttccactctgttgagctctagaggaagagagtaacagctgtgtcctcgaaaacacgtttttcctacaggagactcagtacaatcacaccactgaatgatcagactgtcaagctggagaggcctccgcgttgtctttcctgtacacttcctgtccctcgttgcgtggcgaggtagggaagcaacctgtgctagtatcgagagcaccaagttccaagtcgaactttcaaaaggctatcgacacaacacagagcacgtctgcgttggctgctcattgtttgccaagcaaatacactttcctgtctttttaccgttctaggtctgaaccgccgcaggaaggagctgaaaaaaaaacagaatccgagtcgggtgcacgatacaacgacgttaggcactgtggtcatttcttcggtcttgtttccaaaagaagtcatagctgcgccttcagtgtggcagctcttcaacgaaacatcagccaagttttttttcgtctgtcctcattttgttcctcggggaatctgctcgtcgtgttccccggatcaccagcaactacagcggtgtttggtaccagccgatttaaaatcgtcttcggtggtttatagaaacttcccaatgcgggtcaagtcccgggccgaagctctattccacttcagggtgttcccgttttttttccggcataacagtcgagagaaagggctttctggaacccccgtgttttcgtttgtgcacttcaacaatccattttcaaacagaacaagaagatctttgtatcccctgcatgcagttctacgttttttcggctgccgtccgaaatgcttgaggggcaaccaagagtcgctgacgaagtgttccgttggtttggaatctcgcagctgtttatctgttttacataaccctgacgcatagcgtatctgtttgttatgtatgtgccttcttttgcacgaacgttctggaataacctgcatttggatgacggaaagcatcccttgtgtttcccctacaccgttgacgcgttctcagatcgaaggtgtttcgtgctcgttgtacggaatttctagccgccaaaaagagagcctcgctttgagagaaacgaagcctcctgtcggcagcca

SEQ ID NO: 3465 - DNA, 1328 bp, Toxoplasma gondii
  source 1..1328: mol_type = genomic DNA
acgcctatctataattgcttcgttgaagccttagcatcctgctgtgccgcagactgacactcccggtagaattcccgtggtcaccccatataagcggttttctcgtcagagttcatttcttcactgacttgacattacatgtacaggcgtttgacgtcttagacagtgcgtttccacgcacacagtccacttcttatgccagctgcagtgtgcctaagaaaccggcgctgtatctcgttcaaaggcggcagccttacacgccagcatggaccaccaaactgtggcatcgagaggaaaccgggtaacatccgtattacgggttttatatacctgagagtgatacattataggctgccacgaaagcaccatcacgtggagaatgacggctcttgataatgctgaaggtctctcccatacgcaaaacaaatggctggtctggaaacctggtgtgaggctatacgccgtccacactgtgctagcgccgtgtgccacgatacagtggcagacctgtgccacggtcacgagaggaaacggtcccccatccgatattgacttcgtgaagaaagtgagtaggaagtcaaatcacagaagtggcctgcgctctatacgaggtgcgtacgaaaaaagaagttctacaggtctacaaggagaaaaatatgctggggtccggttcgaaagtgaatcctccacatatcgtacaaccctaaaacagccactcccggagggattcgcgctggaattgaccatttttggcctgtagatggcagacgttaatttttgactggaggagtgaaaaaaccttcgcgagccggtggagggcagcgtagaaagatgcatgcagaagagccagcgtcggaacagggggtaagtcagagccaacttcctcgacaacttcaggagtactgctgcgagcctggtgaggaatttgcgtctcgccgacggtgaacgctacagggaagcaaaaatttcgacgagcgaaactggggaactgacctgttgttactagatggcgacaatgaaccgaacgtaaaaagcccagtcacgccgtcggttcacgcgtgtccgtttcttgtctctgtcgggccccgcgggtgcatgcgcaaccgctccgggcaagacacacgtttccattgttgctggtgttttgcgacgatttcaccagaatcatcgatccatggagggcactgtgtctttgtatgcttgaggccattcagacgactttttttttattttgtggggcgggttcgagtacactcactgtcgtcctcccctaccttctttcgacgctgtctagtttcatcgcgctgtgtctccgtcgtgtgcggcga

SEQ ID NO: 3466 - DNA, 3948 bp, Toxoplasma gondii
  source 1..3948: mol_type = genomic DNA
gaaagacaggtaaacaacaattaccgtagagctttctccactcttggccttcctcgtcccagccataagcggcgccagaggagacgaactcggctgcctctcgaaagaggatctcgtcctccaaattccccctcttccctcgactggaaatcatctttgaaagcacagtcttcacgagctggacgttctcctgtcttcgatctctccttctcctgctctctctatgtgtaaactacatctctccacctttgtctccctctctttagctctttctcctcctctctctctgtacgtcgttttctttgtctcttctcctcttcctcttgttttctgttcctatatctctttgtcgcctgtccttccagctagacgttggaagacaaatgctgcggcatgcaatgaagcggccagtcacgaggatcgagagaagctgtccatcagagggagagaagacgacgtcgaggacggagtgcataagagaaaattgtgtttctgagagcttgggtgcaatgaggacgagcgagtgaccagctggaagaggcgcagagcaatggtgctgcatcgcaggaaagagcggacgaacggcaagacgaagagaagaaacgaacgcgagaaaaggacaacgaggaaagagacacgaggagaaggaaaaggaaaacaagaaagtgagcgagtcgaaaattgggaagaacgaccggacgggaggggcgaaatttgcgagaagaacgaggaaactgcgagaaacgcaaacaatgacggagccgggattcgtgaggggaggcgaattttctctgtgcaattctccgcgaagcaaatccttgaagaaagagtgaagctgaatccccgaaagttagagaagaaagacgaccagccagacgcaagaggacaagacaaggaaacactcgcttgcctggaacgcgacttttggggggtcgccagtgcatgccaatttcgcgtcctccgcagcgttcggctttacaacgcccggcgttcggcttccccctgctcaacaagagttttttcagcgcgagagttgaaagtatttttctcgctttctgaaggagggacttcagcacccgcatttagaaggtctctttcactcccttcgctctcgtcctgcgtccgttgctcagcggtctcgctaaccaacggggagagacactgcaagcggatgttcgtccacttgagacaatcattccgagtcacagagaaaccgagacgtctccagatgcgaagctccaatctttctgtcactgggaggtctcatgcttgcaggagtgtgacgaagaggcgcaggagctctttgggttcctggaacggcggccagcctgcaagatcatctgcactgctagttcgtcattccagaagtgacgataacgcatgaggaacggaagcgaattcgccgtctgcttttgtgttagtgtcgcgatcgatagcagactccacgcagcagttcttccggaaatcctcttcctcagactcgaagggcaagccgcggaaacgcaagcagaaatggagaggaggaggaaacatatcacaaagaaaatgggtaaaatcaaggaatgaggctcagcgaggcgatccgttttcctcggagatccttggcaaacgtttgttgcgtcagaattctccctcgattcgcgagtgcgtgcggcagggagacgggtgcatttccgggagagggaaaacggcagaaaacaacgaagctctttcagttttcctgcgttggtcctggaaagagcctttcgtaactcgcagaaaacagggaacaaaggcttgcgagcaggcaagtcgaaggactttcgtcttcaacgcgaacaaagaagatccacgtttcagtgtcatcatcggttccaggctcgacagagtctcaagtctgttgcttgtttcacacggggtgttcggactccagtccgtatgtcctcatctctcacttgtgaccaagaggagatcactaaacaacgtctcacgcgtagagtctatatgtaagccttcatgttgtcgcgagtttaactaaggggcgcggcgcagaagctgcgttctcgccgtattctccgtgtgtttctctcagtacaagcactgaggagagtccgcgagacttgcggtcgcaacgaaaagcagttcctgctgccaccagtggaacaattgtagtcagacacggtacgttcaacacggcccgcaattgtgaaagtctctgctcggactccgtggaaaaaaagccaaggtagaagcctgccgtggacagttgtgccgtctagctgtcaagggcgtcggtctccaggtgacatttttcgaaacaataattgtgaggggtccctaggagacctgccgagtcttgacactcaccctgagacacatttcgaacgtgagattccgatttccagctatggcaagaggtaactcgagatcccctccgcgtccacggacagaagctagacgtttgcgcagaaatctggaacttccgctttgaaagcgagtcacacctccacagccgacactcgggcgcccgagacactctgttttcagtggcagttcttcgcgaactcggaacaccgcccttttcacgtgggcagtccacttcactctcccgagcagaaaagtattgacgaaccaaggatcaccacaagttcacatgcactgaatttgtcagcgccgtcaattctctgcagtagagcagcagtcggcgtccactacagcgaaaatgtcgacgactacgtgtcgtttcgttgtttctatcgcttctactgcggacgcacaacggacagtttctgcagagggcttctttgcttccagaagtcttccgctgcattccccagacaacgcttgtgaagagtcgtgaaggaaaggtatcaaaacgggtcttcagacacacagaggacagacctcggcagcaaaagctttctcttgcactgaagaggcgtctctgcgttgtacttccccggtctcgaaaagacagtgcagcagctgcgaagttcaggagcaataaaggacacagaatgccgctcttcttgaccaagacgcgctagagattgcctcttgggcagaggaatagcacgacctacaccagcaagtatcacaaatatacgcgacagactgcagtgtcctctttgagtcgggaaaactctgattctctgtttttaaagctcttggcttggcgcctgaaaatactcttcttgtctgagatcccatcagagacatcttcccggtattgtcgaggcatctttcaaaaatccgcaaacatctcttctgagattcaaaggccccggtctgccgtggtgcctgcgtcctttgaaaactcgaggcactttcagctggcagaaaagttttcgtcttgacgttccgtcagctcgatgtgttgtttacggcggtcgtggggggcaggaggcgacacagaggccaggccgctctttcgaatgagagacagaagaggaaaggtagacagtggacacaaacacagagacaacgcaccgcgagaaaccggaaagactaatccccgagcgtgagtccatcctcccctttttccgttccgttcccatttctgcattggcttcgacgcgaggtgtttctctccaaaaaatgcgaggtcgttcgtgacctctgatcttcgagttcggtgccttctcctcgctgcgtttccgtctccacttctttcggcacctcttgtgtgcatctcacaactggagtctgtccgtatcgtacccgcgttctctcgattagttgttcgtccagcggtttccagtccgacgaaaaagactcttctgaatgtcaagaaactttacgaaattgctagtcgcagttcgagagttcagatcgtctcgcatggtgccgcggttgcacaccacacttccgttctttccacttgtgaaactctctttcgtcgacactctgcaaaaaaccagattccggcgtcgccgcaaacgagacagctgcgacttgcgcctcggaaca

SEQ ID NO: 3467 - DNA, 1527 bp, Toxoplasma gondii
  source 1..1527: mol_type = genomic DNA
tctgatatgtgggttgctacggtctgtataccagttcgtgcacttacgcctacgtatatatgtagaatatgcgtgtgcatgcggggtactggttggtgtgcgagtggcaaggctcgtgcttgtgtgtggcgagtacgcgtgtttcaagtagcctcggcagtggcctcagtattttcaggtatcatcttgtgtccaaatgctgtccactgaagattccgtttcgggtctcgatagggcttctagtaccatgcgccgtccttggcaaaccggactgtctgacccagaggatagagaatacaggcttctgaaactgttcactttagacacccttatgctaccacaacagcaacgcacaaccgaattctctcagtttcccgggaaatgcatcggcctcttactatggaaaactgaagagaaagctttaaaactgtatgtgacgaacgacctggaaatacatagcgctccttggtcgaatttgaggagagacagcaatattttctgaaatcgctagaagagcagttgtacgagtgtattaactacgtgtccgcccgtgtagagatacacccggagttaggggtgggcttttcttgacggctaacggaatcagttaacccactctcacgttgaagcgtgagagtatttctttgaattcaccgacgctgttgagccgtttactacgtgcacatgtagttgcggtaatacatgcacatactacgtttgcaatatgtgtagcacaggcgtcccatatagcatatcgaaatgcgagcttcttttgaacttggctggtgttcaactaacaaaaggatgagagtaacgtattttttttctctccaaactcttccaggtgtgtccgccaggccagccttgtcctatgtagattctggtcagacgccctcgactgcgctccgtgacacgagtatgtacaggaacatgatggcgatgagctacgcaagtcgtgcaaacgcttctcgagttcgtttttctcctactcaaacaatgttctgtgcgaagacaaggtgcaagagcgaggagaacgattgttgttctactacaccttcaatgtcacgtagacggtggacggcccgccttagcatcaagcggcccggaacacccgtgcacgacgcatatttgaaaatggtacacaaactatagcttttgtgacccttttcttttccacgctactgaggaaaaatcgagaggatgtcctccaaacgatgagcaatttctcaactcttttctcgcagttgcgcagtctgtgagacgtctcgatgccgccatcgtgagaaaacgtcacagagcaagcgagaaaactcgccgcacggtgtgcgcatctctcttgtttctagcatgaacttttgtgccttagacggcgccagttttctttttcattgcctctcgttctcctgttccttgcgtgattttctcctgctgtgttccaacgagcgtgtcgatatttctgtcgtccttggtaccgcattctcggccgttgtgtcccacttcccggtccggttccctcacaagcgaaga

SEQ ID NO: 3468 - DNA, 2576 bp, Toxoplasma gondii
  source 1..2576: mol_type = genomic DNA
gagacaacgacctctctcctgttaccgtctatattactagcgtctagcaagtgtcatgttggaccgactcgttgcgaaagaacagagcaagatgcttgcaagtccttccttctcgacgtcatcaggagggcaactgtcggcagcgcccaacagcaggccttaaatggtcatgcgccaagcctgtgtgtaactagcattttcgtctaacaccgatgtactctcagactctttccattcgctcggagcttcaggccgaaagatacatatatatatatatatatgcacatgtataggtacatatggatgcatgagttagatctagtggcgtcgctgtcgcttgctcaggagttgtggaccaattttcaaggaatgcaaagttcttgtttgacgttcctaagaaattcgtctcttgctttcgtggatacaagccacataatcagagagtgagacgtcttcactgctggaccggcgagtggtgcggcgaccttttagaaagtgttttgaaaaaaacaaatggacacgaagatccttcttcgcgtctggtgcttattgtggacgcatctccgtcgatttacgcgtccgatttttcgcgtctgtcctcatagacacccagcgagacgcaaggcgcctcgtaagagatctccaccaatgaggggtgcggtcttcgactagacacatggacgtcgacaaaagtacgttttgacgcatcaatcgtgtggggtgcatgtgccgcatttgctgatgtctgcagagaaacaagccaagaagagttgtggcttcaacttctttgcactcccttgtcctaccaagtgtttgtcagcacctgcttctgcgattctgtgtgtacaagtgagagctactcaactgctgattttcctctttgcgtcggactcggcggtcgacgggaaccgtcgttgcgtgagtttgacctggtgaacataaaggaagactcgcatgccctttggtcgcgagaggcccatccccttttgaagcgacaaaggtgtctctggtcctgtaattggtcatgatctcgtcgggatggctttcttcaacgccttctttcttcatttcacacccgctgttctcttttcctcctttctgggggtcctatgcatgtgtgtcacggcggtcgccagcggggagtggagggacccgatgcagcgcgcggacgccagaggcggtttcttgtcttgtccgagaggaaagaaaaagcgcatctttctgtaatacacgttttgccagctccggcggctcatgaagggggacttgcttctgcgtttcagcgttctttcagggcgcaaagaagctccgttgtgtgctaccgagtcgcattctcttcaagaggagtgagctcgatggacggcacacagtctagccaccctcggagctcgatcgacagagtcacgtcttgcggtcagtcgccagctgttttctctttcgcctctttttccccatgcttgttccccttttttcgcttccattctttctcacgtgtcacggttttcctgtacctttcagaagtagctgacatattggaaagacgacagaaaggtgaagcgatacgttttctggtggtagcctcgcagcacaaggtcctcgcgtttctttgtgtcttgtctctcctcttgaaatgtccgcaaagtttctcttctgctaaacacacctagcttaaggcgttgttaggctcgaggacggcaaagcgttttgcggattctttgagttcttgtcaacttcgtcttgttcgcacgtattcagtacccgcttctcgcgtgagatccgcgacccgcgacctttagcgcatttgaaaggcgttcttcttctttttcttctcacgtggacgctgtcggttttttgtttcttcttccaccttttcaagtattcgataaggtagcctgtctgcaacctgagtcttgcgcccttctcaactgttctgtcttccgccgtctatacacgcttcccgctgcgagtttcccgtcctccgctcctgcagtttttcgcttgcgccccgccttcagtctgattccttctttttctcttgtcttcggttgtcgtattccctcccttttctgccgtattcttcttcaatcctgcagctgactcagtcgcatcttcctcgcgacccattttggcaaacaagctccctcgtcgctctttcacgccctttccttctcttcagaggagacttttcatgcttctccctctcctttgtccacccttccgctcttctttctgtcaaactcctccctcttcagcttttcttcggacctcctttctctgacagtcggtctggcctcagcccccctctcgctttcgccttcatctctcagtcgacattcccgattggcgttgcgccgttctctaaaagagtgaagcgtctcttcttcttctttctgttttccacctctgtcgaacgcagctgcgttctctggtccctctcttcctctcttctctctttctctcttctctcttctctctcgtctcttctctctcctctctctctggcccgctgcatgtcggggacgctggtcgtcgctctctgcgcggctgagctcttcgtgcgcggcgaagcctcgcca

SEQ ID NO: 3469 - DNA, 3619 bp, Toxoplasma gondii
  source 1..3619: mol_type = genomic DNA
tgtaactggtctgtgaccatcctgttatcttgttgcgcgtgacaaaccttgcgcgttcctcgctaaacgccttctcagcttttctttttttggcgcaaagtccgtccacgcacctgccccccttgtcgtgtctcactttgctctgggcgagtctgaaaggagttgctgtgcactatcgagcacttctttgcgaaacagagagtgaagctgactgcgggtgccactaaccgcgtaggcctagggtagactgcgatggcacatgggagttggtcgtccgcgacaccgaactcgagtaaattcgctttccggtcaaagttctgtagtcagcacgtgccccagacattcggcgtggcactcagctttctaaagcacctctatgtataaatcaaaccaggagtagactgagagatacagcgtctgttcttcacaccatgctaacacactagaacttggttcccgtaatccaaggcattcaaagtgggcggccggctttgttcccaaagactagacgcgtttaattgcttcgccgcagtggaggcgtaacgcacgaaattgtggaactgaggcgcatgcaggaaaaaaccacggaaatcgatggctcacagcgtagtcttgactcccagggaaaaggtggtttgagcagaccaagaattcatagtgccggaagtgaagcgaatcatcggtggctgtttcacccttcagacaggaacgtacctgggtgcgtttacgtgcaacgggaatgtgtggttcagtgcgttacagagatattcgcaagtcttgaattccggggacgacaatgtgccggagcagtcggggcagtcttcatgttaccactacttccggacttccagaaatggagattcgcgagaaaaaaaggtgttcaggcacaacggtacccgccggcagagtgacaaaaacacaggtttgtgaataatttgccgcctttccatccgagttgttcgctccggcccatgacccctttgttccactttaggcttagagctgctccatttgtccagaaggatgcatactcctctccttgagatacaatgtggaaggctctttggcaaaatccgagccgaggaaaaggcgaaatcaaagtttgcggcgattctccgcctcgacacagagagcatcaatttcgcctgccagtaagacaactacacaattctgcgaaaataatcgcttcttactgacgcttttccaaggagcctttcttcatccgtggctgacctcaagaaaaacgaatgcgactgtgctttttcatcagtttgctgatctgctgtttcgaagagaacgttctctaccttatgtgggtgggaaagttagcagtagaccctgtggcatcgttccaacgtaattttctctggacccctcacaacacccgtttcagagcgatgtagacctctaacggaaatgggtttcgtggtcgacgcggaaattctattccgtcggcggaagtcgcgccaaatcggtttgttaatgacgtaacccggtagatggcaaagacaagagcagtcgtgacagcaaagcgaatgctgatccatccgctgctgcatttatatatatatatatatatatatatatatataggataaccagttagtgaagtcgtaatagaacacacttcctgctggtgcagaatcaaggcaagacacctctgtgtgcgcgactttctgtatgtggtttgatggttacttgtttggcaacgaacttgttacgtgctgtattcttgtgacgaacaggaacaaggcgaataagaacaagcgaattgtgcctcactctgtcgttgcactcagtctcataactgggagagacggttgagggtttcgaaccggacacaccgttaggcacgatgcagaataacaagattgtgtgcttgaggaacatgcatatttggaggttccgtggactttcaagacagttttgaaaagtgaacagggaagtaaaggacgaaattgcgccgttcgcagaacgtggcacactggtgtcctgtccatgcgtgtcaaaagtgccctattcccaaagcaccattttctctcttgttttacaggctttccaccacgatgaaaagcaaagagctggaacaacgcaagtcaaaggaaagcctcttttgtaccggggcttgagtgagtgtcgcgtcccaccctcctgtggcttcgtgcgcgttctgagttgagatagtacagaacgaaactggtgctggacctagtttctcttcaaaatatttaagctagccgttaggcagaagctgagagatgctcaaagttttgctgaagagaatggcgaatctgttccccgtcgtttcgctcatgttaaccgaggactagcggataagggcacgcggaccacttgtgcatgggaaaacgggacttttcgggtaaaataaattgtttaccgaatacacttcacaaatacaacaccattatcgggaacgccaataataaaagctggcaacaagaaaagccatggatccagtaaggtgaccggcatctttacgggttttgataagtgttgccgagtcgcattccttaatccgagtctatccgggcagtcgtcgctcccgttatcgtgcagacggcggcggatcagcgctctttgagccagttctcaaggaatgaatgatctttactgtttcttaagtatttcactagctgggaaggagtgtcagtaccagtgagaggccgtgtgatgaatgtgtttgccacgagcgcttggattcaacacctcgtcccgcctgtttgtgtgtcgcaggatgccctgacccttctcttcgcgaaagcaacgttattagcttgtctctatctacgaaggaaaagaagttttcttcgtctcacctgcaaaagatctctgacgcgggtcattgtgaagtatcatttttgaaacgaccgggtgctgtgggtcatccctgtgaagttttgaaccttcgagttccagatcacaactttttcttggatttgaccggcgatatgagcaatgccacagttttttacatcccggaacaaatgaaaagtctacgtgacattctgttgttacgtgtggatacattcgcatgtaacggcacacctatatatgcatatatatatatatatatatatatatatatcgatttatggggccctgcatagattccgatgctcccatgcgtgtgtgtgtgtgtatgcgattcaaaattgataacaccgacatggttattctgcccttttcgcctgcttccaacactcggagttcacgagcagaactcacgtttctcttgatttgttaacatgttcaagtcggagttctccccactccagtttctttcctttggaaaagaccactagttgacccgtcctaccattcagtaccctatttttcttcatttggacggtgaacagttttctctttcctgtttcgacttggactctccgccgctgtcgcggttcaggatgacacccgacatatctgttcgtcttcactcttttcccgatacagccacgcggaaagtttttcagcacacaacttttcttctctctgagtacagttgaggctcgattaactcgaagcttcttttggaaacccgtttcccatgaaatgctcacaccagcagcccactctggttattggacgtaagcggcga

SEQ ID NO: 3470 - DNA, 3263 bp, Toxoplasma gondii
  source 1..3263: mol_type = genomic DNA
gtagacacggtaaagttcctgtccgtcgttgtccgtcttgtatgtggactgagacgcggtgccagcaagtccctggggctggttttccttctgagcggagtcgctgtcggaaatcccccgtcccgcagctgcagcagcgccgctcgcatcggacgaggaaatggcggccgcgatgtcaccaagcgtcacatcagcgaaggcggcagagcgcgaaggacgccaggaagctgttttgctcccgatgctctttcgagtgtctctgcggttcttcgacaaaggagaggcgagagtcgcagacgagagccgcaccgcgccggttgagttcgcgcgcggattttccgcgtttccgcaagacctatgaagcgccgcatcatcgccggggtcggctgcggcgtcgctgtcttcgacactgtcttctgtcccggaggagagaagaaggcggcgaatgacgctctgaggcacagcggctctgcagtcggcgagagggcaacgcagaatggccgcgcctggggaggcgtcctcgcgcgcagaggtactggagagcacttgacagttctgaagagaaaacgtcacgtactggcgaaagcaaacagtgtgaagacgatgggggcttgcgtcttgaccaggtcgggcgtcgtctggggtgtctgcgagagagttctccggccgcgaggtggctgtgaacggcgcggcgctcgcgcctgcggaacgcttggagaagcagccgagagctatgcaagagtccgtggcgagcatcggctctaggcaaatgctgcagcgctcagaaggcggcgcagcctcgtggccagccggcgggtgcctcctctctgaagggaacgagggcgagtctgcaactccaggcgactgcgcctcgccttcggtctctcccggggagctggccacctggcgcagaacgtcgccgaacgcttgcaggaggccgcgcgcgctccggagagcgggtaggttttttcgactgggccgcgtcaaaggattttgacgaaacagacctttgcgttccatgacgaggcgagagcgcgtgaactcgaagcaacaaatgacgaaaatgccgcacggcgcgctcaggcgacgctcgagacgctgcggggtacggaagtgcctaggggaaacaggcccaaaaggtcgcagcaaaaaggcgcggagaaaggcactcctgatggttcgccgtcgacgaaagagaaaacgccaaaacctaagagacggtgcaagggagttcattcgaagttctgccggacacaaaccgcggactccgctcggcggaacatgctgcggcactccgttcgagacggcgacaatttggcggtggctcccgcggtgtgtccaggaagtggagatgaaaccactgcttcttcctggatttcagtcgatttgagttcgcagacgctctacgcgatccatcggcggtaaaccacgagtcttcaaaaagcgacgacccgcgtttgagcgcagaaagcagaaagcctcgactgcaggccgcatataggtctcgacatcgggcagaaccaacagcgggcagcgccctactcagaggtttgtcagaagatgcacatggaaatgtcgaggcgaaacggaagaccttttccaacgaaaatccagtagcaaacaggaaatggcactttgaggagagacacacacacgaaaaaccacaaaccgacatggacaaaggcgtcgagggtgcagacagcagcgcacgcaccgcttcagcacacctctccagcaacagaagctcgcgtttacctagcgaaaaagcaatcggaagtgttgtgagtgcacccggtagcaacggaacgaaagacaacgacaaagcggaaaagacacgcacacgattgtgagtgccctgcatgcgcgctgtgtttccctgtcgcgttcgtctcactggctcacgacgacgaggaacgcctggcttttcaacagggattccgtgttcacatcctccatcacagacaacaatcgttcgttgttcttctggcgtttcacacaaaagtgagagtttcggagaaggcgctttcctccttgagaaggcggaactgcgcaacatccggccctctgaagcatagtgaagacaccaagagccgagcagatgcgctcacgcgccgccaacgggtcgtctctgccatgactagatgaaaaagctcgtgcgatagactagccagtgctgatatttagtcttgtgcaaaacaactgaaagtctcatcaacatcacttgacagggtctccccagagagtctccgtttcatgccacaggatttgccgaagaagccaacgagtggccaccctcggtcagcgagcatcgactggctacctgcaaccagctgcgccagttcgtcgccaagagaaaatgccttaccgctagcgctgtgacggtgttctcttgctgaatcttttgtaagttacgtagagtgaagatttgagcttccacttggagaaacggctccgcgttcggatgttctagcccactgcggttgtgcaccgggagtgtagcgcagatttcgtgcggcacgggttccgtgcgaccgttgacacggccatgcatttcttttcagttcgcctgggcgaactgtctcgtagttctagcatgttcttcacgttggcagggaacgttccagattttctttccagtgcgacgtgtaaaagggctttccgttgctagtctgccaagtgcaacactttcggtttttttccgatcagccgcgcctgtccatttgaggcggaagcgacctccacttgcaggcttttgccctgcgtcttgttcaacgcgctcttcgcgttccacgggagttccaagttttcgtgcgttgtttgacctggtgcatccagcaagaaaaaccctggacgctctccgttcaattctttgcgtgaatacaggggctggcgtatggcgtggacacccagtgctcgctacccagcgccgattgttttttagtttgagccaccaaggaggagaacggaagggtaattcgacttctcaggctcgtgtcttgtcaaagagctgccgaaagggaaagtggtaggccgcgagcatctcctacggtcgacgccacagtgttcgtctgtcagtattcagctgtgtttatttggttccactcgcaggtaaaacggagctctctgccggggtttttccgggaactccgtgacgttgctggtgcgaaacactttcttctgcgcatgtgtgcgttgaagggatctgcagaaagacaaaacccgtacgggcctccgtcaggcgaggtgcagagagcaagtcacga

SEQ ID NO: 3471 - DNA, 2713 bp, Toxoplasma gondii
  source 1..2713: mol_type = genomic DNA
gaatccacagtgccagacacctctccggtcttaggtcagaaagacgagcacgacgattatgttacatgctacgtccggctgcgttcgcaaagaggaaggcagtcggcgcggatcccagaaaggacgatccgcttcctcggctccgtatgtggaacagagggttctatatactcttgccactgagacgtccccgacggaagactgtagcgaccctccgggaaacctcttgctgtcgtgctttgagtgaatcgatttcgacccagtgatggaagtggatgtgatgtgggtctggagatgcgctatagatcaggcctttcagggttaaccaaccaaggacagatgaaaccaagacgctccgcacaagttcttcctgcttgcctctctcggcacccttcgagcgtggcgttgcggagatccacctacaaggacgccgaatgaacagcgtacccgcaagacgaaggagacggcggatgcgaacacggcaagaaaagccaagagtgccgactaaaaccggcaaaggcgcaaactgccaccaaacagatagatgggcagcacccgtttgaaaacggacgggggggggggggcaggcacaattgaggttagaccctcactcagtctgtagctgccacgttccaaccgttttgggaacgggatgtcccgtgtctgccactcggggaaaatgatatatcctgttttcttccgacgacgaactgctggaatcgtcgggccacacaggacggggggaaacggtgccggtcaggtgagacgcatgactttgatggaaaaatagtgtctgaagagcataccaagagtaagggaagtagtgagatggtgggggaacgaggataagaaaactcgcccgcgtcgggaatatccaccagaaaaaacgagcctggacaccccgttcatgaactgcacagaacaggttgcaacaggcagatgcgcgcacgcaaagcgcccatatcgtttctagttattctccctctttcctccgcacaaatcaaaccacaactcgttcgtctgggtagacgcactcggagcgttttgggaaacctgcagctccagcagcagcttcagagcgggaagtccaggcaaaagaaaaatacgtcccgcatggcaatgccctcctgcgtgaggggacgccgcaaccgggtcacaaaactcccctgaaacttcccctgtgtctcctgtgggcaatacgacgtctggtgagcggtttttaaccgcttcgtcccaacagaattattcgaatgaaggccaacaaaaacgaaaacgcaacacccccgcgccttcgccgttgaaagacgccgcagccgggaggactgtagtcacagcgagatggggctgtgctgttgacggcaccggtctactgaacgccgcccccggtcccgctggagcagggcaccgtttttcccggaatgtatgtttggaaagtgtactgaaaaaataagggagagccgcctggcgggatacgaatcacttgctacggagtgattttatagttcggtcctgtgtaaatcccgatgctagagaagtgcttccttatttcgtgtcgattgcgtaggactcggaggctttacacgtcaggtaacgctacagcagtggtgacggaaaagaagagtggtactgcctactaaccgatccggactgtgaaaacggacgtgatgagtggggacgccgccggctgagactggcctcgcacccgcgaccaggcgcgaggcttccgttcccgttccacgagtcaaccttttacggacggccgtactcggaaaccggattcgtggaagcctggtacccttacttcttgcacgcagtataccccggctggtaatgggttaagctacactggctgccacaccattagactgtgctatggcgatgaagccttcgtttcgtgtcgggaacgtcatgtgttaaagtggcggaggaattaggtggggcaaggggggtccaaagcgatggtagtagtacaccattggtcaagggattatccagtagacacacagagtgccacactgttgtgaggcgaagcagctgtgggaaaacagaaacaaccgcacagcattttaaacaaggatccgtttatcacgtaataaaatgtcatagggagcgagatcaaacgcggcgtgctcgctcaaaaagggagagagagtgaaaggtcttgtcaccttcagcgggcggcgaagtgaacgcactgccgacgtgtgcagttctgcgcgcattctcaccacgaagtattcttgccttggagttctcccgatcggaaagagaatcatctgaatcgataatgcacaagcatagaaacaaagcagctcccgggagcatattagtttcgtctgctgagtgccagcaggtgagaacgccggaagcaaccctaaaaaagcagtggctcactgcgcgggtacctctggcggcgatatattcctgcgtggacactgtttcgttgattcgctccaagcagatcttgcaactatgcaaggtttactagaagtgtggaaagagaaggaaggagcgttcaaatgttgtcatagcatgggcgggacgccgccatatccggtcgctgtgctgcttgtcaacagcgtagtcgttcgtccaagcttgggtcagcgtgctgcatctcagtgacggagggttttcccgatgtatgcctcgttctggaaatcacacctttttcagttgccgtgagatgctgtgtgacatcttcaagaaggga

SEQ ID NO: 3472 - DNA, 2466 bp, Toxoplasma gondii
  source 1..2466: mol_type = genomic DNA
actgcaggcaaaggctgtgtctgactttggttctgtaacactgtcgcggtggtgcaatacgtgccgacgtagaggcaccggatgcttgtcaacctgttggaagtactgcgggttcgattgtcgaggcctgaaagacagaatgaccgacgagttgttatgtgaattttgtcgagagcgctggggggataggcgttatctgcaagagtgccagccgtgtgtttaccctttgccaagcaacaagaatcacacgcatgcggataaagaggagccacggaacgacccaccttcggcttcgttccgcgacttgaagcctcacattttgcctcggccttcctccagttttttcattcccggagagccagaggagttcgagctcgacagcggcagagattacatgcctgctacctggcggttttgacgttcatttgctgtggaggtcgcctcgacctcatctagaacacagattcgtcgaatttgacgatttagtattctccaagactgggaaacgctacttcctactctggactcgaagattctggaagacaggcacgcggcatcatgcccgccaaatatgagtgacacagtcacccaggtccacacccgcacccaacagaagcttactacgaataccagagaaaccacaagtcagcgcagcattgtgtggacttcataaggcggccggctacggctactgcagagtagctcaccatcattcagagggcagacatacgagtaatccacatgccacctttggtaaccaacacagagcgcttcacacattcgacaacccccatcggacatccccattgaggctgtgacagactcttctggttcctcagctactgcgcttctacaggtgtctcgacgatcgacccttctgtaagtgagattgactttctttcattcatgttacagtttctgtccggtatttgtgctggatcgcgggaagctgttgattgaagccggtttgcgacgacagttcccccctgtgcatcaacagtcgtttccataatgatccgccaaaggtgagaactcaggacttgtgacacatatacgctgtggtgtcgagtataacaactgaactcgcgatttgaagtagacagattctagcgggaagcaccccgtgcggagtcgcgacgtcccccgcagaaattctgtgttgtgctttcagctgaatttttcagtgtagcgccagatattcgcctcgatctttctgagcaaatggacaccatgtcaaggacttcagtggcaattctcctccattcatagtccggtgctcactgcagtaaatgcattgctgcggaaaaagcgagagcagcgtggcactgggcctgaccgaagaatcgtcaacccctaacagagaatacttcttctgctgcaccatccaggattgacacaccttagagttccggcctttttgcgaagaacctctctaaagtgaggcggcttccggtagaaaccccagaaaagaatacagacactttctcgcgcaagcaagggcctgggcgacgctggcggagggcgccgactgctgcaccgcggaccattactctgtgtaaaccagaaacgaactagaggggtccttctaagcgtgatttcacacatactcgccggtggatttgctgtgtttggtgatgtaagggatgcgtataatggtgtcgctgcacgaggaaagagaataggttaaacaccgaaaactcgagagtaacaccaggctcgcgcttttgaacgactctcgcagacagcgcctttttctagctgtgcatgtggccgcgccctcacgcagaaaacagttcttagacacagctctttgcgttttctgtgccgtttccctttcagagatccctctttcttccgtttcttctggtacgatgcgtcgaagcaaccgagtcttatgaggttcaccctgtcgagaatttccttccacacacgcaggacttctgcggaggcggcttcttgggatcggccagaataccgcttaccatttctctcgacctcgtgtgtctctgaagctgtttctgctttgctgtgcttctctgtttccttctcttcgcggtcccttcttccccgtctcctttgactttttgcccgctggctctttcgcgcttcaaacgggagcgcgccgactttgcggccgggcactcggtcgccgaagaaagagctgcgggcgccagcggcgttcttctctctcccttcttctagaggggaaaccgccacactctccaaactgcatttccgcccctttctgttttttttctggggctgcagctgccgccacggaccagtcgctgcagggattcttagaccgacgctcgtctgcggaatctacctcctctcctcctcttgaaaccactcacccagttgtcagccaggaaggcgtggttctcagcgcctctgctgtttgcggcagggcgaaatcgacgcgcgccaaacgcgactcttccctttcaccggacacttcagcca

SEQ ID NO: 3473 - DNA, 3089 bp, Toxoplasma gondii
  source 1..3089: mol_type = genomic DNA
cttcgttcagagctgcaggtgccttgcaggcaagttccctttctcccttcttctcgcagcaccaggctagctcggcccagaacgtagaggagctcctgtgcgctcagcgaggcggctgtcagcgaaaaaatttgagagtcctcaatcggaggaaacaggaaagaatccgcagaattcgctgaagaagagagagtggattcctgtgaggttcgtttgtgcttgtctttgaaagttgagctcagagcaaagactttgactggtggagagagctcgcgaggtcgttttcggcgactctctcggtcgcagaacggcgtcgcttctcctgcttcgccgccatacgctcttcttctcgcgcgcccctcacgaagactgtcggcgtcgtcgttccttcggtcttcaccctcccttcgcgcggcgtttgtcagcgcttggacgctctccgtagtaaactcgaggaaggcgtcgccagggatctccggcgaggcaggcgaccatgcgaagtcgaagagtgcgttcgtgtctgacgcctgcagagcgggcgagtcggagaaacgaggcgcagacaggcagagactcccgcgtctcgcgccttccccctgagcctcttgggtgctcgcaggggatgagcggcaacaggcagagcctctgtccagcgagacgagagttcctccgtctgccgacccccctgcctcacgtcgggaggcgcgtggagagacagaggcgcagaaatggcagagggaatacgacaaatgagagtagaacactggagatgcaggacaggaagaagagaagggagacgagggagagacagaaaaaagcgaaaacgaaggcgacggagcacgaggaaaagaggaaggagaaaagggagagacaggagagagtagagagacagaagagacagacgacgagaagggtgtgcttgagggtctagagggaagagctaaagcgttgggccgcagcgatttgcggcaaagagagcaagaccgactgaaggtggacggaggagaaaggagacgcggagaggagacagcgggaggcgagcgactggcggggggaaaacgagaaaaagaacgaggaggaaatcgagcagaggacgagacagagataggcgtgagagatgcgggaggacgggagtgccagcgaagcgcagacattgtggaagaacgtgagtcgagagagagagagaatttacagcgcgcgatcttacggcaaacaaaaccctgcggcggcaggggcaggaattgacgaaccgtggatatacagcaaaaacctcgccgagatcgactcaaaggcgagtcaaagagaaaaaaggagagcttctcagtgggtgtttcctcgacaacgaccccctgtggctttttcgaagcgaaagaggcgcgtcaaactcgagcttccctcactcaatcgcgggtcaggcgcgaggagccgccttcttcggagagccaagcagagaggaagaagttgccgctttccttctttgtaaagacttccctccacatttctcaccagagaacatgtcaagaaggacgcagccacccaggcttcagcaacagcccaaagttcgcgtttcaagacgcccccgtcttgaaagctcctctgtggcgagcccacgacgtatgtatacagcgcctctggctcttcgccgtctgggacgggatctaccgcaggagcgcggcgggcggaaaagggtctacagaaagagaatttatacgcctttccaagacacacaagtgcgtgtgatgacttcttttgcttcttctctgtttaccaccctcgctgcgtatcgcctgggtcgggaaaaggagctggcaacgctgcgatctaccggcagcgccgtgtcgcccgtggtgtaacccgcgtgattatcgcaagttttcttagtctctgttcgctccacttttcgcggattcgcccccgtttacgagctttgcttgacgtttactctcctcttccgctcatcttcgttttcaaaatctgttttctccaggtgtcaccacggtaagagcagcttgaggggcctaggttgacggaacggggggctacacctcgcgctccgcacggaacgcaggcgcgtctgcagccgtgtctgcggaaggtgcaggcgatttctgcgttgcattttagaggcaatgcaaaggatctgacgtattttaccgagtgtgtttcgtcctaccccacttctcagtataactgcgtgacatacgtatcagtgcgtggatcaactagaaaggatcaaagtggaaaggagtgctgctgcggcggtgcctggcacaggaagaggcagacaggtgggcgcgtttggtgctcggaacgagtgtgaggatttggcgaaatataaaacgggctcaaggaaaaagccgaagttttataaaggaaataacccaaagaaaactgtgttaacggattgaagctcgttcaagaaggtcctcctggagctgcgcggaacctcgccagtttgccggccttctcatcatcaactggatcgcctccagctgtttcgcacacggtatccttttgaaggggtcttcctattcggagacgctagactaagatgtgctcgcctggcccagatccactaccctccgttgtgcatttttagtcaggagttactcacactaagccgtttgtcgcatgccagcgcgggtatagggcctctttcgatttccgagtatttggtgctctccacctgggagatggtttcatttcagcgacgaaccaagctggcgcggaattcaggctgtttaacgttttccttgcagccattcttcatttaaaccatacagtgtttagttcgtgtcgagtctgtgcggcaagatccgggagaaaagccacaaaaaccttacaagggtgacaagcggcacttgctgagcgtctttcgatacgcgtcgcactcccggacccaggcccccccccctcgtgcttgggtggaccaggagttcctggcgacacagcgcaccacttaggatttatctgagaaaagcttactttttcagtaacgcttcgtgtgaagattcaggtttccacggaacttggccatttgacttgtttctgttcgagacttcacgagggagcttgcttttttgacgaga

SEQ ID NO: 3474 - DNA, 2376 bp, Toxoplasma gondii
  source 1..2376: mol_type = genomic DNA
gtaaacatacatctgacgagaacatgtgtgccagtgctgccgcagttcctcgggactgccacgttagccagtattgcggcatcgcatatcggtatgtcactccttcaagttacaaaacacccgaatttgtcagttgaacaacttggatccccatcatgtcggtggctcgcggagactcatcaggttgttggatcttgcagctctcattttgcttaaacgacatgtttctgctcaaacatgtctgcaaaatccctctccgctgtcgcccggtccagaatgattttcgttagttctgtcactgaactgcttccctgttggaaaatccgatacagccctccagtgccaatctcattatgatttttttacgcagttcctcgcactgacgaagagctgtgtcatattaacaccagcgaatgggacctgtttggtgaaaacccgtttcgggcgataagagactgcacaaggatctgaagttgtttctctgaacgatgcaggggcggccataggccaagcgattccgtaaaacaatattgtgaataacttttggcgaccccttaatagcagtactatggtttctccgcattcgcacattaaaaatggatcaccaaacaggtaagcatatagctgtgctaccttacagctagagaacaagggctgttccgggaattgaacccgggacctctcgcaccctaagcgagaatcataccactagactaaacagccgcattatatggcgacacatcgtcggttgcactctgcacgacaatgccaacggctaaagcacacggaaatctccgacaaatatgctggcgtccagtgctcggcatctatgtaggcaacaattcacttgatgtcttttgaagagtttcagcgggttgcggggttgtagtcaattggggccctgccagagccggaaattttctgacattccaacacaaaacacactattcagcgcctcacatgagggatccgaacccggtctgcataccttcactgggtactgaatggtctgatgtgttccctcctattattcatgctggcaacacagcgtgactgtctagggtgtctctggcaaaagcttttccatcagcgtgactttctgcatgaaatgcaagactgtcgagactgccgctgccgagcgaacatccacagaaaacccgttgctcgtggaagcgattcgtctgtgcatctgctagtactcacgcgcgatttcagaacttcgacgcctgtcggatctggagaagcgtctgaattctgtctgtgtctggaagtctaacattctgaggcgcttcctcctgagttttagaagagaaaatagtcaaagcatgtgttcaatgcttcgcacttgacccctgaaggcaatcggcccggagacacggcgaactccagcgggttatttccagtgccgatgtgtcttctcgctattacgggatggtatttgttttgagagtgaggattacagcaaatgatgcatgaggggacccgtctgcattcttgtagtggatgtcggtctgctatacattccagcctcagtgtgtgggctgcactggcatggttaaaacatgcgcgcatgcaccggtgcaaaagaaagataaaacctgcagtgtagaaaatgccagcaagtccattaagaagtcacgcgcctgaaacggaatgaaacatttggtgcaatatgctacacacaagctaatgaggctgacactgtgatggtgctgactgatctgaggagagtctcaagaacgcatgcagatgcaggaaaatgctggttaagatcatcaagtgcggcaacgcgcaacgaaccaatccgaaacaataataggcacgttgcatcatgttaagagtcatcttgtctgtctaagagaactaggacccggatgccgaatatgtgttgcattgaccaccctcgaatgcctctggaagcctcccttcgtctttgcttgtcgatagatgcagctccgccgagcacgtgtcctagatcagacctttgacgtgactactcttgtgagcaagtgatgtacgacattccatatttatgtttgctgtgtaggatacaggaacacgtctgttcgggagcacggcaccatagcggatatgtgtatatcattttccttatcacagcgtcctggaaggctgaaggtacggggctcgttggactgcagcttcgtttccattgagcgtgtctttctttactctcgatttcttttctttaagcatgaagtccttttgtccgcagctgcgcagacgcctctcatttcgtttcatcgccaaggttcaccgtgtcctgcaagtatttgtcaccggcgtggctgccgaacggcgagcgtccgttttttcccctctttaattttctagaacaatgttttcatcggccagcga

SEQ ID NO: 3475 - DNA, 3461 bp, Toxoplasma gondii
  source 1..3461: mol_type = genomic DNA
gattctggcggctagaagttcaagacacgaagtaaatgaaacgacagtccttttatttggatccgttcctgtttacacatacacccgggtgcgaggtgaatgtttcttttccactcttaccgtgttcggactgtggaggaacatgtctctgactgcaagcacgaaggcttgccagtcagaaaggagcaccatgttgcagacgagcgtcgaagagagtctgcaggcgaactcgtctcttcttctcgctgaactgcatgcacaccagtcacgccgagaggagaggtctcggcagaggccagaggaaaggagagaggccgcggcgggggaagcacagagagaggaaacaagaccgagagaaagaagtccgtcagacgcctggagaggggaaatgggaagggtgtacgcgcacccgaaaacgagaaacagagaagcagcgagggaaactccagtcttctttcctctttctcgttccgggagtggacagaggatctggagttcgtcgaagaacggagaacgagaaacgaaagaagtgtggagcagctctcgggtgtctgtgctgacttggaggctgacgttgttttctcggagctggtcgagaacttctcggacgacagagaggagtgccaacgagacggaagagaagggagaatccagcagcaagaagcagatgaattgtggaagagaacggagcgttgctccttgaagaaagcagtgctttggggcgttgacttcgtgtcaaaggaaatcccgaaggagcaacttgggcgccgttaaatgagaaaaagactgtcgcaagaaagaggtttctacagatttaaaaggtgatacgacgtaacaaagaacagccgctcggatgtgtgaccgcggaaaaacgagaccaagagcaccttgtgcatgcagtggaaaaaagcgaggggtgtctgtcgcaggaaagattagacgagtctgaaaatctcgaaggaactggtccaggaggacagcgagtttccgaaagacggagacagcacaactggcacacttcgtctctcgcctctctcggggtgtttctacacaaccaacaggggagggagggagctttcctgagcaagcaaacaaaccaggaaaagcagaaggaagcgggaaaaatggaaagtgatgtctagtccagcagaaacgccgaatacagcaaaagaatcaaagtgttcatctgacaaatactggggggcaaaggctgcatgcatttccgctgctgactttgcggcagaaatcgacacacccacgacgagttgggggagaaaccgtccagctgggaactttcttggtgatttcgattgcctttccttcagagttgtctttgcttcagattcgcgtggcttgagatggacttgtcttcgccctgcaaaattcgctgtcgaggctggacggtctctctgaagcgcagttggtggaaatcacaagcattggctttgtattgggggcaaacatgctgtcgttgaaaggctttcggtgttccattttgagagtttccggaggacttgtttccgcaggaaaaaacaaaggcgtcggggacactgcaggaaatccgataggcgcattcgcactgcacacgggacagccactctgtgctaattgccggattttcactttttaacgcactcacctcttcgacagaaagccacacaaaaccttttgctaacgaaattcgagccagcagctgcagacaggaactgagaaaaagcacaacgtgcagaactgcctcggtgccgcggcactcgaggatcgtggcgggagtgagagaagtgagaaagagggttccgcgaagaagcctgggaatggaattgccttcaaatgcgttcgttgccgttttcgttctctgctgcatcgaggcgtctacaccgcacacacgacctcgattcatggcatgtggatgcagggaggcgaatgtaaaggcgtttaccaagcaagactcttcggtgggccagaaacacacactgaaagcccagtgttctcgcagtaaacgacagaggacaggcgcgatcccgcagtccacgtcaagagcagaataatgcggttgtgtaggccgtacagctgaacatcacgagaaaccgacaccaacgtaacgcccttcacgtcatgaccgaggcgtacgctttctggattactgttgcctatcgtttaacaactacaagaggaaaacactgtcaggggattctgctctggtttcgagcttgaaaggcgttgtttatcggatccgagagcacgtcgttcaacgctctgtagggaagtgtttagcgtttagggggggggtttgcgaggacaccgagcctggttcctcccattcgctggcagataaagtccagttctgcctcaactgaggactcacgtacatgtcaaccgtagaccgcacagactgaaatgtggtggacgagggaatctcgctggagggttgctgatttttacaaggagtcttggcaccttgagcccgacccgtgtgtggaaacaaaatatcgaggacagcggtttgtttgtgaacgcgacgcacacgtggtaatcaagggagtatctggcttaacatggggattcaagcaagtacagaatgtccgaggatctctgctgtttccccatgcccgtaggataccgagtttccttgggtcagcttttcccgggtcgcagcggaaagtttttggattgctttactttctgtgacaaagtgcagcgcctttttccgtgtcctcgtctttcctgatctatacgcatgttggcttttgatcaggcacagtttacccgaggaactgcaatttgaatctgtgaggagaatcggaggcacaattgaacatcacctctggatggaccgtcgaggctcttgacgcgcctcagtctgagttttaccgagtcctccgtctacactctctgtatcgtaggaacgcatccctactcgaattttacattctcactccgtggtatcggccttgattcgcattcagtagtcgcccatatgcacaggggtgttcctctagttctgaaggaagcagaagaacggatgaccgaggttaccgttatgtgctatgcagtgtcacacgagatgaactctagaactggcgttcgctcactacagtccggtaacttctggtgaaaaaacggctatcctttaggttagacagtcttcttcacgcgcttcgtacgctgttgtgcagcagtgggcaaccatgtgtaccgagtcgatcagcacttgatccactcggatgacagcattgcccttttcccctggggaccaaaaaacgtttttggatgaaaaactggagtcatctctgaagatggaggcgatgtgtgtctgtctgcctcgcttcatccagttttgaccattcctttgtgctcaagagccgtctttccctttcagaaatcgttttcgtttttgcgcgagtcctcgtgcgctcctcgagtctgcgttttgccaggtttttctaaaggtgaaaaggtgaaaa

SEQ ID NO: 3476 - DNA, 4816 bp, Toxoplasma gondii
  source 1..4816: mol_type = genomic DNA
ggacgaagatgcagatgagtagcgagagggagtaaaaagggaattcgaagaagaaatgagagaaaagaggtccggcgcagtctcgcacttgggactgctgggcgttgccacatggaaagacatcttgaaaggtacacgaagaaaaaagaaacgcgaaaacgggactaagaaaatactaagaccacatgggggcacgtgagcaggaacaggttcgtgaaagaaagaaatgtagacagtttgaaagaagaaacccgcccccccggctagagggaacgagaatggggatgctttctgtcacgacgcttgcggttcaggactcacaaaaagacccaagaaaacagcaaaactgtgatttcagtaatggaacgaaaacgggttgccttcctgtaggacaaatacacacgcggtactgtacaccgttatgtggaatacatacactcagatggagaataccgaaatgctctcggagatgcctctcttctctattctctgagagtctggggcgtcgacgactgccagggagaagctctcgcaaggggtgagcagagtggggtaagtgcgcaagtgtgtctatctgggatgtacaaaataatcactatgcgcaagcgtattgagacgggcataaacagcttccgcacacgtcctagaagaatgccgaaaattgccccttccacttagtagcaagtctagtggatgcggtgtcttgctctttctgagcaaaacaagtacctttccccatcccctttacggttccgtttccacgctaacagctggtgaaaagaaacaggcaattgctagtgcactgcgtcgaccctccacgctcgttcctctgttgcccggagaaacgagactggagacacaggcgcgagagattccaggtgtcgttgacatgaggggaaacagaaagacgcatagcgtcttctcaatcgatccgcataggtgttgaggggagaagcagacaaaacgcctccaacggggcaacagacacgctcaaaacagaggcaaactgagaaccaagtattgcacgacgcgttcagtctccgtttctgcagctggaagaagagaaggaatgactttcgtatcccccagcctcagatacatgcacccttgacaaaacatcactttcatgtggcaagggaagatacgtgttttccgctgtcttcttcccctgttcgcttcttcctgtccatctgcccatgaaatgccgaaccgaaaaaccatgaaataaaacaaacaggtacgggaagaatggcaagcttcacgacgagcgagacggggccaatgacggcagggtagagcaaaagcactcagttaagcagacacacgataatcttgcctgtcctcggtctcagagagtgacccacggactcgcgggcacctaaatcaacttcttcggtagctacaaaacttctgtccccccactctaaacacttctcccctgcagacgcttttgctggctcgatcgctctcttcgtgtcacgcgaacaaaagatttacgtttctcgtctcgagcctgttgagcactgcgaaacgaggagcctggctgcggctctcacgcatcgcagacaagagtcacgcctcggacgtgcatctctccggtttcccgagagcgaaacttcttgcttgtcacaaactgcctccctaatcgaatcgtatatgcgcccctcggctgtgaaattcgcacgaaaaaaggcaaaagtgatccaccccgagaaggctcgtgatggcaaaaaggtgaaaatggtgtcacgcaggaaggcgcttgacagtccttgaccagaagagaaagacgaaaaaggcggcagacgtgtgaggatctcaaaaaacatggagaaaggggaaacataatactcacaatagatattggcttcttcagaaacctctagctttcgaacagccatcccttgaccagacctcacgctattggcgcgttgacccgtgccaacacggggctctcaccctctcttcttgattcgaagtttatcgtctcttctccagtttttcggttgcacggaaaaagcacatccttacttcgagtctcttcctcgatgtatctgctagccttctagctgcttcggcccaacgcaagccaacacgctctttcgtgcgaggtccagcgaatgtgctcacagcaagaaataccgccgttttgacacgaaaaaagcgaaaaccagtccttctcctcagcttgtttcatagcaatccactcggggactcttaccacttcatcctctctcctcctgtcttcctgcgctgagaagaactctaccccccaacattggaaacctaggagatgcacacatcgcttggcggatttagcttacacgagacgcactgatttcctttgtactatgcgtgccttgggcgtctggcgcactagagaattccctcttcgtcggctactggaacaccaatttcgcgaaaacgactgggttaaaccgggaatgagacagagatcccgtttcctgaagtcgtgttgaaatcgtctctaaaggcatctagccatagagcgcactctctgtgtcgttgaagaggctgaatattctgggttttccgccttccaaccggcgcacaaagccaaaggtttgatgcatgctcacaaaacgcagcccaattgactcacgccacgttatgggtgttcctggaaacgagaaatcttttgctcagaaaagcgcccaaacctacagtgggtgggcgctacagccttgctttgcggacagtctaacttcgtcccactacgggtcgcagctgaactacgtatttccaaagaaaatcacgaacaccttgacagcaaaaacgtgcttctgaacagagataaagctgatcgagaccacccgggtccagcttaaacccaaccgatgtgtgcgaatgccaagagatcctttgtgctataacagacgggcctgcttcgtgaacgcccttctccaacgcttcgatcaagcatttatctccctccccgtttccggttctaagccattttatgcatcctgtaacgggatgatcgtaagcggctagacaaggtcgctacaagagaaatctgtttgcttccagcgcgaattggactccttgtcagtgcacttctacgggaatatggggccgcggtgtccaggcctgttgtactcttcgtttctcaaatgcgacctccgatctcaccgagctcaagcgtagcgcttttacctttttaaaacacccagatcgtgttgaggaggcgagcaaatgactttacaaaaagagcgcagtcaaagaaagctcgtgaacggcgtttcttgacatcttaggtgatctttgctgccctggtctagtgtttgttggtattcgaacgtatcgaggaggtttgaaccggctgcagctgagtcttttacgtttcacttttttcacagacttcaacgccctgacactcgaacgagggcaacaagggagaaggcagccgacttcagcgcgcttcccgtgccggtcgcgaaagcgctgcttgtgtgcatttgaaaagccggtttctcttctacaaacagtgtgcccgaatggagacacacgtacgtgccgtggtcttccttcaggttgctgctttccttcttttcgcttcttcccacacactcgcgcaggttgccggtctcagcgaacggtgctgcccgtcgatagagttttgataacacgatgtaagcgacacaacgacaggttgtgtggcacacaccagttgcggctgagagtcgaggagaagtaggttttgtaacacaggcgtttcttgggagtgcatgcgagaaaagtgcgatgtgcgtgtcgggtcagcgtgtggaggctagtgggaaggcgaatttgcggtggaggcgagaggggctacgcctctctgtctctgcggcggctttgtctcctgcgggtcctcctttttctcaagcgtactctggcgccccggagcagtcgcgcttttttgttttttctgtggtccttctccgccgtccatttttctccgttttcgctctctcgcactcgttggtttctcgccgcagtgcgggcagagctccggcgcgctcggaacgaagacagaggaggaaggcgtgagctttctcgtttttctcgattttctggtttgttttgtggaggacgcgtgtcgactcactctggcggatcccccggttttctctgcggcacaaacgccccgttccttccccctcagagaacggccgcacttccctccgttttttgcgcaggtcgcgaactccccacgccgcctcttgtgcaaggtgaccactgtggagaaagcgtgttttttgctccttaaattcttcccgtctttctcagacttcttttccttctcgtcatcttccgttctccacactttttcgtttccccaaccctccgccggtcccccgcctcgccggcgttggtcctccgccgcctcttgctacgtgtctccactttgtcagcatttttctggcggctaaaaattcacaaaattccccgtcttcccactttctctctaagcaaactcttgccaccgttctgcgcgcttgtgtccccggttgtttcactcccctggactgtgttgtgtcgattctccacgtccgagtggacctctggacctcgaaagggacccagcgtttcccctgcgagtcttccgtcgcatgcttcacgaaaaaagcgttgcgactttgaaaccgtgcgttcctcgacactttgagtgctccacacgtttcgccatctctcgcggaaaaggattcgccgcgcgactctctcctgtttgccgcactccgcatttgcgctctcttgcgcgttcgttctgcctgaaaccttccgccttttctcggttcaaagagcgggaaaa

SEQ ID NO: 3477 - DNA, 4054 bp, Toxoplasma gondii
  source 1..4054: mol_type = genomic DNA
tatgctggttcctcaaactgcagtgaaatgaggctgtttcgcgttttccgcttgtttgtttgctaaatgcagactcaggaagacttggacgacatcaacgtcttgccggagttcttgaactagattctctttcgcctctttcaagcgcgaagatgtttttcgaagaaaagtctcttatcgaagaatccagtgcgcgaaagtcgctattcgactgactttgctggacacgctgctccttcgcttggtttttgtggtcgatatgcaatagctaagacaaagggaaagcgaaacggccgtcaacctcaaaacgagccgtctgcgcgtcgagtttcacagtctttgtgtcctcagccaggagggagtacgtggcatctttcgcggggcaatcgattttctccttgtgtcaacaagctgcactggcatattcggtgtcgcgggagttttctctgttttacccgccatacttcgagggaacctttgttttcgttggagcctcatatcgaagatttttctcttatgtataaacgtggcctgattcaacgtattaattgcagggtatagtcgttctctttagcgagcttattgtgcgaatcgaacggcggaaaacaacgccgttggtagtcccgcggtttgatagggggtacacccagcacgtctctcaagccaaagcttctcagatatggccaagaaaagcacagtcccgttaaacacacaacccactctccggagcaaaagtgccacataaagtgctgaaagcccgattcagacgagatgcgactgtggatgtctgagtaatgtctagcgacgaaggaacttccacttttgctcgactaccggtgcagagtcctgcccacagtgggtttggctgaatgcgacgagatgaaaatgaactgggaatacgaaacaccggagcaacgaaagggtgacagtcctctgtttgtgcccggagaagcctctgacacgacagtccgtacattgacaggaactgattcacgcagaaaggaattacaggagccagatgacacatggtgtgaggcttaatgagattataaaattgtggtctcggagcacaattttaccagctgaagaaggagtggaccctttacaagcagggactgacgaagttgtcgccatccatgtctgacggctcactgccagtacccagtgacctacttctccaatattcttttaggctcgacatcgacggcgtcgctcaaactgaatctcaaaaagagttcgtttttgtgccatgcgacgttttcttccggagtcttgctccgccgtattcgtttggagcacaagaaacacagggacagagctcgacgagtcgtgccttgcagtttggagagtggcgggctcccgactccggcgtgaaggaagagacagatgacagacccactacttcgcgcctgtctctcatttttacatccttttttcacggcgaactcctgtgcatgggctgcattcatccccagaaatgcatttggtttgcccttccaatctagtcaaaaccggtttttcccagtgtggccgtctccaccactcccgccggcgtgttatttttttcatttcaagagcttctcgagttttcttctctgcgtttctaaaactctccaaaatgtgttacgaagtaaaatgtacacactgtggaaagcggacgtggtaagtgcgtgtctgcacggaaattcacgcagtctgaaaacagcttccaacaaactctgcatgctgattactgcgcgagtgtgcagtttcaccatgacaatcaaactggtctgacgaagagaatccattgcaacggcttctcgtggtatttgttggtgacaaggctttcgtgtcctttacatcctcatacgttttgtgccacgcagcatgaacaattatgtattaagtgtgtaccactgattgtggaaggctgccgagaaggtgtgagcccgcaggcaaggaatcttggaagagcctactcgtttcccttgaatccaggtagcctgtatgaattacagcggcattctacgtatcgcgcacttcactggtaataatgccacacctacttgtcgagctcatctctgacagtacaacggcttctggtcgtcacgatagcgagttggttttctgttaggtcttctgtttctcgtttttactaggtatctacctctgtgtggcgtttcgatgtctaagctagagctatgattcttgtgttggtgaatgcggtgtggcattcttttctcatgacgaccccccaggcgtgctggccgtgcgtcctgttcacttgatggtacagacggatttgtcgctgcttcgacgcgaaaaagtggtttttcaggtttcgaatgttacaacgctgtgagcacgtgtgaattatgtgtactttgtttgttgacgtatcctacgtcaggcaggggtgcggcaagcacatcgactctgtcatgaagcccataccggtacaggagcagtgcgcgtgcaagccgcgatcccaggatgagttcgataaatgccggtaatctcaatagggtggatgcctaaagagcgtctcgtagctggagaatcagctggcatgctcgcagtgagacttcatttcttcggtgtgtcggaatgggaaagtcaaagaaagggacgtcacacgatcatccagaaggaacgggcaggctggcaagcgacgccatatttcagaaaaggcggcagttgaatatgacagtacgtgccttgtctatcgaaaatgcgcatatctaaagtggcggaataaacaatctatgcatgcggcatataaggcaggtccacacctccactgcacctgtaaccgcctatttcattgtacgcgcagattttctagaacggctctcaggggatgctagagaagatgtgagtggtgtggctactgccatggccttgttgtgtgtgtccatccgatgaacctgtgagagaaactttgttggaaggacacccacgggacagcagcgtggagtttacagtccgcaacaacggagcgaaagtgtatctgtcagtcaggggaagatccgttgtcggagacgtgcctacagaagctgtatcgtcaaagataatagacggcaagggtatacagatctgaaacagtttccgtcgtggttcattatcagtggacgccgatgtcgctgccaacggtttgtaacatgtgtgaaagccgatgatttgcgcattgtggaccgtcgcgcctagcagactctcccaggttaaactgccacgcaccgatggaaggtttacggctgttttacggaacacgcaggcactgttttggcgaaaactgtcaccattgcggttttcatattgcgagagatatgacccgcccgtgctctagcgtcagcagtcgctggcatctaaacaatcatggttagagacttcaactagaacacgagtgtcagatattgatttcgcagtagtttcgatgctgctctttcacattgggtaaccgcacagtggcggttgtgtaatccggacagatccaacgagggggccgtgatatgcacgtattgtagttataccggcagagcgacacatgatggaggggtttccacacacacttactaggcatcactcagaagcgcacagtggtttttctgacccttcagttttcgcactgttggtgactccatcgaagatggacagcaggatggccgccgactgctgcactgtggctgttgggggcacccaggtatcataacaggttcaaggtttcaaacgtgcgaatagtgtgcaatagataaactgtacgcaaaacggtgcaccggatgcgtgtagctctgtattcctcattttgtccatctccgaaaacgtcttgacacaggctgttgacgtcgttgctcgctgaaaggattttcaacatgacgaccctgctcgaaacgaccgacacggctgtcgatctgtggcaatcttcatcacgactatcccgtatcagtcggtctgttcatacatgtttctaccaatttgtagtgccaacctaagcgcgtcaacattccattttatttttgttcgtctccgtaaccaaatccaggtctccgcactgtcgccgttgatcacatcaaaa

SEQ ID NO: 3478 - DNA, 2015 bp, Toxoplasma gondii
  source 1..2015: mol_type = genomic DNA
gaagaacaaagcagaagagatcaacagcgataaggacgagcgcagcacagagcgcctttcccatgcactctccccacaccgggttcacggtgcctgtctgccaaagtctgttttccttccctctcaagaaaataaagcgcgctcaaacatgcatcgacgagtccgcacacaagcgtacgtacactcctaaacacacggacgtcccctgaatgccacgcaggaatatatatatatatatatatgtataaatctatatatatatatatatatatatatatgcagatctatatgcatatctttataaaggtgtacgtgtgaagatgtctacggaaacgtatgcgtatttgcccagtttgccgttgttcgcccttctcgtcagcggtctctgagatcggctccggccgcgtacccattgatgttcatgcgtggagcgttgatcgggacaaagaagcactcgcgtccgcttcctggaacctcgaagagaacagcctctgtggagtgagggaggaaaacgcagaggaaaaggacgacacagaggaaagaggcgctctttccggccgcaggtttctcgacagccgcccgcctgaggtgagaccagaacccagaactgcctgttgttcggccaggcgccatcttcgcgtgcataaagaaaaatggaaaaggagagagcaaaagaggaacaggagctacgaacaaaaacaaaggttttcacagaaaatttgcggagccgccagacaagagacaggcggtgagccgagagaggaacctgggcagatacttggcggcgacggcggagggaaagagagagacggaagagaagacgcaaacggagggtggaccgaagtgaaaaacagagaaagcaaagagaaaaaggcggaaaggagaggaaaagaggaagaaaacgcacaggatagacacggttgcgagctgcgggcggcagtcgtcggtctctgagaacagaagacaaagcaaacgcgccgttgcgttcttttcgcgaccagtcgaaaacggagtggagagaccgtagaagacgggagagggaagtggcacggcgaaaaagacatgaaaaagaggcgacagtgtcggcgccggcaagacaaggaagcgccgaaaccagaaatcaaaaggcgctgcagaaagtcaggggaaaacgaggaccgagtgtacacactgcggtgcactttgtatcacgcaattagagaagtctacgcgccgagtgcgaaaagaaaaagactggctaccggcgttccagccgcggagggggacttgcctggcaaaacagcaggcctcttcgaaaatcggactatacttcgtctcactctgcgcatgcagcttgaccgcctctccacgttcgcgctgcgctcgctgcgctgtgacttgatgcgcttttctgccagtcaagaaatgcatctgaaggtttctcgcggctgcggtcgactggcctgagctcgaaaagaaaaaagcaagggtcgagcggaaaacgaggttgcccgtcctgccaaacctccgcgttggcgtgtctcgcggataccctctcacaggcactcgctttgctgtaaatacgcctcaagccgcgcccttggggacctttgaggtccccacaggaaccgagttcgagttcgagcgagtttctcaggcgctgggccgcatgtcctctcttttccagttcgcgaccttctccgtcggacgccgccctcaattctccgacttcctgggcgtttttctccgcgcccagccgcctttccaaccaagaccgcggatcccgcgggcagcgccggcggtcctggaggtgtatgtacaccgcagaaccgctaatacttctgattggtggcggagacacccgctggcgctagggaaggtgtcgaagtcactgccttttttcgcggagtgatccatttcatcgaagaaacacccggactctcgacttcgactcgtctgaatcttcttgtcttcgtcgcctctttccgccctcgcctttcgtttttttccacttcttcccaacaacttcggcacga

SEQ ID NO: 3479 - DNA, 2589 bp, Toxoplasma gondii
  source 1..2589: mol_type = genomic DNA
cgtagattgtccggctgttcccttactatcgtctcgtattacctttttctctgcctcacgatgagctctactgggatctcaacgaaaaaagtggacctcccgtgagtgatgcacagcagtgaggcgaatgaacataggctccgtgttttacgacacacttgagcctagcggatattgggtttgtgtttagttgattgctgtgcacggcgtcaccactttcctgatcgccgcaacatgttctgagagacttcgctgcgttgtctgtctatgggacgtgttaggtctcagtcagtccactcgattttgtatttttagcgaaactaccgatatgaactagccggagtttcactggttgaaggagttggcaagaaatctacagcgtatgaaatctagacaccggagtcgctgctaacttcgggtttctgtcgaaactcgtgtatcctattcacagaagatgcgggacaagaaccgagttcccccagaacactctcgacgcggttgacatcttgagtgacatcaactacgggtctactgtcgactttgtttcctcaagtagaccgcctgttagagtggaaacagtaaaacactagcataagaactgtacagatgacacaccgagaacctacgatatagttgttaccttctaaacaaggccccatgaatttctagtgtgaagaggaggcttctttgcgctaccaagtgcagcatgtatagccccagaagtagagtttaaactacataggaatcgcgtattatctacatgttcatactcggcgtgacaagcgttcatccagtaactaaattggttctaggtgaacaagaatccgatccgtgtgacccgtgcaaactaacatcaggaaggcgaccatgaaaccgagcatgaatgcatttctcgttttcattgagggatgttcgccggcagaaatctggtagatgtgagaccgggacgttgacgaggtcaccagccaggaagaagtggaaaagtaaaattttctttgattttggggagttctgcgtttgtggtgtttgccagcgagtgaccatgcgactcagaagtatcgtcaaagcaatgtttccacgtgtttggccgctgggacaagtgatttctgcctgggcttctgaatcctatcgactcggcacccgatgagtcaaactcacttcccctccaaagagactacgggaaattttgggggcgaagaagtcttgcgatcgctttccagaaaaatcaggtgtttttcagcaacctcgtttcttctactgtatgcgacgtgacccctcggcctgaggcactggttcggggtgttcctggacgcgacacttcttctggaacaaaagttgggtacctctccctctcgaaaaacggaaaattctgatttataccggaactgacaaacctctgtctactgagggttttcgtccccgctttccaactggttctttatccggagaaggcgtccttcctcagtcttcgaagccttgacagtctcaggcacaaggtctcttagcgttggtccgcgggaaccccccctgtctcgctttttgccaaggcgaagagagtttttctgctatgtagtcttttgaggagaaggatgtgcttccttggactgtttccgttgtatttttccgaaaggcattacagacaaaagtcaaatcgcagctatgattcgtttctcgctccgacgcgtttgacgcccgtctacggtctccccgtcttccgattttacggtctgtcgcgtgcgttctgaacgctgcctcggaaacttcttgcaaagggattgaaattttgcgggccgctggcctcatttcgcttcttttccagaaccactgaaggctgctggcttctcagaggggattagctgcgtgctgtggataaagcgtccgtgtgtttttggctgtttgtctctcgcgttctgcccgggacaagaacaagggaaaagactctcctttgtgtgtctgcaaattcccgcagtccgcgttgcccttccgaagaagtacttcgctatcgttctttttttttggtgattttgctgtgtctttcgttcttttttgcgaggcagcgtccatagaggtaagctggatttcctgcccgcagagccgctggcgtggaaaaaaaagcgaaatagcggcgattctgaagagcgaagactgccggagcgggagtttttgatgtgtcagcgaagaggctttcttccgcgtggcgcccgttgtatgcgtcgagcgtttggctgcggcacgtggacttccccaggacgacatttttttttcgcgccttttgcctctctcgacgagaagatgccgtggtacgtgtccgtttcttgaatgtggatttgtcagtttctcgcaatccttttataatttgttttcgtctcgcaagttgcagtgcgacgggacgtttcgtgttgtctttcacttcccacttggaggaagcttcttcgactgaagaaagccgtttttctctccgtcaacggcacgaacctctttgaacgagcgtcgatgcgtgcgtgtaaaggccccgcaaagaggagctctcgcagtggagaaaaaacgctgggcgagtcagggctcccagcgaaaaggatggggagcgaa

SEQ ID NO: 3480 - DNA, 2969 bp, Toxoplasma gondii
  source 1..2969: mol_type = genomic DNA
gaaagttgttgaggtagtctttcctagcgcattggaagcgagcttgcgagactgcacaggatccgctgtgctcgcaggccacaccgcgaagagtacagggagggagatgcagacagacctatgcgacaagctcgcgaggcgtgaacaaactctggaaaattatgtcctcataagtcgttttttgagggcactcgcgaagaaggagaacgacgagtttttccggcgtctgcacaccatgttccaggctcacgtcgctggctgcacgagcagcccggcgccctcaggggttctgcatgaaagcccgaggccgtctgcaagtgttattctttctgtggatttacctaatggcaggttacctcttaacggtgaaagtgctgaactcagcgccgacacggcgccctctttcgaggctgaggaccggtcagagatccagcagagagggacggtagaacgcgagacaacgcagactaagcaaagcacatctggcgccgatagtggagttgcgaaagggctggagccgacccaatacactgcgggatcggatgcaaccgcgccggtgtcagcaccttgttcgccgaggtgtcactctgcatgtggagggctgccggaaatgcgtagaggaagccctagaggaaatcagaatatgggtgaacgctcgcatgtggaaccgatgttgtcaggaaaacacggtaagctctccggagcgcaggtagatgtgggagatggaaaaacgagggcgaggaacgacccatctggagtgagcgtgacgaaaaatacgagtggcggctgtcataagaatggaaccggcagccagtcacgactccgagagcctacagtgacggaggtactccgcgtcttaggctggattctcgatattgacgacgaacaagagggcatgcggccgaaactctaaaccccgccaacgcactgagtgcattattgtctgtgtgtgtgaggagctggcgggcggctttgcgaacatattctactcttctattggggcgaatgacgcatttagttcgagggcgctgtttgtttcgcttactggacgttggtgacacatctagtgtaactggacccacgtcagggatctttaccagtcaggtgtgtacggccacaaacatccactgtgtgcatgtctatgtatttccagaggtgtgcactgtcagtccatgacgggaaggggaggggaggcggaaattatcaagtgtgttccgagtttgtaacaccgacccttgctttcaaagaggagcatatcgtgtgaaacagattacttgcctctcttccctcacgtacttgggcgtgtagatccgcactgtccatcctgcaggtgtggcaccatcagtcattgctggcggttgacagctgcagatcagggcgacaccataacgtgtgtgcaacgctatttaataatgtgcgggtggtgatctctttcatgttcttgtgtccaagaggtggtctcccaaactgtccgacaaagtcaaattgaacccagtactgacgacgagctgtacggcctagctgtcttcgctatgtcacaagcagaaccactgcgacccaatagcttaaggtgtcctgtagtttactggtgatcaatttctacttgaaatgaaaaagtgtgacaccaaaacacaggcagtggcaggcatgtgtaacaataaagtgggaagcaaaagaaatgcttctggttcgggccagcacaactcctgaagctgccgacgacatcttggtcacaccaggcgcagctgactaggccatagacgtcgttgctgttagttccctagagagttgagataaaatagcgtactgaggaacctgacagcgtgtttttttataaactactggaggctttatcatacccactttgcctgtcattttgaatggtatgtacggctctcggagatgtgtatcccgccggcagtcggataaactgcagaaacggtcgcccgcctgagaccactgaaggcgtcgttgttgttgctttctggcatcgtacgacggagaaaaaacactttatcagcagatggtcggtcacgtctctaaacaaaacagtggcggccactaaaacgccggtcgttaccttggaccagaaggagtgtttgcggccccaaaatgcatatatgaccgtcctacagcacatctgtggtgcttctccttgagcatcgcgaactggcgcctcgtcagcgaagctgccagattgcatcaagtgacctacagattcgagcccaagtttaaagtctcggcgttttgccgtttgggtagctgccgcaccacgatggcagccgcgaaaaccgtactctcctaggcttgcagaaaccaagcgcgggactggaccagggcgacacttgctcctggaacgattgcgcggcgaaaccatgtcaccggatttagcgacgccgtcgctatctcccgtctctaaaggaatcgcacccccctgttctaagccagtgggttcgtcgcttaggaagttgcttgagagtagtcaggaatatgcaagttgatgtttttctgtgacctcttcctgtgagacttcggcgagtttccattaagggagggcatacttctccttgagtggttgtcgtttcgtcgacaacgtgggtgtcggcagagacaggctcagcctcattcagcgaaccactttcggcttttcacactaccggtcaaagtggcaggctcgtggaaggactggccctctcaaaccgatgatatagcatatgcgtagcagatgtcgttgtggcttcatgtactaagtgaccgtgcattgaaaacagctatttgcaaagcttacgcacagggcccaggatactggcccctatcgagtgcctgccagtttgaaacttttgcttttctagtggtggatgcactatacccggtttattcgactgcatgcatccggtgggtccattcaagacgatctttttggtaacaatttctactggataaggtgatatccgcaatctgctacacga

SEQ ID NO: 3481 - DNA, 3401 bp, Toxoplasma gondii
  source 1..3401: mol_type = genomic DNA
ggagtctgtggccactctaggtcgctggaaactgttggagaagaaagggaaccgacacaagaaggcgaaagaggactagaaaaaggagaaggtgaacaacaagtggaagagggaaggaaatgttgcagcggggagactggtgaagacgagattgagggagatgaagacgacaagagcagggacgttcgtgtcgcagttgttttccgtccccctaccaaaggcaaatcgtggttttctcttgcctcttcatcccggtatcagggaaggtgccaggtgtcggcacacccggcgccgccttgtctctcctcccgtcatcgaagaacaactttccatcgatcaaaatgtcgcaagtgttcacgcagaaagtccctagatgcatctgcgaccgatccttcttcaactctgatcacgccgtctccttccttttgtgagtcttctcttccttctctctccttgcctctgtcttcagctcttgctgtgcgttctcgactctcggacttggtgagctcctgtcaaccgttttctgcttgtgaaaagaatcttccaaggtctctcgcaatgcggtctgcagacatgttgtttgggtcgttggcaaagaaggaaaaagagcgacttccactctcttcgtctccggccaatggaaacaggcagaagagacaagggagacacggcaacagcgaagcgcaagagcgcgagggcagcgaagagaacgagagtgacgaaggaagaaagcaactctggaaaaacgaagtgcagccgaagcaggcgtggaaggtgaagaaggtggagggagcggccgagcaaacgaacacgagaagtgaacagacgaagagcggcaaagaaggattctgcgttgtcgcaagaaggttccaaaagaaaagagatctttctctcggcggcactcaggctcacgattcgtctgctgtcgaccacgggaggacgtcgcgaaaacgcgttccgcgtacctctcttgtctcacgcgtgtttcaggaagatgcagcattcacatgtgcctctgtttcgcacagaacgaaaggcaagatccccgattcgtttaaagcggagaaggaattaaacgtttctctccgtgtccctgtacttccgccggccgtttttttgccagcgtttcttcgaggtccagagacagccagaggagcaaacgagagaaagacggagagcaggaacgaattgggagtctgaaggtgtttctcggtgtccgtgaatcaagcttacattcctgtcggtagaaacaacggcgcttgaaggagaatgtaagaggtccgcgcgaaagtaaagaaacagtcgacgcactgcatgggttcttcactggcgtcttgtcatcagagcagagacccatttttctctgcgttgtttcttttgttccactgcacacaatcactgagtttatggataaagtagcattccccgttttcttctgaatgagagtccggctttttccattccaggcgaagaggttgtgtactttcaaccgttatttctgtaatacccgcaggtacacacttttccgttaaactataacagcagttactagccttctctccgctagtgtggttgcacaggaccagatggcaggccctgaaggctgtaagcagtcactctttgcttggagatcttcactgcaaataactgtttactagagcgcttgttagagtcattgaaaaagtgtccttttggcggcgttgctctttctgcgtctctgcgacagtgttccagagatctggtacgtccgtttttctgcgatctatcatgggtgaggaagttccagagaccctctcgttttcagtgaatttctgtgaagtgtaactacccatttacccacattggcatctgcttctttaaacacgcttgtcttcgtttcacgttggtgatcgacctcccaaaccatggaggagaaacaccgaaaacacatttctttgctacatcatcatttcgaccactgattcacgcactttctcggcctcgagtgaaactgcaaacgcaaacctcgcttatcgacactggacaacagtctcgctccacgtacgagctgtcagcgtttctatttgatttcacgggggttcccttgcctccaaagaagacagtgagaaacgtgccaccgtagaaaagccaacagacgaacagcctacgagcaggtctctctcatgttgcgtcgttcaaaaagggaagtgaatgccggcccgccgcaaaattcccccacgaaaagctccagcgtctagcgcgggtattcgataggaacaccataaatcctagctcctgctgaatgccagaagaacgcccgaaccgactcatactaaatgagcaaagacaaatggataggggaactcttgatcgagttgtcttcttgttcgtacatctacgggcggggcagcggtacagccgccagtatgagccccgcaaattaccttctgttgtgctttgaacaagcatctaactggtaaggcactccaaagaagaagtccttgtgtagtttgttgcaaaagcgtgacagaaacgcagaaaattccaggaaatacccataccgtatgtttcgtgaggggttcgtcattgacaaactacattcgacttcgcactgcctttgcttttccgtgattccgcttcccattcttccaatagtggagcgggtttcgaaagtgaaataaaaagcagcgatatacatgagaagaggaccatgatcgacgcaacggttgctcgtatgattttcacgtaccggtacatgtgtgcatgcatttccagctgttttctcccatgaggagagcaaactgacgctcggtgtcgcagtctcagcagggaaaagcgaccttcagcgaccgaacggggaaaccgaaataagcaaaggggtgccgtttcgtcctttccttgccgtatgggagtggaggcatcccatgtatacgaaagaggtgattccggacgctgtcgaaactggaggtttgccggtcagacttgttgacttttgttccgtcggcgaattttctttcccagttgtggaacgtcatcgcgctattcgtttctcccggttcctcatgtaatttttcttggttctttaccgcctcccttgtgaatcacactgcttctcggccttgacagctgctgctcgagtgtacgtccactgaaagttagtcgtccgttcgccgcgatatttttgcctggcactgccggaactgccagtctcctgcagcctctcgcgctactttctttcttcacgtccccgtcttcgcttccttacgtgttatggattaaatccagggagattctctctgcgttttgccgtcgtttctctggagtcttcgcgagagaggcagcgcgtttcctccggccctgccacaccattttaattgcaaaacgaaacgatcgcctgcaccgctctcttatgcttccgtaaa

SEQ ID NO: 3482 - DNA, 4411 bp, Toxoplasma gondii
  source 1..4411: mol_type = genomic DNA
ctctggagcaactccatcattcgctcctggaacctcgcggactcgtcgccctgagaagctggggctccaccaggcgctccacccggggcctgcagacccggggcgctgtagtacgaaggctgtaaggaaggcgaagacccaaagccgtaccctggagccccgggagccccggccgcccgtgcgtacggcgcgtactggccgtggtccggggcagggtacccaggggtcgcgtagtgacccggggggctgccggcccccggggtgccaggtggcgggtacgggctcgagggtgggtaggcccccgaggcctgggggtaccccggcatctggcccgggtacccctgagccaggtggcgctgggtctcgtcccagtatccttcgccctgcggggcccctgtctggccctctggccagtaccctgcctccccggcgaatccctggggaaccccctgggggtagtgcccagcactggggacgccggatccgtacggagtcccgggggcgacagctccgccgtacccttggccgtacggcgccgggtaccctagcacggcttgcccaggggcgcccgagtatccgtacgccccgagggaccccgaagcgtcgtagggcgtcccgggcgccgagaactgtggcgcgcgcgggtctacgccgtaggaagaggcgtcgtacgccgcctcttggggagggtacctgggggcctcactgtcttctcggaacccaggagctgcgccgttgtacaggggcggcggggcaacgctgaagaagcggtttctatgcagaagagcgttgcatacggaagggaaccaaacacaggaacgcatgtcccccaaagcgagaggcccggaacccgtggctgcatcgtagggcaagccggagcccgcgggcagctttccacagggcgagaaaagcaggggcgcagacgcgaagggccgcccggaggccgaaggcggcagcgagaaagcaggcgcggggacagcagagacagcgggaccagccgcggcgttcgccgccagctttcgccttgtcgccttcgagaggcttgacggggcgatggggactcgcatggccgaggaagtggggagcagagaccgagacggaagagacgaagcgcaaggaagattcgagaggggcttccaacaaaacgatgcagagatctcgtctggacgcgcgcggtgaagaggagaggagaaacgcgatttctcggagaaaaggaaaaaggcagtctcgcagacagcgcggtggtggtgagcaaagcaggcaggcggtgccgggcaggcgacagggacgagacacacaagagccgagtcgcgaggttttcgcgcaaggcggggggaaagaggacaagagaaagaaggcaaaagaacttgtggcagaccaacgacgttggatcgacatagcgagtggccgctggccctctctcgactgcatgcacggaagcttcggcggccgcgcgcgacagcgacaacctacgcacacccgagacacgcacgaaatccgttgtgtcttatgaaaggcagaaaatgaaactctgacgctgtatgaaaaatgccagcgactcctcggtcttattgacttcgaaaagagagaaatgcccgcgcaaaaacgggagtgacaaccgggttccccgttctccagagcgagagcaagccctgcgagagttcggaaggccgccgacataggagagccacgaaacagtggggggaaatatatcttcgagcacattctgcggcgtttgtaaagtcattccatccgaaaccggtggcacgattgtctctgttttccatctctcatcgatctacgatcttcaggagatgcgagctgtgaatgcccgtatggtaaatcgccacttatgcttcaaagggtagtcagtgagtgggtttttctctcatccgaaaggactgtcgctttccagacagagaccaaacttcttcccgctgtttttcccctcctggcgatttcataaccgccgcaatttctccattgcaaccccattccctcgcccccataccactagcgacagcagtctcgtgatagatcgagagattcggggctgttttgtgctacaaagaggaaagccacaagctgaaaagaaagtggggtgaagaaatatgacaccgaaaaggatatctgtctcgattcagctgtcgttttactgtaggcgtcccagccaggtttaggaggtcagagtttaaccgggagccggtggacttaaacatgcaaagccgagtgtcgacttcgatgcacagacgggcacaatgactccaacaatacttgggttccaggaagaggataggccttacgaggacacaagaattggttcctgtccgatgctgcctacagcacaaggggaaaaaacggtctaagggaagaagctaacgatcgaaaccacctgttttcttcttatagacaagttttcctattccacgaaatttacgcaaaaagtacacaagcaactccaagagcgcgcaggctttttaccagtcgatctggtggttcagaactcgctttcacaagaactatgcggcctgttgtttcctcgtaccactaggttccgtttttttcgtaactcgaagtatctgtttggaacttcgcagtggtctggggctgacagtgtctccccgatgtattgaaattgctcgttcagggttctcactccggaggctccttcaccgtccatgttgacgttggagcatcactccggacactgacgtcgttgtcagcgtgtgaagtggtgtcccggttcgacagagttgcttgggtgctaaagaagtggagcgaatgtgtgaggacacggtactttcattccacacggaaggctgctccgccttcagctcttcactgcagctctcgcgtctctagaggctttctgtcccgatgtacaaagtctctctgtgtacaaccatctttatttcacgcgacatttctcgtatttcctaaagacatggttcaggagtcgttgcttctttcgtacaggacggaacatacatggcaatgaacttctcaaagcagagatccttcaagaaattcaggttgcgttcttagggcactgtcactcacttgcagtctcagtacgggcagataattacgaccaagagaatgtcagtgttccattcagaacggacatcgggctggaacccgcaaggccgcgtcgtcaaaggggaaagagctgcttatgtgactttttgaactgcgttctgtcttgcgcgaatgtgtgaataacgaacaagtgaatatccgtcgtaccttgtgtttgacctgtctgcacacctgaagcaggatttcgaaatttccccggaagtcaccagtaaactgtgtggttctgggtgaaagcggggcggcagtttgcaagatctaggaaaaagactagggtaagttcacgaggctgcattttcttttttcacagacccaaccgaaactggcacaaggcagggataaccgtgtgtggtagtgtattctttccttgcctctctctaacgttctgtttcatcttggtgaagaatttccttgcacgcggatccctctcttccgcctctcctctataaaacctagacttcttgtccgctcgtgggtgctctgtactgggtggagtcttttgatgatatcattgctcgtctggctctgtttctgctcgatgtgctacgaaactaaaggaaagaaacttttgccgtaaagagcacatttctgagaagatctattccccacggaggtgagaagagagtttgcccgtgccttccgtctgttccgtttttaaacctggcattagtttcagcttgttttcctgcactctgcggttctgcttccccagaatcagagaagagaattcctttactagaaagagacggaacgattgagtgatcttctttgtcagatgctgacaatatttcgatgaagtacaagcgaaggcgtggaagtttacttccacccgcagctgtggtgtgcagagtagcttgctggtgcacgcgatgtgtggctccgacgcttttggagtttgaatgtggtggactttcagaggcaagtgggcgtagaaaaatgtttaacatgtttcctgagattataagtgaagaatttggtgtcttctttcccagcacaaaagcgttcctgtctggcgttccctgttcctggcgtcgcttttgactcgttttgtctcccgtctcgtcctccctggtacagctggccacgagcagtgtgacccccctcgcgttcctctttttttctcgtttttttctctgttgttctgctcgtctgcacgtttgtgtttcattccagtttctcgctgcttcctcacgcgattccctgtatttcgtggctgagatcgccaatcttctgttcgcttcaggatgctcgcctgaatccctcagtgctttctcgccttgtttccgcctctgtctcgtcttaaattacacgcgca

SEQ ID NO: 3483 - DNA, 2294 bp, Toxoplasma gondii
  source 1..2294: mol_type = genomic DNA
cctctccagaagtgtaaatgtgtaatgcaaagaacccgatgatcccaaaattgacaaggatttcgatttacccttatttttgaagtgtcatccgtccaaggaactccggcgctctctctcagcacgcgaaagcaatggttcacaagttaaaatactttattctgatcacgcctgttaaagttacctgggcagaatacgtatgttgtgattcaattatattttttcggcgcgttagcgcttttctcctcgccagagagtagtgacggcttttggaggggccttcacgattccccccaataggaggaaacacactacgatgtatgacgcacacgtgtacttgaacacgagttcatgcggttgggctgtcgaggaggtctacactgcggtaggaatccacaggcattactccaagcacacgcagcaactgtttaactggtcaaaaaacagtcttccgcagctttatttatgcgcttcagtcgatcgaatcaagtttggccgtcagcttcggctacgcacagcgatggtttctgcttcagcgaagaagttgacgcagtcgaatggtggttgtgaactaaggcttctggcagttccattcctgaactgatcactgatgattgatcactgcgaagcagctttgattatttagtgatcatctttaatgccgcggccagtgcacggatcaaactgagcctctccggcttcattcaagccccttacgagtgacccacctggagtcatcgatgtggttcagcggtcatgatagcaatattcctcgctcttgacccctcactacaaagaaacagattctcaggtttcagattcttcaggctcccaaaactccagctgaatgtcgttgtccatgcgtttacaggcggttcgccacttatttggcctaattggttacaacaccttctaatgtatataaattgaaaattggacttgaaagctcccaaaaagagcttgtttggggatggagatagctcaagatgggagggagcgcctcgggtgtccatttacgtaggaaaagaatctgtgcccgggggcgtagcggtgggtgaattcgcgctctgtaagccgctgtcttttttgtactgtaatgggttttttgagcgcagccgcacccctgtaagtgtttctctttcttcgagtagtctgtgagctcgaagactaatgatgtggcggatatttgaaatgcgttcggaaatatcgcacctcgtgtatggcgcaagtgagggtgcttgtgtttcatcccgctcttttgaaactcatctttgggcaggttttctttccctgttgttatattcttctaagattggggacgaaactcatgaaaagagccaagtgtcagtggagggcgtctgtcggctctagatcacggatttcgttcccggctcaaattttgcgttaaagctcttcccgtgttcgtttcttgtctataattaactcgcgtgattcgcagaaagtggttatttttcctatatcaggtggatatctccacgcaaaaacaactggtcagcgtgttttgttgcctcgcaagccgactgggtgattagaacatgcaggaagcggagggaaatgtctcgtgtttcagcacaggtctgatgacgtgtgtcgtctctcttggtttgggattagcctttcctcttgaatggctgaacgaagactgtcttctgacttttttcgccacctattaaggtgcgtaaaggagcaccggagcttcttgttatggattactcccgcgccttcctccacgcgtcttgcctcacctctcatgattgtaaacctctcgatcactcggatcagtgctgaatgacttgtcacaggtcgctcagcagtgtcggaaaaggacggttgttggattctgagtcattcctgcacaagaaagccaaagttcacctatgtgtttgatatgtataaatgcacatatgcttgtacgcttatccactgttattctccggcgctgcccggcggctgctgatccacatacacagggaatagtcgtgacgtgagtgcacatatatgtaaatacatgcaggcacatgctgtcttattctaccatttcgagggaggtattggtgaggcgtggtgtattgtcaaaccccgcggggagggattaagagaaaggtaaccgggcgagacgagagcgttcgtatctgcagagacaccatactcgtgtacctttgtttgacccgaggacccatttgcgtcattcggacggagtgaactctcatcaacattatcgtcggaaggttgcatgtacacagccatataaaaattctggttcctgttcggaa

SEQ ID NO: 3484 - DNA, 1353 bp, Toxoplasma gondii
  source 1..1353: mol_type = genomic DNA
ttcgagatgggagagcgactgcggcgtatgtctgtgaagcagacagacaggaaacgtctggtcggccgtcctttttggggtcgccttcgagagcaacgacccgcgagtctccccccataagcactcctctttctctcgatctcttcatcgactgtgtcgatgttcttctctctgtcgactgtgtggacttttggctctcctgtcgcctctgcggagcggtgatattttcttctcgcgtttgtcgatttcgctccacagcttgggcttgtctttgaagagccttttctgtgtttgagagcttccttattcgcctgtaccctccatggtcgagaaccgaggccgaaacctttctcctctcgtcggggatgcgacacagacgacatggcgcaccgcctgtgcttcatcttttcctccgagttgtgcgcttctcggcgcctcgcgttccgatcttcacacctgttcatgtttctctccactccgggcgtagcaactaccgccgacgttttatagtggagttagaccgttgggcgcgcagattcgccgcgaaggcgcggacttcttccacgcaaaagagcaaatgcgaggctccagtgcctggagatttgctaacaaagcgagccggaaacgcggcggaattctcccgtacggggtctaagtggacgtttcgggtagaaggaggacatgtgagcgaaaagtcacgagcggtcgtggaggttctcgagctcgtcgtgcagaaatgttggctggaaacagcttccccctctcagagcacctcttcgaggagaggcaggagagccgagaggaagcagaagtctcctcctgaaaaacttcacgctcgaaaaaagagaccgaggactggagctacgtttgctcgacgaagtcgtcgaaagaaacggtcctcgctgtctgtctcgcagctgcagactcgcaggagagttgaagcctgaagtctctgcttttcggccggacattcggcgagagagggtgaagaatataaagaaacaccttctcaaccttcgtaaaactcaaagagtcgcaaaaagcgacactggattcacaagtgacaacgctcgtaaacgggcactgccgtgtaggaggagctgttgttttccggtgagaggaggaaaatgtgtggtctcgtccgagttttttcacgtagatttcgcgccgaagaggcgagaccgtaaacagcctcgcgtctcctcaagaaaggatcgcccgcagaggtaagaaaaaagcaaaagaatgaacgagagacagcgggcgtgcagccaaccgcgtttttctgggccgagaaaagaagacgctgttagcagaaagcgccggtggccgaactgcatgtgagggccagca

SEQ ID NO: 3485 - DNA, 1574 bp, Toxoplasma gondii
  source 1..1574: mol_type = genomic DNA
cggatatacagatctgaagtttggtccagagaaggcaaggagaatccatgccagtgcgttgaacgtctggcccagcaaagcgacagccttaggcccaacagtatcaagcagatatccggctacagcgctgcaagtaaaatgacacgccatggcaatagtgaacaacgactgcactttggtgtcctgcagcgcgcagaggtaatcggtctcgccctcttccggggaggtatctgcgctttctccagtgcatacccacgaaaactgtcccgatttgaaaagcattgcgctcatgctgcgccatccgaaataaacagatgacgttagcaatgcatagatcatgtagatgaccagtagcacataccggttgacaccaaacggcgtcttctgctgtgcagacggatgagcactgtctggaagcaacgcgtacacgcgaccgcagcacgagctaagcagacccgccataatgccaacacgaatgagattcaacagcaagggcggaccgagaaaggctaaagtcgcagcgaagatagcctcttcgattcttaagaaaacgacaagatacgggcaaaagagatgaaactctccgcgattcttgcgaaatgagcgcagaaatagacagcaccggtgttattggacaacgcagaagctgggagacggccacgccagcgagcaaagccggcgcgtccactgatgggtaacgaaaaaacaaacacctaaataattaagaaacacaatagtgccaacacagcacaaacaaaaaatatgtctttttgaggaaagttagcatatgagagctacggacttccagaccgcaatatcgaggtagtcatccctagtgcagccagtcaagaaagggtactgcgaaatcaattcgacgaccattttttcggacgcggccgcacacagattggctctcctttactgaaaagactggagcgctgagaagaaatgaaaaatctaaagatggccacaaagcggaagcaggcaacaggatagctctcccggaagcaattccacgtggtggtgcgttcgcaagctgctaggaactctggctgcgccaccttgagaatacccgtctttacaccttgtaaaatcgttcgaaagtgctttgcaattctgaaagcagtaaacgatgacgctggagcatattttcaaagaaggaactaacctcccgcgggaacagcaggtcgccccccgtggggaggaccgaccgcgtggcaaggtatgaagttggggaaaccagctttttcccgaccacagacgcggggggggggggccagggggcgatgtgccggctgagtgaacttgcagatggtcacccgtgcaaccgcgttcacgttgctctcgggcctgctgcgtgacccaggtagcggtttgctgttgcaacgccactttttagagcctcgcttcaggcggctggggccctcctccacatccgtttttcctcacctggtgactggacgcgcaccgggacgcctgcactcgtcgtccctcgatgaacaccttccgtgtcaattcaagcgaaattcgcagagcgcaagatgctcagtaggagactacgctgaaagcgacga

SEQ ID NO: 3486 - DNA, 4390 bp, Toxoplasma gondii
  source 1..4390: mol_type = genomic DNA
gcgaactcagggttctacgtcgtctgtggaatgctctcgaatatgctcctggttgcgtttgaaaacgagctcattgggaggtggtggtggtttccttttttccacgtcgtagcgacgacgtctctgcgtctgtgtaaagtatgctatccgacgtcgtgtcgacccgctttcttctagacgccggtagcttacaggagtgttaccgttgctcgcaagactacaagaggagtggagaaaaaggatccgtgaggcgccgcttcccctcctgtttttggtgtcacattcagctgagctctaggtcactgtactcaggtagtgccaccgttacctcttttcttcacgtttcatctctcgtggatgtgtgggctcgacaaagcgcagttttaatgcgttttgagcgaacgatgactgaacagagtctctcaaaaatagttctccggtacactgaagagaacaagcacgaccgagagaaggggattgaactacattgttttaccgcaattttcgtcggaagcgtgtcagcaatagcgggaagtttctcttcataaagtcgcgtcacaattacacaaaaggagtcgctaaaagcatatgtatcgcgaatgattcactacatcgggactgctgtgactgaacggcggtaggtcctgagcttattggttcattcaatatcatgtgtaatacacccccaagcgttacgtgcaccatctgcaacagttttccgactgaggagcggataaaagtatgtcctaacactgctggcccactagaccgtctttcgggggctagaaggcatggtcgattgtattggttgcgcttttttctgacgttctgatttgccaatgaatacacgactccctgagcgcatctgtatagaatttgatacagcgtctggtgaccaggcggcgatcggcacgctgacactttgaggttgggcggagctcacctgagtctgccgtatctcctaagggacgcggacctgagaatggctgtagttcatcttttgaatgcctattgtgctccctagcataaacgtgtcctttaaccttttctaggtagtcctgccattcaccggtcctagcaacgaacagaaacgttagcgacgcaaaaacggtgcgtggccgtggcacccacatcagttttgctcattgatgtcaacggtttagaacgactccgcaagcaactcggagcaattacatccagccactttatagtctcgcctcaatagttttctggtcagctggttggctgcatgaggtataccaggagaaaactcgattagtctttatcggcagaacgtcaacagcacgagagacaaagctgagggggttcaagaaactaaacagtgcacaacaatatcagcaaaacacgtctttgcattcagtaagatacccattcgtcgacttgcacttttacacaaaacggtggctgatgcccccgaagtcgcgctgttttctacaccatggcacaggcatcaaggtaccgcacgaaaaaactctcaccgcgcgcggcacccaacgcgtaatgaggccaactcgttgtccattagggcgtcgactgccaaaagcatgctctggtcattaaatgcattaagcatactattaatccgaccccattgtctactgtagtgcgccagtaccggaacccttttcaagaaatttcagtccgcctcaggtgatgatggccctaatggagataagaataccccaaagcaaaccccaaatccaaccaacaaacggcagcaaaagctgcagcacaccaatgaacacattcactgcatcattctgcaggaaaccgataatgaccattcccagtccgaatatgaagcagttcagtatgcctagaacgaaatagatgattttgtcgtatggtccccctggcggaactggcacatccaaccgtgttatacgtctgaataaatcgtttactgacattttgagtatgtctctctgagaacggagtgcagacggtgtgtttcaaagaaaaacagtgtccgtaggaaatgatttgcaaggaaggttggcaactgagcctcaaccggcaaactcattactgtggctagtcgtttgacgcacatgtatgttttcctcacgagcacgaggcgcgtctcttccacttttggctaccctgtcgcagggacacttgtcggtcgatgctaatctaccgccaactgccgcctataccagggggtagcttgtgggatcgattgatcgctcggttagggatgcaccagacgcgcggctcctccatgtatctcaatcaaggctttcatcatgttcagtacgtgcgcagtcaatgtaaatctccgagtgaattgccagaacgtagaaacgaacgaggcaacactcctgcaaagagaaccgctataccaatggcagctgaagggtcttcgctccaccttacaagaaatcaacaacaatgatcttgtgcgcgtacgccttgagtactgaatctgcaagaagtgctggcgctatctgagctgtatcctgctgtggaaagtggttcgcgatcaaacgccacgacagacgatcgcaaaccgctgtgattacgaccatgtgtttgtggccttgtgagtgcctctcaaggagtagctgtttgcgaagcgcaagaccgtttcagcggcaaggctttaaagtcagacgctcaagtatgtgccttttaacggccctcaggggcgtgttttcggaagatcgatagctccatcgtagaaaagtgactgtctgtgtaccaacaaaaactgctgcggttaccggacaatcatttgacactcagcagagcagaagcgaagccatactgtccttcgcagccgtatcgcaaactggtcgatggcctagcacacataggagtagcggcggtcgtcgtttgacgctgctcgtcttctggcaaacgtcttcgcgcacttcgtcactttcgcttctcatttccagtgaatcaccagtctgtgacgcttttcggtctgaagcagcttgctccattatatatttgaactgggcactagggaccggacgacgatcatgacgccccaaacgactgcccagatccagccaacaatgggtaacagcaactggagaacgccaatcatcatgttgacgacgtcgctttgcatgaaaccgatgacgatcattccaagtccgaagaaaaaacagttcaggatgcccaggaggatgtacgccgccttgtcctttgggcttggtggctcgggcacgcggaagtgcagggttcgttggaagacgtcgctcgccgacatcgtgctaatgctagtggagtctgcacctggcgtaggtgcgaacggcagtttatctccgatggggaatgcagatccgctgaaagaaggcagagacgaaaatgtgatgagttatcagatgctctgactggtcggcaattgcgctttaatccccctgcagcgaggcacgagaacacgttccagtgtatctacaggaaggggcgcaggacacaaggctgacgtagcagctgggcttgtttcgcagcgtcatccatgactgtcgttttgactgcggatcaaggctcacgcagtgtctaacgtttgccacattcatgcaagtcctggtgaaaacctttgaaaacctccctgcttgcagactctcatgaatctagcttcaacgatcgtttatactgattgtacactttcggagatgcagtttcgttggtaattcttgtatgccgcaacggttacatctgcggcgattcaaggagacggaaaactcgtaggacggagttgttaactgttcttgagagttccctgatacttttgtaatgatgacgatgcccctatatgaataggatagagtgatatccctgcttttcttgtgacacacgggcagcagcgcggctctgaatacgaactgtactctctatgtcaagcagcataacagggacttccggtgacttgtgtataaggtttttatcagacacatttaagttatgttcaggtgataccgcatcatgcctgacagcaactcttccaccggtaaagaatgctacttcaccgactctgtgtgccactcgatccagcgttctaacttagcgtgttctcattgacacgggacatgctttttcccctactgtatcacaacaacgacgtttccttgcccgaggcaaatgactgcatgcggaccagctggccacagtcaaatggttagctaccaccaggcaccagttattcaaaattgttgctctgctcgttttccaaagtggatttgaagagcatgttgtgtcactgtataactatttgaccgtgccgaacattctcgtgtggctgccctcggcacttttcaagtttcgattccagcttttgtcacggttcatccccccgacttctgtgcgggcttcaggaaatctgtcagcttctgtttcttggaacagttttttgcca

SEQ ID NO: 3487 - DNA, 3783 bp, Toxoplasma gondii
  source 1..3783: mol_type = genomic DNA
aactcgatactctgtctccatgtaaggaatgagcaggagaaggaacgagcatcagcgacccgaaagccaacaagtgccgaagcatcagttcattcctagatccacagaaaattctcaaataccacaagagtcgcaactgatttgactgctctttgtcctgcacgtacagcctgaatgaagtgtttcccagtcgaggctgttctctgtttcttgacgacatgtacaggatcctcatcgtccttgtcagactgtcgctcatctttttctgcacgagttgtttgtgtgcctgacgcactgccgcctgcagtcgcttctgcttcagcctcctcggacaacgggccccttcgtccttgcttttttgtcgctcgtttcgcaaacattgttcctttaaggatatggtaagaagagagacagcttcacaatcgactgagcttccagggggaaaggcaggaccaaccatttcaaaactggggtcaccagcccacggtccaaacaacggaagatcgaaattagaattagtttcgtgacgtttaaaataagccacgtatttcggggctttcagtacgactcagccgttgtacaccggtgtatccatggtggccgcagctggaatcctcttcccttctgggaggatcctattcatcggcgtccttatcggctccctcttgctagaagaaggcgtcaggctctgccgacacggagaaaaattgaaccgtatttttaacccagagctccgtaagacagacacggacataccctccacggcagtgccacgaataatggaacagctccttccctcatctgttggcgcctcaatcccttttgaatcgaactaggtggataattgaggaccggaggaacagaacggaaagtagcgtgacagggaaaagagtggacagatgctttccttgctttgcatgctcgattgttagctgaacatcggcgaatgacaagctctcggagtcgagctgctctgcagagaaaaaatccagagagaaaaacttaccgttgaaagtcgttgacaagtcgaaagcgactacgcaaaatccatcgaataagcactataacagaagcgtttctcgataaattttgcggacggaaaagaaaggcttttcctcatctctgcagcaatgtccacgctctgttgtcagcatgcatccagcatgactgagttctgcggttcacctcgggcacttcgagggccagcaactatcggactcttccagtggtgttctttaataaccgggaccaggcattccattataggaaatatcgtcaacttcgaaggacaagcaaagaaggaaaggctttttgaggcaagagatagagagagccatgggaccctctgctggcgcgacactgaataccgtcccgcattcactccgtaccataaaatctcaggcatacagcgcgtctgcttagaacgagagccaacttgaatttcacattgacatgtcggccacccgcagactgggaagggcagcatcagatgggaggcactgtggaagagagaaaactgcatcctatcaccgtattcgacaaagataagccgaggagaaacgaaggaagctcttctcctgagcaacttcccagaaaagtaggcaaactataacacggtaaaagcaagcttaaaagaatctaaacatttatctcgtggcggcaacgctagttcaggagatgttcgtgagtaccgtcagagtcacggaggtgcagagactggacgggttcacttccgtgtttgtttcgcaagtagttcagttctttctggttacaatttgattccaatgggaacagcaacgctagacgtgttgagggaaatgcaccgaggtttgacgggagggacaaaacaatcctgaactggaggtgcctctctaggatctgtgaataagcgttcaccacaggacgcccatccaaaagtaccagctaaagggatagcctgcacgagttcgaaaatttaccggattcacaatagttttctgagttcaacatcgtcagttgtatgttagatggcaatgcacgctgtctgccccgtacaggattattagtcaacttcttcacgaacagagcgccgttctcgagaatcctctctagctatagaccttcctgatttgatacaagatttccagaacgaaaagaacagcgaatctggctccccctacctctttcgtgcattcatcgtgcatttgtcatgaggtggaatagcgtagcatgacattgtcctgcttaatatagaacaactgagactcgcgctcgatcccaaagctcattcaggcgacagactcatcacggctggccatttttgtagagtcgagatatgttgttttatgagaaactttgcaaggttccaccaaaccccaggagctactactcatcataactcgcctacagaggaaatgtcagtgatagcctcgcgtccagtagctgtacctcggaagacggcatcatcacgagcgtgccggcacgcttctcgggagccggaaatatctgtttgtgtagtgctggtaagcaggaatgtccccgtgggatcagcagcctttagcgatcagcatgttgcacgtatggaattattacacctgtttggatttttcgaagcgtcagcagttcccagcactctagtgtgtacaaaagtcgtgtctgtcaaagccactatcgagcgtgataagcgatcacctggcgtgcgcaagtctgcagaattgtgtgcatccgtatttgcctgtttgaggtttctaagggcagtaacgtcgacatcacgagctcgcggagttctttctgtattgacttttttgttctataattttacatcactagctttcacaggagcttatccgcaatggaaacgtgggggcgacggtgacgttcccttaaaaaacagacatcggaagtaccttaccggcagcaaagcgaggcaatgcagaagcgttttgctgcaggtggtatgccttccatatatgaaccggatgggagaaacgcaaacataaagccgcgcccccgttctccaccaacacacactgtttcatgcatttagacaagcacgcatgacgaaacaagggccgcgtccacgagcagtgtggggctccacgaaagagcaggtttcttcccgcggcattgtactcagggatcattgacagccagtctgttctaaattaaatagttctcttcggcattctttatgggtgaagactgtcattcagtctatttgtgactccagagggcgcggcttcctggtatgaggctacattcaggtgacagtccatcgctatggcccctcgatgtctcccttctgcaaaaagaagaactatgcggtttttcatgtttgggctggcctgcgacaaggttttctcagagtatgcacagcacttgatgatgtctcctgttcgtgaacagagaagtaagacacaacgacaggtcgtttcgtcctccaaagttgcgagaccttacagataccccctggtgggggggggggggggggaaaagccggtgcgtttggggactgtgcattacgtacgctacagcgtgtgcggccttcctatcccccaccactgaggaaccccgctgacaaatggaaagcttctttcagccgacgcggcagcaactttgctccggcgcatttttgctcccttcttccgcgtccctcagggctgtgaattccttatccgttcccaacgaaaggcatgtatcggcgcgcgtcctctctctctgcacttgtctttgttgaaattgtttccactaagcggtgagggaatttcagaaatctttgtacccagtagggattgtcagcagcaa

SEQ ID NO: 3488 - DNA, 2728 bp, Toxoplasma gondii
  source 1..2728: mol_type = genomic DNA
ggatttacagcagaacaggcgtggatagcgcgtaaagggagaagaagggcgaagtccttgtcactttgttttccgaaatcaatggtccgaatcacaaggggtgcaactgacacatttaggcaccgagaacggactcttcacattgccccttgcggaatgacttctcagagttcaacatggttttgtgaaagggaacgaatctcgaattgcgacagatcgcttcttgcgggggcttgctttttccttagcctagcgagaggcggcggatgctttctgtgatcgttttcagagtctctcctacacaatcatgcatctttcgcaggttcggcggcgaggcgcaactctctcgtgcctttgcgagatgtgggtgaagtccatccacgagcgctgccttcttcaaaggttttggacagttaaacgagacacattctccttttgtttttttgagagttaagcaatcaagcgcgtgtgttgttcggccagaggcgaatacgccccggaaagttcttcaaagattgattatggacaaagctaagctttttagagtcaagtgttaaagaaacacagtagtaaaaactttcaacagtgaacaagagcacttcccctaaaaagcaagttccgacatccgacggccgccacgtttttcctcttgaaagcagcgttttgctcacagtctttcgctgcacataccggaagcgcgaccacagactgcatttcaccgctttctggcgtcccaaacgtgacctcaagtagattccgcaggtcaaaaatctccacgggtgtgaatttctgcggatctctcgacgcttttcgtccttttcatatcgtcgtgttccggaccagccccgagatcgtaactctccagtgatgctctttccttgattttgccagcaaaacagacaactcaaaggaagggtgaggcgatgacgccttttacacccgggagtctctgctttacgacttgactcctgaatcagatctctctgtgcatctctgtgagcctcttttgcgtacacgtgtctctttttcgtgcgctctgaatcgaaggcttcctctatttcctgttgcaccgtccctaaagctgtttcttctggcacacaaccactttctttgcctgcctttaatctcgcttctccagtctatgttcaagctttttccgacgcagcaccaccaagagagtcctctgtttccgttttttctcgaaattttgacggaacaacgactcccagataggtcactggcaggtcaactcgttacaccgcttcatgttgttgtgttgtgctcctctgtgcgtttctggactctgtttttctgggatgtacgctccgcggcttcggtgtccacggtgatctcgaaaaaagtgattcctcctcgctctttagggagcggtgtgtcgtcacgtttgttgcatttcttctgtcgatacttcaacgaacgaaactcgttattctctgctttaaacagacgcacgtagacactccggaacgggagtgcggatcccgagcgcttgaccgtgccagataaaagaaataacctcacttcctcaatagagtgaaggccgagaaaaacaagacatcttggaggactgcgtcttcttgaataaatgccaagcacagtcttaggtctgcgagcaaacagacttccccgacagctactcagaggtgcaataccaacgtgcagggttgttgcggcgaaaatacataaacttttcttttctgcaccttttgagttcgcttcttcattttttgaaagaaaaagccagcaagcactctgttctcggttcggtcggtttctcatttgtccaggaacgcgctcattttgccttctcccttgcccgttgcctctccctggactctgaggtagccctctgtgtcagccgtcgaaagggcattgcgtctgtgtagttctctctacaggtcacgcgcttgacagtttgctgttcccttttctcttcatccgcgaggtttctccctctgtctgtgctgagggttatagccatttcctctacgaattaccttcctgtctttcgcgtccttgcctagaggcgagggacgccgaaacggctaccgactgtttcctctggagctcccagttcccatatcacagtgtttccagttctttgtcggagcctttttcggaccttggatttctacgcggcagaatcgcaaaacgcagtctggcgaagggccttctccgagagacgcgtgtgtttcgttcggcaacaacatcggggtataccggggaacgagttctttgcctcgacagctctcgaaacgtcgagaaaaggagcagatcgagaaaggattgaggaaacgagagtctcctgcgagaagacgaaagcggaaactggcgggtgtctgagtttctcgtgacgcacgcctccgttcgctgcctttctcgttctttctctgcatgcagtctgttgcttgccctcgcatgcaaagtgcacagcgagaacaaggccgctatcagcttcgctttttgctgttcgcgtcttgaacacttccacagccatttctcactccattgccctcgttttgcaagtctgacgagatcttctttctcttcggggacgcactgtgtgctgcagttcctgcagagaaaggcgagagaaatctaaagccgcaggggagaatacggggctttcttcttcttctcctctgcaaacctttcttcttcctcaacttgtaaagatgctctcctcaacacacaggtcatgcgtttgaga

SEQ ID NO: 3489 - DNA, 1191 bp, Toxoplasma gondii
  source 1..1191: mol_type = genomic DNA
gaggagaacgtttcttgggtctgcacgaagttgaaaagcagttgtttttctcgtataaaaattcgcagaacttcgaggaagaaagcgcgaaccagcgaccaccgcgagatgctcaacacaccttcacagggagttttcttttcgcatcttctctgcctttcgggcaaaggtctctcacgcccgggggtcgcgcctggtggaggtgcgtcgctttttaggaggatggcagatacgttctccgcaacgggccttccagagctttggcctttcgcttttgacttgagcaggattggacttcgagaaccaccagtgcaccagttttacacagagggtccgaagtaaaactttttctcacattcgctaggagaaaagaatcttcgagaggaaaaaaaggaaggaagggaaaacagatctctcgatatatatatatatgtatatatatatatgtacatatatatatatatatacatatatgtatgtatatatatgttagcacatgttcacatgtgtatatctagctacctacatgcctgtgtaatctccgtgtgtttatagagatgtatttgtacattcgtttattcatcgattcaccgattgcagttgcctgcgggtgtgggcgcaaatttaggtgtatgcctctgtgcatgcctctgtctattcgaatcgatgtgcgtcaatctgcatgtgaaaatgtctttgcgcatcgcgagagagagggacgaggacggaacgcgatcaagaaagtagatccgaattgcgatttgcacctttctctaaacctgttctgatctttgccgacacacttgtgcctgaaagaagctcgctaaaccacgaaacccgaatttgtcaaagacctagcggagacgcggaagcggtttttttcaaggaagacagacagagaagtcttggtgcccgtcggcgctctttggaggcgctcgcgcatgcacgcgtcccgttggaaaacttcgggtgtgtgtctccagcacaaattgaaggttcttgctcccctgaaggcctcgcttgaaacgaagccgcttctcttccacttgacgcccttaactctcgatctctgcttccccgttttcctcaccaagtttccccgttttcctcaccaagtttccccttagcgtaaaacctaaacgcctctctcgcgtccacagggttgtctcagtggccgctgccttcttcgca

SEQ ID NO: 3490 - DNA, 1428 bp, Toxoplasma gondii
  source 1..1428: mol_type = genomic DNA
cctttccagattccctatgcttcggtacatatctttagactgacaaacggtgcttcttcgtcgacggcactacgcatgcaccgcgtcttctcccaggcgccgagcgaatccggagtgctgtgagcagacgcccatgaacttcaaaagcattactgattcatgtagattaggagcgcagaaactcatctgtgccaaaggtagaacgtctgtccgcaaagggcagtgcctgatgtatgtggcgccccagaaagtcgttttggcgtccccgtagtagatcgtagaaaccaatggttatgggaggtagaaatgaaatcctaaagaactcgtagtgacctctttccttcctgtagttctgcgcggcgagaaaagcatttccttaggtagcgatctggcatcagcccgtactagctgttttgtgaaacgagggagagtcaatcactcgcgagtcacaaatgtatttagtgaacacttgatcactgtttttattgaacacctacaaaatacggcgtttaagtcaaaagttttgatctcccctccctgtccccacttcgatacttcctaagcgcgcaacccgggggtcgttctctttcattgaccatagcaggtagaacaaagaaaagggtgaagtgcttcgcctgcagttttctggtcgagtcatcggagctaatcgcgagaagcactctgtaaaagtcagctaaaatgttaaacacaaaccctcgacagttgaagtttgagtccacatcggtcacgctgcaggcggatgcacacattcctgctctgtctcgttttctcaagagtgacgtgaagaaccggcttttcagatgctcgcatggtcaggaccaccgtactgagagcctgaagttttgcttgtaaggagttccgtttctctcacgcgcggtcgctgcaccttccaagaggatcttccgacttcgttttgcattgtctgtacacaggtgcttcgcgcgacacgaaattgcgaaactgcagaacgcgagtcgactaaacagaaacttctctttctagagagagagctacgtgcgtgtaaacggctgaaggtctctgttgcgtgtgcaccaaggaaccttttcctcgcaaatcccgaagtgaaggggagattttcttctaaacagaacaccaacttacaaacatagcggttgaaggctgttacctctgcacgttaggaataaaacaggtgctacagcgagctgtaaagctgcaatgagccaggagacacagtggaagactcgtccagcctttttatccgcatgctcgcgcgaaattctacaacgacggtgtcaaggcgcgcgctggatagccggtgatgacaaaggacgcgagcttctcacgttttaatttcgtggtctcccagaaacggcaaaaagcacgttttttcgcgcgtctcatgcccggttgcctccagtgtgcgca

SEQ ID NO: 3491 - DNA, 1299 bp, Toxoplasma gondii
  source 1..1299: mol_type = genomic DNA
tcctatcaataagaatccatgacgtgtgaaaaagtatggattcaatcgaaagcgacgggtgagtagaccgtcccgatgtagcgttcattctgacggagtcttaaataccggtgccacctcgtacagagagttgagttattgtacaagtagtgctgctgagtgttgctcaagtctggtcagtggaacccctgtacctttcggtgtacactgcgcatatacttgtcaggtggcgcctcgcagtgcatctagctcggctagccgacaaacctcttagagtgaggtttgctcgccgagtgatcttcaactgagaaaacagcagtaaagagttcaagagggtgtcagagagcacacgtgatatcactggtagcagccggtcagtttagatggatttcgaaacatagaaacttttgagctgccactcaagcctgttggggccaaggtgcatggcccgtctggtcgttcttttccatttcttcgagcgaacaacagtcttaagacacaaacaataaggaacctgtgtcgagcacaaatcgtctgatcggaacagtgctcaaaacgggttcacctttgcgtcacagcaaaagtaggaccagctcacaagcaatattccacgacggttccgagaggtctacatcggtccagtagaacgcccgctgtacatcaccatcccctgtttcaagggatgaatcacctcagcagcggttacctggagctgtcaccagcgtttacagatgaattatctctatttccagggaaatctgcgacatggcggtcgagtctccatgctgtgcagcatcgatttgtgctttgtggcaagcgcattcagccggctgcgaagacatgatgcttttcacaggaaaaatgcagattatccacttcatttcgatgaaagttctttagtgccttttgaggcgagacactgtgtatttggttagacagcgaaggtgttagatgatggctctgaatgcgtcggctttactccggataaaactgaagtgcggtgaagacgctcatgaaacgtctggctgttaacagcactgatgtgtcttgaaggagtagcgtatctggaccaagcagaggtgttaacgtcaaattgtcattcactgacccgcagggtgtgtggcgtgaccagctgttctacgagagaattctaggtgtacgaggtgacacgagagcaaacatatgttcaagatgttcacaagagtagagttgaaagttgcagttcgttctctgcaacttcttagtcacgggtggaggtgtacacctctcgagaggaccgagtgcaaccatttctggtaa

SEQ ID NO: 3492 - DNA, 3621 bp, Toxoplasma gondii
  source 1..3621: mol_type = genomic DNA
ggtaacaaatgattgtttgtcggaggcgctcccatgggacttggcccacttcggggtgtgggcggggcaacgacgattccagatccggcaattccatggtgaataagggggccttctggccctccaatacccggcgctgatggggtgatgtgcgcgggcacagagggtgcatgcactcctggaagggccgagacgccgtgggtcgggcctgctgccttcacaggcgtcattggaggggcaaggagacgagacatgacacgcacaggggggcgtggagcaggagcaggacgtttggtccgtgtggaaggcgacttgcttggcttttgaaacgatgccgctgctgcgagaatcagcgacaaagacgcaggcgaaaaggtggaggaagcagccgcggcctccgcttgtggagcctgaggatgaggcgcgaaggatgcctctgagacagtggacgaggagcggtctccagaaatgcctcgcgttaggtcgaggtcttccgaaccagacggagccgaggaacgatctgaattctcgggaaaagtctcggacgcaagagacgggaagtggagacgtgccgggacgtgacaagctgtccggtgcgctacacaggctgcgggacttgagacagacagcgggtggccttgaggtgaggacctcagctcgtggaaagcaaacgccctggtagaggcggcctctgtgtcactcaattccgactgtgatctggagtccaaagccacagtatcggactggcaccgatagcggagcggtctctgagcgacagaacctgtcagttgagagagctggagcgaatctgaagaaagcgagtcagtcaaccgcggctgctgctggcggcggctgtacactacgagcgagcgctggaccggctgaggcgacactatgccctgtaacgctgttggcctaacgttggaagagagcggatgtgccaaatgagaagtgggcacttggacagagctccaggtggcagcagagcctcgttgtgacgacaggaccgactcggggccgtgcgcgaactgaaccatgctttacctcggaagccagcggttcagaaagacggagctgttcttgacacctgcatgccggcaacggctcaacacacggacagaaaacgcaactgaagaaggaaatcatcgaaaagacggagggacgtgccgcagtgacacagcagtggacctctccaactcaagtggtgaacaaaaggccattcgtgttcgaaacaaacgctgggacacatctcgatggcgcgcagagaaaccaaagactccagagctggtcggcgtacggggagctccccgagtggaggaagcgatcagcttagagcaatcgaagcaaaaacggtaagtcaacaatcaggcctcgaatccgctaccttgaagtccgtgatcccttccgcgtgtctagacggccagcatatccgcgtgaaggaaagcctcttcttctaagtgcggtgaaaataactaaaatatgagtgtaccctgagtttggcggtgttcagttttgtagccaacgaaggccggaaaacggccggactcaagacaaccagcagtccccgaatatgcagccagaaatcgggtggcaaaactgtcaaggacgcaaagtgactttacacatgtaccggaaggtgaacactgtgagagaattcgtcatgcaaaactcgagcaggtcgtccggaagagtgcggcagcgctcttgagggaacctaacaggctcgcaagaaaaatggatacgaagtttactgaaaagcgagccccggtgctgaacgagaagaacctgagaagcacaaaacgcaggtagttaccagctttcgaacagaacgcgcttcttgtctctgctgaactgaaccctctgggtgtcagctagagcacttgcttcttccacaagaccgggcgaagaactcgcagcctgcacagcgtcgtttcagggaggctttaatctggcgttatttgcgtttgattctctctcgcagcacccagcctgcagcgaagaaaaacgtatcgcgcggctcgcacccctagcagctgaaagcgaaggtgccagggtacaacctcgccattctctgtcttcttcctcgattcttcgcaggctcttgctcacggtacaacgcacagtgcgctaggtccccttcctgcccctggcacacctagccgattgctagcaaacattgcagctccgcaggtagactgtgtatgcctgccgcaagaaaaaagaagcgtgtgacgctacacctctcgtcctccaaaaaagtttcgcttttcacgcaaagaagagacagacatcgcggaaagaaacgaccgcaaaaactgttttcgtccgctttttaccacgactgctgcgccaggtgagcagcgcgcgaatccgtgccaacagtgctaagaatcgacagctcgcgaaaatcgacccagatgcacgggtgccgaatcactcttcagttctcgaaagaggacttccacttgcgatagccatatgaattcctgggcacgtccaacgcccgcttccggtgatttcttcttcgaagaaaatgttgccctgaccttctcgggtgccttgtgcgcgctccgctccgacaagggagcccaccaaccaattttctgtctcgccgctctcgagtcgtcggttcccttcaactcagcgaacagaatagccataattcagagcagctcgtggaaattcgatttacggtgcccttgagaagcacccttcgttttgtgtgtgtgacagttctttcccggaggtgaaagaccaaggttttcgtacgtcgtcctagtgctttagagggtttaaatgatctgaaaagggtcttgatctaaacgcaaaccgggtgatacattttgcgatatcgtcttttgttggcatttcaaatgtggtagaaagggacttttctgcctgcgagaaaaaccgtcgctaacggtgacccccggctaggccggcgccttcgagtatagagtccgtctgcttgtttaacgacctcaaaggactttcttctgctcatgtgcgcgtcgcataaagggatggatcagtgcttctcaacctcaccattcggttctgttcgtgtgtagaagtctttcaactctttttttgtattctgcctctgtgaacacagccttgttgtgtatgtcgccgaacggcacgtggtgttgagcactcgacacttggggctatagcaggctcgtcgtcacttgtttccagttcatttcattatcaatttgtcttccgtacatcgaagcggagggagagtcgctgacatcgatatccgtgttcccagcattgtgcagatttagagtcctgaccccgcttctaccggcaaacaggaaactctttcgagattcacgctgccacatccatttgtccgtgtcgcgatcctcgttccttcgatgccctcctgacgaaacacgacatgcactactgtccctgctccacataaaaaggttaggacaggacgttttctgtgccgtgtggtctttttctgtaggtagccaaggcttcaccgttttctctccctgtcttccattctggaaggcgttttagaaggttcccgccttaacggttgtctccctcaaggcccttccatttcgctttcaaacgactcggcaaagcttcctctcagaa

SEQ ID NO: 3493 - DNA, 1786 bp, Toxoplasma gondii
  source 1..1786: mol_type = genomic DNA
agtttttcgaagaggaatctacggttatgaggtacatgcctgcttcgaagtgccgcaaagaacgcgtttttctctgtacgacagaaactcgtgcgatgctagcgagactggtcgtcgaggcgcccgtattgtttcgcggaaaccagatggtgagcgccgccccctgatgtttgagactttgcatgtgacttcagcaaccctactttgcacatttccggcattgtggtctattaagagtatcgtaaatcaaaagctttgtcttcttgccgctcgcaagagcaatgaggccattagtttgcgtcacccggaaagaagcggtttgattacatgcaaccgaatttgactggaacctggacaccccccccccaggaagctacattctgttctgtaattctcctctggttggatgtggttctctttcacttctcaaatttgtgtccagcacctagccataaaaaaatagtaccgccgaccctgaaacatgtggtgctcgaaggccataaggaacacactggtagcaagctgcaagacatctcgggacgcggcagaacctgaatccatatttttaaagttgatcattattacattgtgtggctttggttaaccatctcctgacatcgaaaatcatctgcgagtgttcagctacgataattccgaaccatggatctcgactggtacaaaaaagttaccatgccctccgtacaaagccggcattaagaactgatagcttcattaaacatgtgcccgttaaaggcgctataatccgtatgaaatgactgtggaactacacgcagaatgtgatcatctctctcattcgcgctgtacaacacatagtgacaggcagtacatagttgccgatatcctgctctcttcgctttcagctcacccactattggagagcgcaggaatctgccctcacctacagcaattcttttggcactcttattgtgtgaaaagaatgcagacaagagagtcctagctactgttttaccaccatcgcaactgtgttccacgaaatggcagcagagcgaaccccggaaacagcaatttttggaagccgcacagaagaaacgacccacttccatccaacccaggctttaagaattgtcggagcatcactccgtagcagaagaaaccgcagtgtcccgatatttcgacgaatcttcgtttacctcccggaaaatggcggcagaatcaaaaaccagatgcatgcaaccccggccagtttgacttacgtcaaagtacgcttgtcttgcgtgctgtggcttgcgctcctggtgttcagcgcggtacactttttaatgcattgacacaatcgtgtgttttttcgttgtcattcgcgtatgaatcgtttgacgccatgttggtgtcgaaacgaccctgtaaaataaacccagaatccacaaagcaaatctcaggtcagccactgcggaaagatagcgtcgatttagtttggtgtaccatggaagcgtgtcgtgtgcaagccggcagcccagccccacaagggaaagaaagctgtagtttctttctgggatcattctaggctttcgaggatgcgggaaatgggtgaatgcggtgttcacagagtgtatctgacaagtcttcgccgcggccttgcctgtgcttcaggttcgaccgaaggtgagacacacaccactcgcgtctgtttcattttggagttctgccgttacgcgcaaacaatacgtcactcgccatcgcgtcttcacacggcacagccatgttggcgaaacccgcacgtcaattcctgcccttccactgcctgtca

SEQ ID NO: 3494 - DNA, 1769 bp, Toxoplasma gondii
  source 1..1769: mol_type = genomic DNA
caaatggcgtgtcgttatcaaagtctccaaggcaaaagtcaggattgctttctccgacctccgtttctcccccaaagcctctgtgtcagtgcgcctacagactctttcccctcgggaccgctgctccttcgcagccgtcgatcccttgttcgactcacctgggtggatttcgtcctcgaatttccctccgaaaatcgactctccgcctcgaccggtccccgtcgggtctcctccttggatgcagaagtccttcgcgactcgatggaagactgtattgtcgtagtagccggacttggcgagctcgaagaagttcctgcaggtcttgggcgcatgtttccagtaaagctcgacttccacgtctcccatcgaagtgacgagggtcacggtttcgtctccgcggtaaacacctgcaccttccgaagcggccgaaggcagcgaagcctggagcgacggcgaactcaccgccttccgcgaggccggggcgcttgcgagcgaaaacatgctgagccgaagcggggagaagaagcccctgaggggaggaaagaaaacctcgaaaagggagaagggaatcttccacgagacagcagaccgggagagactgaagacagacggacgacagaaaatcagagcaaacgggagggacggagtggacagacagagaggtacgaacagaggcaagagaggaacgcccgggagcaagaaagtagaaagggagggcgccgtgagtatcagaggtgagaggagacgaagcaggcggaagcaagaaacagatagcaagaggggaaaaatgtggagacaaaaggataacgagacgtcaagaaaaccggagagaaggcgaagtgagacaaaaccaaaagacgcggaaaaacgaagctctcacttccggacaacagctgaggcagcgacagacctacggagcagcggggagagccgtcaacgcgagacagagaagacggcgaagacagcgtggaagaaaacgatgaatcaacgaaagaaacgactcaacgaactcgcgaaatcacagatgaagacggttctgcttcttggagcgccgaaggagccaatggccagttcaactcccggcacgcgcgacaggagaaaggagttgtcactctcgagggaaaaaaactcccttgcagcactgtccggaagaaaaataaaagaggacaagaggtgccactttgaatggaactgcgaagaagaatgtcggagcactccgcgggcaaagtgtctacaggtttctgtgtcctcggtcagccggtgcttctttgcatgcatgcaaagcaaggtgcatgcacgcgcatcgcgcagaaatagcccgcgaaagtgtcaaacaactcggggcgtttcctttccttgatgcccccgacttttttcacagcttcctttgacttgtgtgtcggctcgcctccgataggaagtaaaagcctcgcgtccggagacgccgaggagagggcctcaatgtctgacagggtcggagagagagagcgagagtctgtcagagggaagccgacgcgaaaaaaacatctcgcgcgaaaaaagtaaaggaaggttgagagtagatgaagtccacacgtaagaagaacgcccctggactcggatgagagagacagcgaaggcagcggagaacacaggaggtctaagctgaggcacagagggagagaaagagagagggagaaaagtgaatcaatgcaagctgaaaagagacagaagggaggcccccaactggccgctggagtcgttctggtgtacgtacactcaacagacca

SEQ ID NO: 3495 - DNA, 4668 bp, Toxoplasma gondii
  source 1..4668: mol_type = genomic DNA
tcgacctgtatgcgtgtgaagctgcgaaaacctccatctcgcactcagccgctgtgggtatttcacctccactttcccggcatctctcctgttccccgatcgccttcaccttcttcagcaagcataggaaggctcgacggcagtttgtcgcgtcgaaatcgccgcttcccgcgtacgcgaggacaacgcggctagccaagtcctcgtatgtgaggctgtgcggggtcgagtgtggagtggaaacagactcctcttccgctcgatccggaagctttacatgcgccacgactgtaggcgacgagacacacatcacgccctcgagtcgcaagtgcagcgcctctaaaaaggctaggactcgtatcagaacgtcccccacaacgtaccgcccgcaaaacgccgcaatcgagccgccggaaggacgaaaagattgtgtccgtaggtaccgttgtgcagcgatgtctagaagcagatggtatatgatacacacggacgaaataaagagcgtcgctgccgcatgtcccggtaaatcgcacgcggccgtggtaggaatcacgcacacaatgaccgccacaagtgggattacaatgtacgctaagaacacgtgcttgctcgtgtagtacccccaaaaagagacaagaatccacagaaccagcttctgcgatgtcacaggagagccggcttcgcccccaaatatccagaggcctgttgcttccaaaacaatatgggggaaaaagtctttttgggtctctctgttttcgaccgcggagtgattggacaaagccgagagcagacatgacaagccgcggaaaaggaaggcaacagagacgcagaggaagaagcgaatcgtcaccgccgacgcaagattcggagtcaggaagtacatgcggaggacggagcagaataaaaaaatgaggaatgcaacgttgcatgcaaagacgcttcttggagcaggctcggcacggtggaagcgagaagtcgtgcctaaaccatcgcgttctacgtcgcgaaacccagactctggcagcgttatgaaggacgacgagaccgcagtgtcctcccctgacaactcatgtggttgtgctgctcgcgagagctgggcaaactccccgactttggcggttacctgctctgagaccacggcggcaacttcgctgcctttactgtgatgtgcgaagggtagatttctcgcgagaaccagtaggaccaactgaatcagaagggcgagcatcaggatgcatgctgccaaaaaaacccgcaacgtgaacaccccaaaaatcgattcacaactacacaccttccctcctgcctggcttcttcctcgactgcatgatctctttaggctcgaacccgaagcagatagagcgccgcctacgctgctgaggcgcctgcaactcgcttcacccgtgctgtctgctgtcacaacactttcactcctcgccagtgacggaagcgaagcgacaacacgcttttctgtcttcttttgcagtctggtcattggactcctgaccaaacgaggaagatgcacgtacagccggcgcgcaacacgcgaaactctttcttgcctcttcagcgagacaatctctgagcttggtttttgtttaggggccggaagatccgctctcccgtcggcttctgaaacagagaacgattcatccccccataacttggacagcatcttcgtctcggtggacgtcgtgtttacttcgctcacacaatcgaaagccacatcgatgtagtagcaccgcagctccgttggatcctctccggtggcggcatcgacacacgaaggatctccgttgatggaagcgttaccggagatactgtgagaccacgccggcgaatctccgcattcaggtgtcatcatctttacgacttacaaacgagcgcgaaacaagtctgcaccgaaaaacttgggatctgacggcagactactggcaatacgaccacagggttccgcacaaatatacagatctatggaaatacaccgatcggacgacacccgaacccgtcaactgcacacgtatacggccacatgccagtgtagtgttcacgccagaagtgtccctacgctgcgctgcgagatcttgtgagaaaccgcgccgacaaaacggagaaggggacaccggccgacacacaagaatctcaaagacgcagactactactttctccgttctttgcgaccgggtcaaaccacttcggtcgcgcacctggtagcctaacaaagaacagcgactagaaagatctatgcagaagcacgcgtagctgtgcataaccggattattactaattccctaaacggctgtcggtcgcggcacctgtcggcaggttcccttgtgtggaactatttctctagcttctttctcccctagagagcgtggaacggatgaaagactggacagccgctgggcttctcgtgacgcgacgagacgaaataaaaaaggtctacaagaaaccagggacgaaaccacgtgagcgcatccccacgtatgtacctatatcgcttttttttgccgtgcgatggctaaccctttagagcactatctctcgcaaaaattgcgcacatgtgtatttctctgtgaaaaagcctttctgggttacgtcaaacacctctgccactacaaaaaagagagacgcgaaaatacgcggaaaaccccccctccatgcgagaccggcctcgacacaaggcgacaaaatcgaggagaaagaaagacaccttgtcttccattgtggttaaaaaaacgaagcgaagagcaagtaccccataaagtgccgcgtctcgaagtggatgtcgcgtgttccctagttctagccgagccaaggcactttttgtggggacgcaaatgagcgaatcatcacagacgcaagatgttcagacgcaagcgaaaaaaattggagaactcgaagcgagactaccaacgaaactctcgtccgaggatgtgctcagcaaagccaaaacaaaggagaataaaacacccccgtgagcctcggattgaaacagccgacgcggcacacggcacggagagaggccggagcggagacacgagacgcgcaatcggcagacgaaggagaagcgttttccagtcctcggcccgaccgccagaaatcacgacggtgatacaaggcgaaatatcagttcgcacaagcgaaaaactatagatcttaagtgcctctataggtaaacccgtaaccccgagtggagccagccgctcgctcccggcctgctctaccaaagcagaccagagcggctacacacgttcttgagttttttgtgcgcatgcaaacgatgagacagttgtctatttccaacagagacacgcggccttcaggatctgtgggtgagccccatgcgatcggttcccagcgaatagtccagtggttgtgctgtcctgccacggctgcagtgaggaaggcctagaccaagcggcgcagacactcaggctttttttctgcaaacggatcactaaaattaagagacagaaatgataccgaaaacgcgacacacacgtacaacagtgtgtctgagcgagcaagtcctctccaaataatgcgcaatctcacaaaaacccacgatatacgtacaaaaaatatatatacatgtaggtacgcctaagttgacatacatagatggaaggcttcacacacacacacacacacacacacccggtgtgtgtaaagtgccttcaacagtactacttcggaaatgtacgtacgtacagaaagacgcatatgtcgacctttaccttctgccagaagatctctatctacattggtcgtggctttcgtggctttcggagagaagtgatgcgatcgtgtcgttcccatctgcaacgaggaaaggccctggtggcctgacacagtctgcaaagacactaagatcttaatgagtgtgaggtttcgctcacgccgtgcctaggcaatgtggcggctgccttggaggacgctttcaaagcgcacacgcgtgtcgcggagcatcgacgtcgcatgtagagacctcggcaaactgtgtccagcaaagttagcctctcataagtgtgtggaaacgcatcggacagggagaggcgcctcaacgtttttcattcctctccttgcagcaaagaaaatgtagttcaacagaaggaattgagcacgtggtttctgctgcatgcgcgcttctgcagtgtacgcacaggcgcagtcgcgatcttgcctcctcgcatagcagcatcgagaaatgaaaaataacggaacgactcccagttctcttttttccccgtgtgtgtttcgtttcgtgttcttctctgagtcaacgaagattgttgttgagaacactctctggggagagccttcccttccgcttgtcgttcccgccggcgccagcggctcaacgccgtgtgggagagaggaaccagattcaaccggacgatgtcgggctagttcttcccctcagaagtatgtgcgcattttcgcatgcacacgacaaggcgagtgcctctgtggattcgtgttcgagcggagttcaccgcttgtttgcgctaacgacctccgggcgaggagcactggacacgatccggcgccctgtcaagcgtatttcaccgatgcatttctctctctaaccgctgcttcttcttctcccaccacagattgtctaggccgtgctcacaccctttcctcattcttctctcctctcta

SEQ ID NO: 3496 - DNA, 1180 bp, Toxoplasma gondii
  source 1..1180: mol_type = genomic DNA
cagcgatttacggttgcagttgtgacctcgtcttgcagttctgatagaacggtgtttatattaatgggagcacaagctggtaaccacttctgctctctatgtgtagtgtgcagactggtacgctcgatatgtaaacacgaggggctccggtgaaacgtgactgtcagaggagtgccacgatgacagacacattcacaacgctacggagttcggaggcatgtgtattagatttcacattgctgtgcgtgccctgtcgtgtgcgcattgtgtgaagattcaggcaccataatttagtgtgcagttgctagtacagaaacccaccgccggtcgcggcagaagttattctggttgtccgtttctctctcgaacggcgtaaaagagggaccgcaaaagaccttttccaaagagtgtcttaatatctctatatatcagtgcagtgatcgtccgtgcgcgccaatcaactcaaaaactcttcccctcctatgaacgcttcaatcgggagagcatttgaatcacctgcttgccgaacatcggtttgaacaatcgacactaggtatagcagaaagtctgccgaggcttgcacgatgtcggacgttctcttcgctttcgatgtcccgcgtgtagacgaaaccagatttctcttttcaatgccaggaagggcggcgtagcaacgattgttcgcgtccccacctcgccccacctgccccagcgagcccacgatgacatcggtgactcaaagtctgggatcaaacgggtaagaagcttccgttttgtttatgatttttcacgtatacgcaggtctaggaacggcgcaagagatttcatcacctcaaacgtggtacgtacaggcagagttccgtcaagtggccacctgaaatatgtggtgagacatcgtgtttatcaaagaatttcacttgtttatttgtttcggcttgtttgtggggtacggctgggcgtccctccatcctgttggtggttacgttgcatttggaacctttcagcttcagttgccaagtgtaacagaaaaacaaatcatagacagcccatccccgctgtgttcaattgctctggccttaacaaaaggctcttatctcgtcgttttctctgacagttagcgcgagctttgaaattacgatgtaggcgcaaatccggcaatgtaggctccatttgtgacattgca

SEQ ID NO: 3497 - DNA, 2108 bp, Toxoplasma gondii
  source 1..2108: mol_type = genomic DNA
tctttgttaggtatgcgccagttgacgcgtgaaaagcacttatgtagatggtcaggagacttttcaccgacagaaacgcatacttttgctgttggggatacatttgtccagaagtagattatctgtatacatttgcgcgtatagcttgccgcggggacgcgtgtctttctcgtacgaatccaagggagacattatccgtccggtagaacgctttcgccggggggcaccgcttttaaagactgtcaatcgagcttgcagagtgggaatgtatggcgacgaaaactgcctctgagagtacagctcatggcaagcgttggcggttctctatgaaactgagacagactacaccgccaggattccactcatccgaccaataggaacgacagaagatgtgactcttgaagctttttatagcgctggaggtattgtgtgactagcagcgatttctagataatgggcctccctttacgagagctacccacgaacgctaatgggtagtggaagtgtctttctacttttagaaggctattcgggggcgccgcaagagttattagttgtctggagaacacttcacatcctgattgaccacaatgggcggcaaagccattccccccagaactgacgcggtctcctattttggatcaccattagggaactctcttttggccggattttaagtacgcagtgggctaagcagagagaggaaactatcgctcctaactgaatcttgttcactattatctgagctgttattcccggcgtatcttacgaccgttgtacaatttggagatacaatttgacgtggatttttccacacagatagcgagggacaactacaactctgctagtatgatcagtatcatcgtactgggagtttgcaaacaggcttagaaccgaaacaacagtcaacccaaagcttgccttttgcacggcggtgcagcgaatagagcgttatagactgttctttttttgagtgattgttcggctactttgatgcagtgtcaaaggacatgttcacacgaagcatggcagtctgacagaattgattcgacagagatttccggaattccctgttgggacttcgcacgtttacgtgtttcaaacaacgaaattgggcgtgtcacactttactgggctggtgttttgcgccctcttgaagctctgcgctgcaaaagaagccccgcgtatcatcaagaaaaaattccgcgagaatatcgaaggcgtcccatgctgatattcagcagagtctgaatacgctcagccggctcgaagataaatatacggtatgataagcaaatatattcgaggtttatcgcatggttttcgtgtgctctaaggtcatccgcatcaccagcgttgcgtctgtgacctgctgtttgtagtagatcgaagtgggtttaacacacaacatgctgtatcctaggggtcgagaaaacgtagtttcgcgtgcttgatcagactagcccacttgcacatgaggcggacaatcacctagacagtgtcaggctacttttcctctggatctattttgtgcgtatggaaattctttgcttgggagacccaccaggggtcccccgtacgtaagacaaacttttatctgaaccctcttggtggttcccttgtatcttttgaggttgtcagatgtccggctcgcagccagacacgctgaaagcgttgcacttcggaatgaaagacaaagctttcctctacattcttcttcgaaggtgtatcgaaatcgccaaattcagtcttgctgtcgaagcaagcgtggaagggacgagggagcgcaccgtcacaaagttggctaggtggcagacttgcgctgcgctgccacgtctggggtatgttgcgagccaaaaatgcggatagggataggtgccttgctgccaaagaaaggatgctgagagagacagagggacaggggaagggaatcaacttctcttctgtggcgtgacaagagcttgtcagtgcctgtatcttccgagacgaaactgtgctgacgggtctatcacttcttgcttattccaggttcgcgcgttgcactgcatcacgccggttgtatatatatctctatcacaggtgacttgaatctctctgacttttcaaca

SEQ ID NO: 3498 - DNA, 4932 bp, Toxoplasma gondii
  source 1..4932: mol_type = genomic DNA
tggatatgtgtgtgtgcagttctgtgagattacctgcggactgtgtccccacgacgcagattctcggcaactggataaactgctgaagaccgacatctcggagttcgtcctgagagcagacaggcagacctagaacgcaaggagtcaatgtcgctccttcaaatgaacagcgcagtccttcccgaatttaggtctccacagtacacagtatcgacactcgagtgtgcacacacagacatggaactgtgcgaggaactatcggtattgagagggagggcggacgccgcgtgtaacaaagtgatacggagaagcgaaatgacgaggaactgcggatgaaacacagatgcaacagaaggcgttttctgtgcgtctccacccatttgcatcttgcgagacgaatcagcgactccatagaagatgcgagcctccagataccagagaaaatccagaaaatgcaggaatgcgaacgacacgggtccgtgcactccagtggacagacagccgaccacgccacacacagagttctgcacactggaagcagccattttggaccgcgtagaagcgccgttttccacccctccagacgagacacgacagaagcacgcatgacttcgcttgaacgcgcctctgaattggcgatacgcagcatttgatccacacggcgccgacatttgagtgtctacatctcgactgttggcggtcgcagcagttccggttcgctgaatggaacggtctgcatcgcggactggtcagatcaggagacaaccagagttatgtcgcaaaaagtggcttaccacgacgttaatgagtttcctcaactgttgatacatttgagactcgactttgacgccgtttgtcatggacttctccccgtcgccaggggccgagacggccggcggccgcgccgagacgtcctcgcgtttgccgtccatctgccgaagatttcggaggaaaacgcgtttttagagttgacacgtggctcaagacacaaaggcgaggaggcgggagagacttggcatccccgaaaggacgggttccggaaaaaatcgctagagacgtgaactgtagacctcccgaggaaaagtgtggaacactgcgggctgcaggatggaggtttctcgcacggtcgccggcgaaagtgtctgtctcttgtcttatctcgaaggcgattcggcgaaacgggctctcgggaattcgggggaagatactgacaaagacttctccgcaaacccgaaaagaaaagggcaaactcttgtctttcttagcaatgccaccgtcggccctaacgcgcgagcgagtcgtccagcacgacagaaacacgctcggagcccctggccacaggttttcgacgtagaaagtccgttcagatgggaatttgcggaattcttttctttcgttaatccgctggtggggggcgtccgcaaacgctctacaagccacacccacctagttgcaggaccccgtcgctagtcggtagcccactcgcggcacacttttctccccctttcgcatgttcgcggcgaagacggagcgtttcggagggaatgacagcaagcaaacagcggccttaggagcgaagagaactgaatatgtgactccgtcgcccaactcgaatagacagacatgaaagtgtcggttttgcaacacggacaaggactctatctagttgacacacagacgctactcagtccatcgaggagttctgactaccaccaccgcactactggactgcgtaaaatacgtagacagcggaaaacgatggagttttttcactatcttacgttaccttgattcttctccgttggttcctggaatcaaggagcttccaggacgacattgattggacggaactcgctggcttcgtcagcatcgccctgagtcggccgttcccagaaggcctggaaaaagggacgagcagtcttcctcccgtacagtgatacgggccgaaaaaaaacgtctgagtttctctcgctgttcaatacacgaggagcagcagtcctccacaaattaagccgaaaacgcagccggatgtggaggcaacgagcgtcacagatgcgtggagattccggaaaaaaagagtccagaaacctctccgcaaaagcggggtgactatgagtcggcgtgctctcttcgctgtcgcttggcggggcgaacaaagggcgttttaactgccgcttttccaatccagcgaggtatcgcctcttccttgtccccaatctgaaacgtgaactggaagaaagagtagtgtcctgtcggtggcactggacggcaaagcgtgaaagcgatcggcgggagagagttcttctgggccgagggaaacgactgtcacaaagtggaagacggagctaacgaatccactttttaagacgaaggtaaagtccatcggcaacgatggtatgccaaatgtggatgatgctccggcaagctgcaagaagtttactgtttaagtaaaggggaagaagagctggtcgttctgacgagttcagatagattgactagggaaaaggtgcctgcagtgtggcgttgccagtttttcgccagcgtatatttgcgtaaatatctgcgtgaagtcgaaaaacaggaatcagcgacacaagaagtctcacagtgtacccggggttcgtgtccagtcgcttccacccggtagtctctcaactcacacatataagcggtaaagacaagtacatcaggacttccgcgctgttataggtcggctgaataagaatccgcatccgtcgctttttcgcaggagagggattgctggtatcctgcgtggtaatagcaagagaagacgactcgtcaaatgttagaatgatccgggccaccgtactgggactagtcagtcgagacagggtgattcataaccttctggggagtcggcactgcgacttcgtttagagcttgacccgtagaacagcagggtcaacacagaaatctcgctaccagagagagggtggttgtgatgtttgcacgaaaaggtttgcatgagaaacgggacgatgggttggtcctgataatgccgcctgccccggttcctccgagaaagcgtatccggttctctttcggcagttctctctgattactggcacctcagtaatgcgtaggatgctgaactgaagacaatgttacgtgtactaaattccttccgacggctctacaccatggagccactggactgcctcagaacaaagctcaaagtgtcggatttcagtatcgtgtgagttgcatccgcggcagttcacttctttagcgtgttttcacacttcgtacctctttggattgcttgtgtattcacttcctgtctaaagaaaaacaagtcttcaacgaaactttcaacaaatcgccgcatgtgtcccgctagagtactcaagatttagtggaacctgaaacaacgggttttcgatccggtaaacaaagactttcaagatgtaagcccgtcgttcaactcgcaggatctacactgcccagaaaaagggagcttacataaactgcggaatctcattttaggaagtgtggctctgattttcctgcttctctgggatggcgagtccctatatgcccctgtcaactcgctacttgacgctgctgagttcacgggaaaaaacgtatggacgtttatgcttgacgaatgtcacatacatatacatgtgctgattcacttacatatatgcatatgtatatacctgtatgtatttacgtataacatacgtatatatatatatatatatatatatattcacaggatctttacactttctttcgtaggtggaatgtattctgccttcctgttcgcttgcctgcgatgcgcaggagttcatgatgtccacatgatgagatcgagggttctatgagtgtttgcaggaaatgtatgttcttgtaattcctattctaatagcgtctccagctcagcagcaacatgaatttttagccgcgtgtcgggtcccgttgaaggattgacccttctgcagcgacaaagtcccagaaagctctcccattctggtctgcttattcctctcccctctaaagaaagcgtttctctcgttctgtagaggcaactgttttcttctgacgaaaaggcgccaaagcgcacgacgggccacagggcgtcggcgtctcgccagcgctcgaagacatgtaagtaaatttcttccagagatactgtgtttttctggatgtttttctctccatagagcagccaggcactggaaaaagtgaaaggcgtttttcgatgcgtttccgcgaatttttgagacgacccacctgttcaacaacttgtgccttacacatacgcatgtgcgaccaagaagaggtaccgggacaccgactgtctgtgctctctggggttgagttctgaaaggcatcgtcacgtcagatgaaaggcgctagaacccccccaacaaagactggagttcaggacattttcatttctacgctttcaagtaccctccgagtcttacatcttctcgattctaccctctcgaagccggtcctgccggcggtacgctttccctagttcgccgtcgaaaagcggagcgttgttttctgggtgacgtggatgagattttggaacctccttctccgtcatgtctgcaaatcagtttgaaaggaagtttcctcgtctctcggccctgtcctgttgtgatgctgacgcccggaaaagtcgagtctcctcagcttctctcaaaaaaccgtcccggcggtgaccgttgactaggcgcggacatccggggaacgtgtcgattcatctgtgcgttgtctttcttttcgcttcattgtggccataaaagggcgccctttttcctcaactcttcggtcgcgcgactctgcggacgccgaaattcagttgactggaccggcgttttcgatcggaaaagaaatcgaaaagtcaagcgccgtcgcttcagcctacccagacagcctcgtcctcaaaga

SEQ ID NO: 3499 - DNA, 3927 bp, Toxoplasma gondii
  source 1..3927: mol_type = genomic DNA
cgtgacgagaacgcgtaaggaaattcccttctacgcgagcggcagacacgcgggaggaagccgcagttcgaacgatggattcttcttttttcactctgttgccgcattgttcccggaggagctacgcgtcagtgtcgatttcgtctgtgccgagtccaggggtttcctgtttttgtcctttgcttggatccactgagtttctgagttttttaggtagctcgccttagtcctgacccgtgtgattctccagatgttttcgtggttcaccctgcgcttcctccgcgaaaaccgtgaggcgaaggcgaacaacttttgctttctgtcgatgcgcgttcacggacgttggccagacggatacgtagaaaaaactccgacacgctcctagggtcttctacagggggctttccgcacatttaggaagatgccactgggtaaagatgtatcctctctgtccgcatgctgggacacaccttcagatccagtccccgggatgtcacttcatcgccacaaactccgatcgagacactgggttttgagagagcaatgtagaactacacgggtgatacgccgctgtacctgtgttggaagtgtaaaaaaccggagcagaaagagaaaggttgcattgatgggcatccatccaaatatggaagagaatctgcaactagaaaggctgcgtaaatcgctaatacacatgttgagagatatatagtgatgctaaaggaaacgcgtgcgaacattaacctgtcaactcgaggacacatttttttctgaggtgggaaaggcgaagagcctgcgccaactgtcaatgttgaagaaactggaaacatcacctagtctagtgactgcttcccttctgcttcgtactcgagtggacatcgtgcttgaaaaaggtgtcctcagcggttccgcgttcgagttgaggctttgttacggaatgttgagcaggttttctgcttgctttcaagttttgttcatcaagtcgatcagaacgcaaacgcgggtgcgataactcgctccgtacattggtaaggacttccgttgtcctcacaaaagttctgcgtgcgttctacgcccgtgcggttcctgtactgtgaccgctgctatgtgcggcgcgtgccgagacactctttagagtcaaactcttttttgcgatgcgctcccggtagtgatgtcgacaggggcgtacgctcccagcagtgaggagtttcgtacccaaaaaaggtattcgcgtggagcgtgtcgtcaatcgtggcggacaacgagtgtttggaggtggccgcacaagtgcagcggtgtcggctaggcacaggagggagagcgttagatcagcccaaagagtgcgtgttgctgcgttctggaaagctcgagaggcgctctgctcgcgaagcccggcagccctaacgatctacatacatgtcaggctaacaatgcatccctccagttactaaacaggtgctggcgaacgcgaattcgatccgtgaattccgcgcctgggaccatgaactattatatactgcacccgattgagcgtggactcacgcatgaaccagtatggtgcagccgtttcagtgtttcatcagcaaacgcaggcatggtcactttacacagatttttcctggttagctgtatcgacagagaggaaacttccgaagaaaaaggacttgccgtggacccaccacagagcaagcacagtgagcagcaaagcgaagagcacggattccacaatagtgaagacaagtggcgcgactccaaacggatattcgagaagcaccaaattgaacagaaacgggaggtgtatgtacaccgggtcgaacgaccgtcctctcttggctgcgcacacctcgacgataaaaccgtcgaaagaaccggggttttcttccggagttcgaccctccgcgccctcgactcctgcatccgaagaggtcggcttctctccattcgatttgtttggggaatccgccgagaaaaagaaaggaaccaacggtgtttcagcagttgcgctgtagagtgtcccgctgtcgcctgcggtgaacgtccacgggagcaccgcgtcgaggatcgcgcttgagacgtttcgaacggtccactttctagcaaaccgattccggaattcttgccactgggagctggctcccttctcgtgctggccggacgatgttacgttggcttctgccgctgtcccggacttgctcggaagaacgctggacggttcggagtcgaggaacggtccgcactcagaaccaaaccaagagacgagttgctgttgctgtgcagcggtcaaatcgaaattcgagcgttcctcttcattggctgcttcgcctccacctcttttctcattgtccgggttgtcactctgtcgcctcccctgacggcggcgttttccgctctcagcaccagcggctgctccaggagagcccggcagctctcgctcggacccgcctccctcgtcagcttgcccgtcatcttctacaattcttcgctgctgtgtgcctttggcatttctccggagttgctcgcgcactgacactgcagcagcccgacagatttctgcttttccatggactcgaacgcggaggtcatgcacgggcgcagctccgaggtgagactccttgaagccgtaccgcgccctgggagcgaggaagaaggcaggtagaggcaggaagacgcacgcttccggccgcaaaggcacattgtacagctggacgtctggaagcactcggggaagtggagacagcagagtccacaggtatgccgaaaccgacgaggaaaagaagggaggggccgcagagtcccccgacgaagccgcgtctacaggttctccggacatgcctcctctcgagacacgaaacaggtgacagagggggcaatcggacgcgggagagagattctcctgtaccccaagggaaggggccttcccgtcaatccatggcactgtccagaacggaatctgcaagactgtcggttctgcgtttcctgtgtcgagtccagcgacaactggaactgtctcgcgtggctcctcgccctctcgagggcaactggagacacgcagggagtctcgcgttttcttcggatctgcctcgagttcattccatccttcccgacacagaggtgcggcgtcagcctctgcacgcgcgtacacgaccggaaaagtcgaccagaaagagcaactcgccgcaagccgctcatctgtcccagcaggccctcgcgccactgcggagcgtccaagccaaaaggtcagggtagacgcagagaggaacaaagcgagcaggcaggccgatgaaggcggccggaccggacgcctgtttcctgcgtggatcgacgtcattgtacactggagcagaatctggaggaagagaggcgaaaaagctgaagatgcgaggcggacgaagccggcgaagcccgggagacggaagaaagggaaaagtggaagcgttccatcctctgggttcgcgagcgagagaaacagctagccccacggagcgtaagagagtgagaacagagagagcagcgagacggaacagcgaaaaaaatcacggacaaagacgacgcacgcgtcgatggttcgccggttttatacactcaaatagacggggacggctgaaccgctcactcagaacgcgagtagagagcgatacggagagaagacaaagttcagctgtgtggctgaggtgaaaatgtgtgttgcacgagacataacggggaaaggccaagcccccggagaactgctcgacagccggttgcccatgaggcgcataaagaatagaaccgtgtacccctgggattgccttcttatctttggtagagtgtatgtgtgtggcgagacgtaaaacaaaggaggctggtcgtctctgagatcgcttggtagctgagatgctccagagcctctggggaaggggggcgcagaggagaaagccagttgctggaaaa

SEQ ID NO: 3500 - DNA, 2795 bp, Toxoplasma gondii
  source 1..2795: mol_type = genomic DNA
cttcttgccagagcgtaacaacgctgctgttgcttcgctgaaaaatccaccgaggtcggcgtgagcttgtgtttcaggtttttttttcgaaagcggtgtgagcagcagaacagagggtctcctaggcttgcagcggtgagcactttctgctctatttcccgaatctcagatcagataatcacggaaattttttcctctcggtcttccatattcgcatgtatatttctcgtaccacttttactttgggaaagacatgccttctctcttaggcgtgttctcagagatctgacagaaacaacttttggagcaagcccctgatttcctctgcctctttctctaggtttgcctctgtgatgtaactccgaaaaaacaggtagtttgtggggaacacgtacaatggacgcagcaaaacggtccatccgcaaatgtgcatctcaaaagacagatctggatctacttcactcagagatcgcaattgctggaaggcgatcttcatcgtagatggagcgctatgtgacaaggacatgaaaaagacgaggacacgcgtggcatggcgcctgttgagtcactcgaggaacgctttccactcccggtatgtacggtcgatgcgagactatgcttgataaccgctactgctcgaagtatgcattacctcctctcggcagcactgtcaagcctcctcttcgtgtggttctcaaggcaggactaaggtcccccggctctttgttgcgttgttgtctgtgctgtcggcgacaatctgcgcactgacacttttttcccacttgttttcccccgggagcctggcaccgctttctcctgcagtgacaacgtcgtgtggtacggcaggagaatctgttgctcgcggtcagtaaaaaacaagagagtctctcccattgtccatatgcgcgtggcgtcgctcattctaaggtgacagtgtgtcgtcacattgtgtcggcgttctcccgtgcatccaccacgttgacgactcctgaagtcgcctcacaatggcttgcgagtgcagtgcttggaatgtcgatgaggagaaaacacttcctcgagcaacatttgatacctaccacccaagacacttttttccataccgcagaaacgaagtcgagacgaaccaaagaatctgcggtgtctgtcttaagttccttgtcgtccacttgaacgcaggtgaaaccgcgtcacagagaggacgtcaaagcttcggtttgcagagcggcggccggaaatgcacagaaacgacagagactccgacttcaacggtgaccgggactcgtgtcgaccctttttctcgagagtttgcaccacgcgtttgtagactgttggttttggtcttgattgactgtcgctgctgtttgccagtcctatgttgtatcgtgtgtcgcttctagagcacgtcagaactccgtcaacttgcagtcgggaccctttcgtcctgtttcaggagagatgtggaccacgatgaaactctgtctttgagcaagtgaactgtgtagcgtcgtggtcgctcctctctctgctgttcgacggaacacgcttctcgacaacagggttcttcaacttaaacgggagagtgtcgcgcagttcacacaccgcgccgaaagtacacgaatctccacgcctgtgcatgtggaggagaaacgaacttggatttcaggcgttcagcgacgaaaatagaaggcgcggaagacaagcgcattttcgcggtctgcacgtgacttttgtaccagcgcaggttgcctggcaaagagcgctgcgactttttcacactgtcctctccctctctgcgagttaggcgcacagaagcaatagaggacctccgaaattcgtattttctccgttcagctttgaaaagagtcgagctgcgtgcgcagacaacttttctggcgacgtctagggaactctgcgtcggtcgtgtccgactctccttcacccttcagacctctcgtgtgtctcccgcgagttggagaaaactctccaggtggaggatcttcgctggggaccgctttttctcttatgcgctgtggctgtagctcgtgtatttcgccagtctctcgcttccttcatcgtgccactgtcttcgaattttctctgtcctctcccattcccgaattccccgggggtggactctgtgtgccctgatcttccgcatcagcctgggtcgggtctgatcgtacacatccgctttttctccaccgtttcccgcggcgttttctcggaaaaacgcatagtcactttgcttcttcggtgcgcggcaccgacgtctccagtcttgtgtttcgcttcgttccgtcgcttcgtttgcctctctccgcgttcggacccccttcaagacagagcaggcgtctgtccgcgacgtctctcgctgctgcgggttccccattgccggtgaaacgtgtaggttttcctctctgctcgcggctttggaggctgaaacaaatagctgacacagacggagagcgtcaacgggaaaaacgacgccgaaggaggccgtgcttcccgactcgcgccctgcgcccgagacaagcgggtgttgactccggcgttccgtcacacacaccgcaatctcctgacactttggtgatcgttcctcgcggccaacagggaagaaaaaagagatccgcagaaggccaacagttttggaaggtcctccacagccctccagaacgacagccattgcttttcccggacctttcgccctcgaagtttccgtcggcgtcggctgcgggagtcgacccagcgcgcattgtctgtatacccgaaccaaagtgcccttactttcttcacca

SEQ ID NO: 3501 - DNA, 2875 bp, Toxoplasma gondii
  source 1..2875: mol_type = genomic DNA
cttgcgacttcttcctctcttgcttcatcttcggcattcgccgttttgcccgccgcaaagatgggagccatgcgagaagtctcttccctcgtgcgtcgccgagagactccagaggagctttcgctgcacgcagactggcgaggctctctctggacttctcctcccgtttctccagactgtctgggcgcatgtagactctgcgcggtccaccctgccggcgaggcactgccgagaggaaaagaggaaggagggagagacggcgaagacggagccatggagagatgctctccagaaaagaacgcaggaggaaacgaggaggcatgcagagacggtgacgcagacgacgagagagaggaaaacgaagacgaggaaagggaagggagaagagaatttgacacagacggggaagagaaagaatgctgaaaagctccaagaagaggtgcggcaacggaggacgagctcgcgctgggaagcggaacaggagacgacgagagggaggacgaatgcgaatggccgttgaacggcaaatgagaagaggcgaatgggccgtggaggcgagacgctgtaaatgtccccgatgctccccaagtcgatcctggagaagaacctccgaggctctgcgagctggtcccaggaacaggcggcgtgtctgcctccatgatgcctcacttgagcgaacgctgaggacgggggaaatggacagaagcacagcaggggaagttgagagagaatgggagaaaacgagggggaaaccggtttaaacgcactccgagaggaagagaaagttagcaaaaaccgcgcgccaatctgcaaatgcaaagaacgtgaaaaacacaaagaaagaaaagtggaccctcccgtgtccgccggtgtcgccttttacgcagcgccgtcgagtgtgtgtacacttggagcgtgagctgcgatcagcatcgcagtgtggacgcactctcgctttccctgtcctttcccaacgtccctcaatagggtcacggaacagtatttttccccttccgacaaaatcacttgtggtggaaaacggtatttcttcctctgagagaggacggtggcgacgagacacgcgagccgaaccaggcgcgaacgcaccagtcgcgctttttatgggggccgacgaggaaggaagagatccgtcaaacggagcctcgacaagcacggaaaaaaagttagccgcttgagtctcgaaacatagctcgtttgggtcttgcggagacatggagaacctcttttgccagaccacgtagcggcaaccgaggcggccggtctctggcaaggccctctttttcgttggtaccactttgctgcctaagaaagtttttaccttatgctgcttagaggtcaacttctagaaaaactctctttcccgcctcatgcaagggcttcgctgtcggtcgtctgacagcgcggcaacttcgcgcgacaaattcacacaggcgagaaccgcagagagacataacttgcaggttgattcactcgagatgccttttacgaagaaaagaagctcgaaaggcaaagcggaagccgacatgcagtcgaggaaagatcctagaattccgtcgagcctcgagctccagcaggcaagtgaccagacagaaggcgtttttgcacgcgctgcgcggagactggcgctgtacgagagtggagtaattcggttcataatttgtgttgtacacgggagccactgcgactgaagatcgatggacaaaggaacttcaaattccacgtcgtttccccctcaagtggcgctggtacggaatacggaacggaagatatcgcaacttaaacagagaacggtcgggaggaatctcgctgactgttcccgtcgtagtaaaaagggcacatgtacaaatgatccgcgaaccagaactgctttgtccaggttcctcgttgttacacaagggcctaggttccttattgcgacacaacaagtcgccgcgacgctgagagtttctagttgatgggaatcacaaaactgtcaaggttcgtattggactgtctgctaacgctcctgtgtgtcgcggaaatacgtcgggcacacgcacatacgcacttttgttttccgaggaaagcaggaaaggaaagcgtttttgcgcgagggcagttgcgctaacgcaagaaagcgggactttcaggtttccttgttggttctcgggcaaacaactccgccgaagtcaagcaatccgtaggtctttgcatgcgtcgttgtgtcgtctctcttgaaagggccgaaacttgggtttccaacggttgaaaaggcgaggatttcgcaaattctgagatcggaggctaagctgtgtacgagaccacttcaaatactggaaacacaggtcaaagttgaccatttccggacgtcctttccggtgtgctccctcgactgccggcctcctcgggggagggggggggcgggcaaacgagacgaggagaggtttctttttttggagaacactgggtggatagagtagaaaagtagctcggtcgacagatccagtgtcttcgcagtgtggccatctttgaatcaatccatgccagatgaaaagccagtggtcgggggagggagcaggaaagtcgctgccttggcgcaaacgcgcaggtaggagagagcgacctaggtgacctttgaagccctttgaactataatgtctctgtttatttgatttgagttatactaatgtgaacacagagctgtggcttgtctttcctcgcagagtccgcttctcagagaagtccgagcaccacgtcgacttcgtcggagtctcgcggccgccgcctctcctgacacaagcgtccaccgtcaacctctcgtctttttcgttccttctcgtgtgaattcttccttatccccttcagagaatcaaga

SEQ ID NO: 3502 - DNA, 1685 bp, Toxoplasma gondii
  source 1..1685: mol_type = genomic DNA
acaatcaggtggtctctcgtggcatttgtgaggttgggcattatatctgtgaagtaaggtacaacagtcccagcaaaattgaggagaaaagtggtatttgggactgccggagaaaactgcgttactgcctccccttactttgtatgcattcaatgatgggggggcggtgtaaccgggcatataccgcctgagatccgctctggaagaggcaggaggcctgaacaagcatatcacaaagcaagtagcgcacagacgcacagtcatcggactcactaggttagcgaggcatgctgtttgcgtgttgggtcagggtttctgtcgttggtgctacgggcacgcttgtaggctgctggcgttctgcttacacagcatgatgcggcccctcaaccgcacacagtgctgtgctggaaatctttcaatcaccgtgaccacggaataccattttgaacgtgcgtatcttcacgcgtggctgctggcgatgtcgccgttttcgccctactttccctcgtccttcctcatgacccaccgagaaagtgtggatcagtgtgtgctaagacttactctccacctacgcctcgaatgtgtttatttgcactcctatagaaggaggaacaaagctcatcgtcacctcgggccagctgcagtaggacatcgcgcacgcataggggagtgcacacggattttcaggcgactgatattagtccaacatgcttgaatctaaatgcatctggagcgctgcaaaacgtaatatgcatctattggggtgttcgatctccttatgaaatgtgactcattaggtgtccacctcatcccgaagcctgctccgcagccacaaagggcaacagactattcagaagttatgcgaatttcctgcagcctcagcactaaattcctcttacgagaagaagacacgaggacgccatcgcaaaagaatataagaatgtttgtatcggagtcgtcgacgtaggcggcccaaacgactcatcatacgcgtgttaaccacttcacgtcgttgcactcaccatcgcgaggaatggttggcacccggttgagaaaacaggtacttatccgcccgaagatctaccagaatatggagaaagtactagatttcccaggtatcaaggtcaccttcctgcatcaagcgcacttcacagaataaataggggcgatgctccgctagctgcggccaaaagccatttatcggtttgaaggacggtggctgttcccggtaaaaggcagattgtattggtccggacgagtttcgtggaaccacggttcccgaaaatctgtaataggccagcaagccatgagcaaaatgggtagatgggcaattgctgctttaatattcttcgccctctctctctcaaagagcatcgacacgctagcacctttgaaccgcgtggcgcacccgtggcactccaccagttggttaaggtccaagggtgccatgtcagcgtagttaagcgaaaacaagcataagtgtgtgtttggcagccttttctcgccctgtgtgtcgagtagtattatgcgcagcagattttatactgataattattggcatgtcaagtgactctgaggtttttctcatcacgaaacatgggaaccaacgcgttgggtgccgggcgtctccggtgaggtaacgccagtttaacagcggaacgtcattctcgcagtgtctcgtcgaa

SEQ ID NO: 3503 - DNA, 4014 bp, Toxoplasma gondii
  source 1..4014: mol_type = genomic DNA
tttcatacataggtgaagactcttctgcatttacaggcggcgtgtgaggagacagtgagacaatcaggtctgggaaaatgatcgcgtgtggacgcacataaaccgaggctcacggtgcatgcacgcatgcaggggaaaatccgtgtacacatgcctgcgctgttgtcggagtatcttggttttctcttgggtcaatctatgatactgtcagtcacacgcctagggaagtgtacaagaatagagcgctttgccggagttttttatttacctcacatttttgcagataatagtgacaacggaaagtgctgtctcttgtattgacgcatgtatgactgccttttcattctgcgttgtgtcagatgcacgaagggcgccgtgtcggaccaggggcttccaagttcatcattcggacagatgttctgtacaggcgaaaagtaaggttcttttatccatcatgtgtcttcactggcgaatggcgggaatcatttgatggattcttttgacccatgccgaagctatgatacttgatttttgcgaatgctacgtcaacgtcgtctgctggctacctgtagcctcaatacaattcattcggtcgcttaaagaaagggtgttgtggacgcgtttccgtcattccgacaagttgtgtttccaaaggttccccccttctctgtcacctttgttttacataaaataggtgatgggggttacagagtcggctatttttgtgaggtcggcatgcgccatcgtctaaccttcgtacgcgtgttcttccgatttcctgtctgcgcagatacctcttttgactacgccgaaagatcaggaggcatttgcactgtggcagcgggcagagctgcttgcggaagagggccaggcagacgaggccgccgtcctctttagaaaaagtatcaagctttcccccgacttggctgccatctacggaatggcgtaactgacagcatactgaacacgattcagtttctcccgcgatttgccgaggaaggcaacaaaaaatagcggggtggctctcccctgtttaccttttcgtagcgagttgaaccactccccttctgaatgcagtatgaaacccccgacctacgaaattcacggagaacaaaaacgtgactagcagggtgttttgtggagaaacgttttgggaatgccctggaactgaacaaggaaaaagctttagtgcccgtcaatgtaactaaaggtgtcgactttcgctgccacacatgcctagagcagcgaggctgcgaatgcagacagaacattggtgaataccgcttctttcgacttgcaggcgagaacccgaggcaagagagagatataggtatcgaggttgtggaaaagtgcacactcggtcggtttttgctttactcagtgaggacctatctcccagaagtggcaaagcgaaacactgacaaatgccatgcgtcacgaagtcatgtcaaaaacaaaatcccccgtgccgcgtccaggtatcgagtaacacgcaaattttctagtccaaccgtggaaaaagagtaatggtcttcaaaagtgatgttgtttctctcgctgcagtgcttggttagcgttcggaacgatcgcgtcaggttcttgctttcttcgtgggaaatgttcgatatcccaatggcgactggcagagagcgggcaaacggagggttgagggtgcagctggtaaagttcacatcacatcttgagaggaggacggttcagaaaaatcatttttgaggctcgtaaaacatataagaagcccatgtgcaccggctgtgtgttgcctcactcacccttaacgtgtatatggaaacagcgatgccgtgatctttaacgacgacgcgttggggaactgcagaaaacctcaaacgcatacagcggaagtaggatgttcctccattgctcaaatgagatgaaactggtagttttcagggtacgcaattgttgccctgggctattagtttcagtttgactctgtttgcgaaggacagactgagctgaaaactagtgcgacaaagaaccgcgtttgttggtcgttcagtgttcttctaaatgggatgtgtcagctgacgggacgtcatccacgaaaacccgacaatcttgaggtggcggtaaaggctaggagctctggtgctatcactctttgtatgggcagcctctctagttgctggatgatacagaagcacaggaatctggcagtcaccagggactgctgagctgcagttggtaaggccgagtggtcacacggtgcgcacgtgaatggggcaatttgaaggattatgcacgcattcaagcggggactgaataatcttgcttggcattcagcggtagatccaacgtaaaaaaagggctagatgctttccgcattttcggggcacgccacaagtcagacagtagaattcggccagtccacttcgtttggtttcgaacatcaggacattgttgcctcatctcttcccgagaaccttgccgtggggcgacagtgaaacttgatgctgtcacttgcatcgtgagtaaggcaggtccggttcctcgcattcttcaggaagcttctgtaccggcttccggaggggcagcagcaagcgtcggttccgcttgtaactgagacgagagatagtcaaggattacagcaatacacttgacaacaagggggtaatagcgaacgaagtttccgcatctggagagtcgattcgcggacttcctctgcgtccagtattatagaaggtttgtagacgaatgtgtgtttcgaaggccacagcttgaaatatgtcatgcggtttctgtgtttagttttacactctgagtagacaacaaccagtgtgaaataggaatttccgaagggcattcagtgagcttccagccccgttctaatctcagtttttggctagaaggacatctctaggtatggccactccagccgtccattactccttccgactgtgagcgatccggcacatttaaggaacccttgtctgatgcacgctcagcgtctgtcaagtactctgccgtttgtgctagcaaccgacaatgggaaaagatgcgtttcgttgttactgtagcgcgtcgtgccctgggagatacaacaacagaatagtgtcgcagtgagtcgtggcttttcacgttagcataacaccgactcggcgtcgcggggccacaggacgcagcctgacgctccctttggacttgtaggaatgacgtttcaaaaagagcaggcaaagcttacgtataaatccgtcgcgtttcttagatctttgtgcttctatccagaagaatcccagtcacttttagctggtctcaaactgtttagcctagctgtagatggcagtatgtccatgcatctagcggaatcgctttggggcttctgttggggctgaaaggtcttagcgtgcagtttctctggccagtacgagaggcaaccgcggtctaaaaactgaagagaggatgaggagtttgcattacctagggtggaacaagctttcgaagcgtgtgacacgcgtcgataaacgtagcggtgacagaagctggcgcctccgaagacgcgaagtgccaaacctatctctttaagtttctgtcagtctccggcctcacttcgtcggaggcctggagagttcaagatttaggaaaaagcggcctcaccgatgatagacagagggtaaggggcaactgtttccaagcttttccagacacacggacggaacaataaagtaaagtaactggtgcaaagagttttgaaatcgcttccctctccgcagtgacttgcgtgtgtctgtatcgcattgtttcgccatctgaagagcacgggttaccagcatcgatcagaaagaccgttttggcgttgttccaccacgaattcgttctcactcgctccacacggcagcgttcctctgtcttattcgttagctgcttgggggcttctctctacggcggagcgcccgaacgccctgcataccctgccgcagtatcatggcctctcaataatcgacgcagcgaaagagagccttgccacggcttcaatca

SEQ ID NO: 3504 - DNA, 754 bp, Toxoplasma gondii
  source 1..754: mol_type = genomic DNA
gttccgtattatggtagcctttacggttttgcggcattgccttcatggcgcctcacgcgtcacctcatacagagaagatggtaggcgatggccagaatcacgtgttttcagagtcgctattgcactttggtgtgcgggcagtcggatgacacggagaagtgggaccggtcaaacgcctaaaactaaataactgagttaattaatacagggttgaactatgtgagtatcattgtcttatggttccaccgcttcacagttggcactatgcgcctggttagagcaggtggcggtcccctgacgctctctgggtcccgttgctagagcagttccacccgcagcagaatgtaaagcacgattgctggtagtcgtgtgtacagtatctggaattcgggggccggctaggttcctcagtgagtgtctacgagctttctttcgctctgtgcgcttcaaaacactgtggtgagctggtcgtcggtataaaagtgcagtaagaaaagtggcagcttgagcaacattgtggcaaaggtcgaagcagcaatcgcaaatgtcagtcgtatttggatgtgtggcaaaacccgacggatgctggtccaagaaaagaaggaacacaggggagggtaccacgttgcacaatgggcaccataccgtttagagagatccacagaggcagctgaagcactccgtgctcgatcgctagagcctgtatgtgagtagctgttcacaactctgcaatcgaaagggggttggtgaagaa

SEQ ID NO: 3505 - DNA, 2678 bp, Toxoplasma gondii
  source 1..2678: mol_type = genomic DNA
tgtttgtctcaggcgcatcccatgccaattgtcatctctgcctctccgtcttccgcgaccctctgtatgtcccctccttcttcagccttctccacatttctctctgtgcccctctcgcttaccctcttcggcttgaggtgcggctgcgtcgggtgtctatacagtccagcggcttcgaaggcgcctgctctgtcggcgtctgtgccctctggcgcgcgcgacttggtcccttccgacgcctttcccttctcgccttctcgcttgctgagccgcgcttgctgcatgcggtggagagccaactcgggcagcacgttggagacgatgtcgaagtcttccgccggcaggtgctgaaacagggagaagggcgcactcgcctggcctttgccggctgtacgtacacccgagccacctaccacaggcggcgcggccaacggtgggaccgcgaggaggttcggataccccttggggttgatcaggttcggcagaatgcccgcaacgtcgaattcttggaggagctgaagagaggcgacgacgtcgaagacatttgcacccgtttcctcgccgacctcctcgagagggatcgagtgccccccccctgccgcccccagctgccgagtcaggtgccgggtctccttcgacgcggcgtcctgtgcaggcggctttccgcaaatggcctcacggctgaagggatacgcacaaaacttcggcgcgagagggattcgcggcagaggtacttgaaaagaaggcgagtaaagatacagagattttgtttgcaagtaagcgagagagccgctcgggcggaagttgcgcgagggaacaaaggcgagacgccggccagacggccggtcttctccggcgccagcgccggtcgcctgactcgcaggccttcctgtctgcctcatgctggacaggctaaacgacgtcgcgcaaaatcccagaggacaactacaaaaaagcggaaatcaactgcgaggcgacttcaagaggggttgagactgtcaggggacggaagagacgacgggcgaaacacaagcgtggacaaaccggagggcgacggcacactaactgaaagacagaaaaacctaccagaggaaggaataacgaaacaaacgacggaggcgaaagggagtatgaggtaaagaaaagagaacgagtagttgagacaattgcgcgcgcatgcacgacggagaaacctgtggcggaaaatcgacgggttgtctggacagcagatccgagaaaattctgagtctgctccgtttcaatccatcaactaacggatttctaaagagcatgtattgggcatgttcacgtttctgtcgacgggagagaaaacatgacgctgaaacgcctgttcgggcgtcactcctagtcgccccgaccttgagaggctacctaacatccagttcctatctttgggttgacgatttagcgtaaaaggcatgtctgcgtgccttctctaccgttacgcgggaaacaaattcgcgcgaagatacctgtttgaaggtctcgcgtttcttgcctgtctttgcgacctgtgagagagtaggcttcttaaccggccgtcggggctgcatgccctccttcagagttgtggcgcttcggacgcgcgtcggcttatatacgaatttcgcgttttggggccggtgtgcctgcggcgcgttgctgactcatccggctttctcggtgaacttgagtgacgggacaggaaacggtctggttgcttccttttacggcttctcagcgttttcctttccggatgaagcgcctttttgtgcccagctgaacgccgacaaccgtcgactttcgccggaaaaaccaaccgcgcgtgtctctcctgcgaacgcttgttcttgacgcgagtgctgagaggtaaggcaacagacagcaacatgacaggacgaaagcatctgcaaatcggggagtttgtggctttttcagcgttgccataatatacaggagtgtagccagctggtccagacgacaagtgcgcctggtatcgtcgaaagtcaacgttcgagggaatcgcctgccgttgagccgctgtttgccgttgagacacacacactttcaacctcacgctgtccgttttgtttcgcgctagcatcaagttaggtaacactcgcaacgactgctgctggacggaaagccgccaagacaactggcgtgagcattgagacagttggcggaaagagcgaagagcctgccaaaaaatccacagtttttaagtggcgcggtttagtgttctcagaggtacagccgttcttgtgtggccagtgaagagagaccgtggcgcaagcgtttcctctttgttgctcacatggtcgtttgtttgatttgcaattctgcgcttccttggcttcttgatgtttcccgtttgtttcaggctggtcttgtggcaccaagcgcggacgccgtgctttcgctctcctgtcagaaacagagaaacagacacttccagaatctcgtaggattctggcatccaaactctctttttgaatggggtcgtgagtttttttttcggtgtctgtcaacggcacgcgcggcaacgtgacttgttctaggccctccatacatccttcctcccttgcttttacggacggcgaaaacccagaggttttgcgtcttcaaaaacaagattgacggaatatcagtcctgcaccatcagctttttttcacca

SEQ ID NO: 3506 - DNA, 1992 bp, Toxoplasma gondii
  source 1..1992: mol_type = genomic DNA
agtgaacagcaggaaggctgtaacgtttctgactttgacatgcacagacggatgatttccaaattagcagcagagaaaagtctcactgtttacaccaaatccccgtccagctatgtacatatacagtaatatatatatatatatatatacatatatatatatatatatatataaacatatatgagatatcactgtatgcaagcagatgaggtctcttctgtatccacatacagatctgtatacacatgcagaactatgcccgcatgtaggcgtttgcgtctttggaggcgaggctaacaagacagaggaagggaggggagacagagccacagcttgagagggcggaagggcagagagagaaacgcatgaaacgagaaaaacgaggcgagctgttcccccgcgagaaggaaagaaacgcgtactccgcattcattttttccggtgttcttctctggcccaggcgaggaatgtccggaagcctgcatgcagagcagcgcctgcccgcgcagcgaggaggagacctcaaaacaaagaggatctgacgggagaggaagctggggaagagcaggaaaaaacgcaacggggagaagaagctccaacagagcggaggaagacgacacagagagcggaaggactcgagaggcgccgagcgcgcgcgcgagagagagaaaagagaaacgacaagatgcaaggcagaaatacagggataaaagtgcagtggtgggcaagcgaggaaggaaagaaaccttgcagatgagatgcgaggacgagaagcagcgttggtcgccgtgaacaacacgataaatgcgaggcgagagaaaagactacagagccttcttaagagaagaaatcccttggaaactccacagttccttcatctctttcacagacacctcagcatttgcgaagacgagaaaaagacattttcgcgatttttcaagacgacgctggcgagatcggcggcatctccagagacccccgcaaagcgtcttgagcctttcctttcttctctcgttctgctctgttctccggcgatctgtctgcctctccgcctcccaaatctctgctctagctaacgcaaagagaagaactctcgccagatgtgcagacacacctttcagagaaacagggagagaaaagagagagaaaaaagagagagaaaaaagagagaaaaaagagagaaaagagagaagagcgcggactggcgagaggccctgtcactttgcgcagcggcgcagcgcggggcgtcaagaaatcgcgcatgcagcgacttcttgacgtccgcgttgcatgcttcgcctcaatttctctctgttttcaccgctccttctccttctcatcttccgctgagcggctttaaaacagtgtacgcaaacaacaatcagaaaattcgaaacaattgcagagagaaaagacaagagggcgcgactcaagctgcgtcatgcgggagtcgaacgtcacagagccttgacctctctcattggagacacggtctctcaacttgctgtccgcgacaagaaaagattcaaaaccgtctttccccatcctctcccttcttcgcatgcaccagctctttctcgcgtcctcttccgcgcctctctccacggctgttcttcttctttttccgcgcgacttgcgccctcccaggaactccccgcggcctccggcaaaaagtgaagcgtgagcaagaatttgaaaccttttgactcttttggccttccacgataaccgtcttgctgtttgtctcgcgttccagaggacgaggagagcgtttcaaggcctgcgcaagaagctcgtgagcgcgagagagctcgtccgtcccccgcgcggcgaagagagagaccttgaagatttctgtgcttttgacacacgccgcagaccttttctcggaatttgccaacggagttcttcgtctctcttcttttggagtctcttctcagaggtttcaccttgccctccttcgctctctctgctcacacaccgcacgaacca

SEQ ID NO: 3507 - DNA, 3115 bp, Toxoplasma gondii
  source 1..3115: mol_type = genomic DNA
aggatttccacgctgtcgaaaattccgtctccgctgccctctttctctgggcctcgaatgccagccagaagtgcactctgctgttccagccattgctgcgggggaaggtctgtgggtgggaagaggaagaggaagttggctttcacgactgaaaaccggacttgactcttttccagcactggaagaaactccgtgagaaacccgcggtgctgagtggccctcgctgccagacgcttgccctgatcggaagaagagacacaaacttctgcctgaggaagcgaggactccggaagacccgtcgaggcagccgagcattttgaagcgtcgcacgctccaggggcgtcgcatgcaaagaggccaggaggccacgctcctgggggagaagaaagcaggaacgctcgaaattgattggggtcaatcctcatcgtgtcgacagcgcgtgagagaggaaagaagcggactttatcgacgtttttcctggacttcttgagtcagccaagagacaatggtcgtcgaacgagagaaaaaaaccaagccaagagatgaactgaagactgggggagctgcctcagagcacacggaatgcagcgagtggccgtctcgccgccggcactgacacccgcggaacgaaaactcacgtgtgacagggcaagcaaagacgcggttcgtttctctgaactgagtatcaaacagctggaacctcagaagagctgaaaacccagagagcctcgtgaggagcaggaaaagaagctcgacttttccagggcggggatacaccagacaggcggacaagacaccagatgatgcatcacggcctaccctgtcgatcgagcacccgcgcgactttttctgccgcgtggtggaactcgacgcgagactggtggccagaaaggcagccctcgtcagcaggaagacaggatttccagacgcaaatctgcaacctcaaaaggggcttgccggcatggcaaaattaagcttttcgcgtgccaactctggaaagtttattcaggtagaccgcaacggggaagcagacaagctagagatcgcagactggtggccaggagacgagtggcaggagtcacacacgggttgcagctacagggaactcggaagcgccatactcttacacatggtggccatgaacagctccacagaacatggatcctggaagaaaggcactcatacgaaactcaggcgtctgtgtctcgctagcccgaacctgcggcagagaattacatcttggatggcggtacattagcggcgaagtcgcacctctttcgcgggaatctagccactctcagccgtcggcatcagcacccgacgaactactggaaacgaagactccccataatgaccgtggcttccacaggagagtgcgtaaagagcacaggaagaaacggcaggagactctcttttacattggataagcataacagacaaagaagagacttgaaaggcgcacctaccccaccatggtcaacagagccgcgccgttcgccgattgacccgcggtagcgcgtgtgaggggctcggtcgtggcgtggagggggtttgcgtggaatccggaaaaccaagaacatcgggactcagagaggggcacgctggacgaactccctgtaaacaatgagaaacgagtaggaaggaagagcccttttcgacatcgtccgcaggtctgcaagctcgattgccggcaagggttgcatgcagtccagaaaccgcaccgcgagttgacagcgctctcccgtctagccgatatggctacctctgacgaagccagacatcgagacttctgcgtgaagggcactttccattcagcctcatgtagatggagatttgcgggttccctcgaaaagcattagctaacatcgggagtccacggttctgggtagaaaattcgaggcaaaaaatcgctgcaactgtccagcaaagagtcaaaacggcgccgccgccttcgagctgccttgcaaccagtacgacagtttggtagctcggacaaagacgttctttgcgcacgagacacagtcgcaatgccacactggtgtcgacaacgcgaggaccagttacttttctgtttacgcagtagtcagtttttgcgtagggagcagccgctgcctttgtttttcataaaatctgttggagctcgccagtatttcggaaattatacacgtttcaaatctggacacccggcactggcggcaggggaacctcgtttctcgagagacgacggcgtatcgtgtcaagaaggacagtttttccttcctgcaaaaggttacgctttcctcattcttctgccgcaaaatcatttgacactttcccactggccgtaggctgttctggagggttcgcgttttcagcggagttcctgtcggtcgtggtgcgatatctgcacgggaagcccctgtggtttctctaaatccggttcggagagaaacggccgcaaaaggcgaagacaagaatcgaggaacagcaaagacccggcgcaaatccggaatagggtgcgtagagcacaacgcgtcgcgaacctaaacgcgtttctgtgtgccacccgctgaaagtcagtgacttgtgtcgatttcttgcttgggtcttgcgaaatggatgtaaacacacagattcatttatataagtatttaattacaccttcttcaaggtgtgagggaggtgattgccacgtgtctttatccgcctgctgttcccagatgttttgtcggtgacgccttttctcgtcgacatttggcctgtcggccaccgactccggaaacgcgttcttcactccccgttctctgttccagtcttcactggcggcaagagttttttgtgtcggtgacacgcggtaacttccctgaaaacgctggcctccgtgctcgtgtttcgtccgtgggatttccccttcgttccgatttcgagcttcccccactgggcacaagcactgcgtgtatttatttgcttttccctccgcccgcctctgacagaggtcttgattcgtgttgatgggagcacaattgcccgaatatccagtccagtgctctgccgtgggcactgaaactgatccacaattcaacaggctttttcctctgccttctatcgcgcgattctcacagccgaactttgagaa

SEQ ID NO: 3508 - DNA, 3071 bp, Toxoplasma gondii
  source 1..3071: mol_type = genomic DNA
ctgcgcagagacgttctcaatgctcttgacttcagagacatacgaattttctgtctccccgtttggatgtatgcggccgttgtgctcgttttaaactactagatcaaccgtacctcaccgggttgtggttgaagggtgctttttaaggctttcaagggagttcgacagcggcggctctcatctgtatttgacgggcatcgtaatgaccatttttctgtttagattcatgctgctccgtggcaaacgtttctctttcaacctctgccacgcgctgaactgtagagatataccctccgcccacgcgtgtctagaggggtcttctctttatcagaacacagccggaaggacacctttgaagcgacccccgtaaagctgttctgcgcccagatcctctcttaacggccaaggtgcacgcacgggagtgattcctacagtcatatcacggacagcgaaccagaagtccgtgacaggcggtattcaaaaccgactgcaactccagccgacggttttgggtcggcgtcaagccacacacttacaggatccccttttggatgagaaacacggcagattttgacaaacggccaggaaacctgcctccccgtccgcaccacggggagaaagagacacgacgtggcggccggtctttgttttcttgtgagtagaatactcttggcggctctgctgcgtttcgcttcaagatatccgattgctatagttacaacgaacacttcctcgggggaagagagtcacattcttgatatttgaacatctgcctcgagatcacctgcagttcctctacgacaagcactgcccccgcgagtacattccaacagttcatttcttgtcaacgggaagaagccacacttgaatctgctgcctgtcaggccactgtcctgagacacgtttcgcacttcaacaacacacactcgaaacgtgaacatggtttatggagacccccgcggcattcaagttgcctgtgggtatcatgctacaggactcaggaagatgacgcctcctcgctgttcttttggaatctaagtgtcacagaactcatagaggaagcgagagttttcgtatcctgtgtgacgtagcccaaccggacagaatcacacacggcttctctctctttcacccttggccccgctcgcgtgtctgtctttccacaaacgtgtgttcttgactcctcatcgctaaaaggccttccgccctgtttattcgaaagcccgctgcttctcgaggatctttctacttgacagaaaaaacaaacagtcagctgtacatacacatacggacaacgtctttcttcgaaacctctgcagtaggagcagcagtatctcgagttaatatttctgcctgaccggggtggagtctgtggaacctttttcctcttgtcgcaatgcccacgtttcctctcgtctgtctcccagatcaccgtctcgactgtaaacggctgcgattctgtcgtgttttatcaggaaacacgtttttttttcgcaaggctgccagtcccacctctgtggtctcttgagcgaaaacgaagaaattcgccacacatcttgttttcgaagcgttgccccctaacgcaaaacttttgtaagagtgttcctccgctcgtgtgcttcgggagccgtgtaactgtggcgagtccggcactctgcgcccatgccgtcggttcgcgcgttctttttccttccaggacacgcactttcttcaccaaaaaatgaattttcctccgggaagatcggcttccctcgtcagggatcgctttactaagttgacgccagcaggtagaaaccggcggtgcacgtccgaagagacaccaggtttttgacagcgttttcgcacacccagcgtccagacaaacatcgtcgtccttttgctgcaggggaggaacgggaacggccctgctagggcgaacgaccgagcgagtaaagcgatcgacactgagaacgtgggctcgagtgtctaggaagaaaagcgcgacgtttctccctttccggaagaacaaccgaaacatggcacttaacgaaagcgggacggtatttgcggcaagcacagacagttggcaggcctcgcgcgcgttcgtccggtttcgtactgtctcccggtctttcattgaccgcttgggttttacctcttggcgcgcggagcgaaaggggaggcttcgctcgtaagttcttttctgtctttttttctggattccttttgtatcaagcggttgcttctgccactttcagatcctctgtcacacaggacatttccaccaccttcgagacagctgcgaaagacacgcagccttcctcgacgacgtcgtccacccgctgcccctcaaagctccgcgtctgtttctcttttccggtctatgcttttctttcactgcagtgctgcctggacagcagtcggacagttttctctccgtcttttccgtgcgtttctcgtcgctaaatcaagactcttggaacgtgggtgtttccctgcccacggtctgtgttctcgccttatccgtcgcggcgtctgcggtgtctccgtccccggttttcttgtctccttttgtgtgcgttgttctggcgaccaatgtctacgacctcttttccgtctcaaaagtcaatcgttcatctcacgccttttcgttccgtccaagcctcccggggaactgctcactttctcgaccacgcgagaacctcaaggccagagaagctgcacacacagggtggcgactggttgaggaatcacaaatacatgcgtcaacttgggtggcgtttcagggacttcctcactcgcttcgatcgttcacgcttcctgtgcttcgtatccgcaagtccacgtccactctgaacacacctcgttcctgttttcgtctctggacacaaaaaaatttcagtttctctctcctcgctaaaccccgacggctgcctctcacacgttcgtcgttctttccatcttctctcgccggcagctctcccatcttccccttccgtgtttcctcctttctctcttcttctttcctcctcccggagagagacgcctggcgcctttgtcgcagtctccagccttcttgaagaaggaaaaga

SEQ ID NO: 3509 - DNA, 4480 bp, Toxoplasma gondii
  source 1..4480: mol_type = genomic DNA
tagagggcaaaccactggagatgaaggtttggtgtcgacgtcgctacacctggggaggagcatcaaaagagattccagacggaagcgaggcatctgactcggttgaaacgccgagctgagagatgacacggaacctcgagagtgaaagagtgtgcagcaaaggagatgggagagtaactttcctgagctgcttccttcttgtccataccgatgactacgctagtgacgcgcgaatctgcgctgtgcgatacgcttgcgtctgtcgctctctgtctcccttcatcgtggctgttatcccagctcggccgttcgtctcggtgtgacacggtctcggtttccctcccgctgagtccgtctggttttttctctccgcctgctggttcagctgcgccggaaaacgccaccagtgaagagcaaaagagagaaacgtagtggattcgaacagccacctgtgtgcagtccaggttggggacgtacggtgcttcccacatggcgttgggccgcagattcagatgccccagaggagggagaaggcgacagggaaagcggagaaagacgcgagacagaggagaacaagagagagaagaacgagagagagaagaacgagagagagacgaacgagagagagaagaacgagagagagagaagaacgagagagagagagaacgagagagagagaagaacgagagagagagaggaacactcgagagagagaacaacagagaggagaactcacgagagagcagacagtctgttcaggcacaaggccttcactggttgagtcgactttcctttgacttcagccagcccaccccctcggcgttgccagttggccagagctcggtttctcacgagcaaagaaaatccctgcaagccgggcagccgcgggagacgagacaggcggaagaagcgcagggcgacaccaacggcgagagagagaaggatcagcgaaggagggagagccagccaggaacggttgcgctgttggtcaggttgtttacggctagggtgggagaggaacatacgaaaaagtcgaaaaatggaggagaaaacgaaatgggaagcaaagacagctggaggctctctctcgtggcggttggcgcggaggcggagcaacgaaggatcagcgagacttgaagaaaatcgaccacgcatgtctggcgagcagacagttcacgttttccggtagacgaaagaaacgagaaatccacatgcgaatgacactccagttccgagttgtgtgtgttgacgagaaatacaacgccaggcgtatggacactcgagattggcgtccgccgtttgcacacctacccaccccccaaccggacagcaagcgatttctggaggttctctgcgccgattcgtggagttttctcttctttgtctcgtcttcatgtacagtatctcaaccgcaaacacatatggactttgcgaacttttgggacggcaggacaaactgaaggaataccctttcaccgtcgtccagtcgccatcgctgccaaagcgctgagtccgtcgtaaacagagcagtgagcacggaagacattgaagagccctttcctcagtgcatcgctaggtttatatgctgggtcgatcgctttggcaaccaaacagaactttgtttggtttgctgtgtttgtccgagtcgtgagtcagaggaggggagtttcttctaggcgattaggcttttttctagcgtccttcaatcgctttcaatcgctttctctgtgggtacaccgaagtccacaaacaaacgaattcaacggcggggtttctgtggtggtgttctttgttccgttctctccaagtcacttgtacatttgcttcgatatcaagataagaaagggggaccctcgtattttcacggaaacctgatttgtttgccgtgcctaaaccggtacgacgtagcaaggcggaatgcggcactgtccgtttcagaaaccctgtctccgagcattcctagtgaattcttttcctctccacagtggggaccagccaaagcacgggtgccaagctaatccaggatctcgccacctataggagaagcgtcagaattgacgttgctgggaagtgtggccgttgatctcgtctcaactctaactttagtgtttgctcatcgcccgatccggtcgttttggatgttccaaaggattcgccaacacagcacgttttccgactagctgactgagaacaagaaaccgtttctctgaactcttttttttctggaggggcctcgaactcaaagttaactgccctacgtgggacttcagtgtgactgcagactctcctggaccgcactttccccctcgttcgcgcgttgccagtcgttgtctcaccactatggaaagacatgcgaaggtgaaagaagaaggcgaagcctcttttactcgaacggcgtttccgacagatcgaggatgccaaggctctgttatccggcgaaagcctttgcatgtcgtataccgtgtaccgatgcggtctcagtcgagatccacttttgaacttgcgtgcgttcgctgcagcagtctttgcgggaaaaaccagtttcgtagacttcttcagaatcggcacccgtagacagtgtgttaagggacaaggtagaacagaatggtttgcgtcgcgtggtaaatatagacatgtgtaaccgagcatcaacttagatgcacaaatgggcatcatcagcccttgtatgagttgtaaatgctcaaaaataatgctgtctcagagatcatttcttctagtacggtccctcacgtatcgacacactccttcatttcatgtcaaccggttggaacgacacctaccttcaaggctccaggtgaatacggaagaaacaacccgaaacatacacaacagaaaccatctccacttgcaactcatcctgcaacggtacgcgtcgtcacccggtcttctctgtcccggcgcaggttctatccgtcctcgctctcttttattgtccatgacactttgtttttaatcagggtatgcacatgtctcttttctgaatctttcgcatgagaagcaatgctccatcgctctctgatgtggccgcaccacatgctgactctgggtcaagacgaagatacacggcgtccttctcagctgtggcacttgcgattgctactcctataggtactaagatctggatttgaaagcaaacactttgagctctcttgcgcagtccagtggggtggtggcgcacagccgttctaaagaactgggtgtgtgtctcataactggagacaagttcggtaggctaggttttaggcgaaagatgggggaaaacccattcactctgttaagtgaacatgtctctgtctcaaatgaaggtggcacacgtgttgtcaccgaaatagtttcttttaccactttcttaggcatcgcagcagcccttttctgagagaggcagcgccagagaaaacgagacatccgaaagagcccatctcgaaggctgggtcgaacgcgtgcttttaagaaacggatttttcgagaaaaggataggcaaagcaaatcaaccctaagaaactaacgatggctatttctttctcttttcaggtgtgctgatgagcacacatgccgggttcctctgccgcggcacacgcgtgaatgcggagacaggaggcgctcgctctgtcgggggaaaacgtcgaaaaaaacgcgttttctctcgcttcccgtctcagaggggtttccttctttatcggctcaacatttcttcctgtcgcaccctgttctttgtctccttggcctttgagcggctttaccgtcctcgcacttgccctgcgtgtatacgcgtgtgtggccgacgcgtgtcgcacgaaccgaacaagacaagcaacttcagacatgaggaagtccggggaaagaagaaagaaaaacgaaaggcgaagatcagaactctgtatgcactcacccttctccttttgcggagaaaggaacgtaagcaaccgttcgtgcgggaggtttcccagtcgtttcccagagagacaagggagcgctcagaccgcggccgctgcacatcgtccagagcggcggatttcgagaatcattttgggtgatcctcaggcaacagagaccttggagtgcccagagaaggtcttcctttaaaagtgggcggttcaacgggtctgggagggaagcggcgtacacatcgtgtgaactatgcatggcacagagatccacaagagaaccgtgctgcctgccactcttggctgaagaacgcggttgaatgtatgtagtctaggccttcagttcgagcgggcttgtttccgcttccgcgttacggcttcaccactcggggagttgcctgctgcatccacccgcggcggcgaacaagaaaagggaggaggattgagggggcgggagaaataaacacacgcaaaaggggagtcttccccggtgaacaccggaatcagagctctcagaagcaagaacgttgagcgaccgtagaaacacacgtttcgctcttttgagtcgtggacta

SEQ ID NO: 3510 - DNA, 5041 bp, Toxoplasma gondii
  source 1..5041: mol_type = genomic DNA
tggtggctccatgctaaacggatagtcaccatctgccaacggaaaggaccgttccgtcccggtcatgaactcagatccttgcatcatggccgcgaaacctcgctgttgccccaggaccatccggatggcactgaccacgaattaacgcccagtacgttctgttgttccaaagagtagcagcatccgcaggataaaccgtaacccacatgcaaatcagccacctctagtgacaattgtttgatcaggggaaactcactatgcagatcacacaagccgtttttacgtcacctagctaaccatctgccaatcaacgctcgcaaaccccaacagctgggcatttgagaggtaagcctcgtctagcgcatctacacaagcaatttacgataagaattccaacagagaacttctctggtatgcttcaccggaaataaccgaaacagttctctactagcgacgaccagtcaccacacgcaaaatgtatcataatccaccaagtctgttgtgtcgtgtacgactcttcgtcatgcctgttattctcccgtgtcgccgaacaagcgctgactgtgtgaaagaccacatgctcgaacggttgtcctcgcgggagaaaagtgtggctgcaagctaacccaggcttcacaaagagacgaaacacaaacgcccaagtgctcgttatcacacgaccaccagcacgatgcacgtcactacaaggatacggttttcgtgtgagtacaccatcgccggagtcagttgttctacatgcgaccgaagaaagcaatgccgttagtctgccaagccccttggcgtcttcaagtgctggtcattcttaccgttaaggaataaaagaaaactgtggacagacactggcaagaaaactacggaaccgcgaggagaactagtgccggcacagtaggcctttaaaaaaacggttccattcccctctccgtggccctaagcccaggctgcctacgatagtccatacagtgcgagtcagttgttcttccacctgctcgcttgataatttgcctcccccccccttcagagaaaggtctgacgataagagctcacggaattcctgcatgacattccccctggcccctcgaagtgaaactcgtctcgaacagcttcacccgttcaccacacgcgtacacactaacatgaacgaactcagtgcgtcatatagaacaaacctatccgaaaaaccaaagccaatcaagggccgacaggaaaactgttctgatggtatttactgcttcaccattaacgaactacccgataacgacatggctccccgtgacgctttgacgtctcgaccgatggtctcggatgtccgcagagcttggcagcgaccaccagagacgcgtctcacgtcccccctccagcgtctgacacagttacgtggaaaaacatgtatcctgcaccggtacaactgcgccgcattcaacttttagtgtcgtcttccgttgcatgtaccagacaaaaagtgctgaccaaagctccgttcgccgttccgaagaacgcactcttcgggccaccccgtacgatgcccgcgtcgtgatccaaggtgaggcaggccggttggcactcattcaccacatgaaactgaacaaataaacgctccaacgataccgaatcattttccggaactcggaaccacgcactttcccacagttcttggagtgcacacacacgcacaactgctggtcgcgtcaagttcggttcacctgcaaaccaatggtaacccggccgcccgactttccagtcaaccggccgggagggtgaaaaagggtcgtcaccgcgagttccaaatgaacgccggccagcgagctggaagcatgaactccacagcgtcagtttcaaacaatacctcacaggacagtcaaaaacaaaagtttgaatgtacaagggttcctcctgcggcgtcgacgcttacttacactacatagtggcgtcgacagcatatctgctgggggtcgacggttaactctgcgaagcgcgatctcgcggaaccggctgcgactggggcgacctcaccgtagcagctcaccatagtggcaatgtgtctcgacctatgggcacttcccactcacgacgaccgacgtagcgcaaccatcaagctagtagaagaaaacggagacctccctagtggtgtttctgcacaccatggatacaactcattcttgtggtttcactgaagcaatcaattaacaatgaaaccggaagaaacagaagtggcattcacttttatcgcctataacacgagtgcctacagggaacgtggatagctaatgagacgggagacgtgatcgttacggttgtgtcctgggataagaagacacagtttcggatgtcatgagctttttgagacgcgcaaacgtactttcccacacactgatctgagcgatatgtcgtcgatcaacgatgagtttgctgtagtcacaaaattaacaacgggagcccgttgggttggctcgccatacgaagaaacggacgacagtccaccacgcatattaacgttcgtattacctgttttcactagcttggactagagaggcgtgtgtttcccttagagattctgtattgcgtttcttcgcggccaggagatcaaaggtattgaggcagacagcagaagcgccctgctttggagaagtttgtctcccctacaaccggagcaggatgcgcaaatacaggtgctttgtcgagacgtgcgaggtagtagacgtatgcgcggcaacatgcttagcgtggtaaagatggcacgtgggacagatttaccgtaggacaccggttgctccggcaagggcattacgcactgtcacccacatgacgtggaaattgtgatcattcacatggtgttgtttgatgacagtaggcgttcgtagaaccagttgaggacgaatacgttgcctcaagatgatcgttttgaagcttttcaacatggttctacgaaagacacgccatcgatggtcgcaagaatacttttggtttagccaagtacaaatcggagagaaacctgaaagtaagggaaccttttgggcataagtacagcgcacagggacgcagcgtttccccttcttccctatcatgctccgtactcagatccaccagcttcagtattacggtcagtttccgcagtgatgtctttcgctgagtggtgagggtattctggagtcatggtaactgaagtagtgtttggtcctcgcgtgtcagccggatatggttgttgagtggatggattgggagggccaggcgagtaaagagtaacttgctctgtcctagatgaagtgtccttcagcactttccgcacgcaaagggctgtcagagcgaccatcgcgaagagacagaaaatgccggcgatgatggtaaatgtatggaaggagtctgttgcttgctgcgcctccaggcgcttatggacggaggggatcctgctgcaatcatcacagtatctgaagcgcttggagccctctttacgggaacaatcacgtccgttgccgcttttcggcactactattttgtaagtctgaaaatggaagcaatcattggtaaattctccatctggtccgcggtcgagcttgaaatcgtcgtcggagtcgtggtgagttgcatggccttccaagggctcgcacacggaccacgggccgtactctccttggcagtcagtatctgtaggcatacgacacggccctttgggtgagaagtgtgagcgcactaaacaggttcccgtcctttcggtgacttgcatgctcagcgatctcaaaatgtaggtcgtctcaatcatcacgcgtggatgcgaacatccgcaaactacaacttaaggaatactgaagtggtgttgagatgtgcctcctcccatgagtgaataaactgtgtccgcctactatgcagtaggaaccccaaagcaatctggagttctgggccagccagtgtctcagaatctccatacgcatgacacctgtctaccatgtctgatctgggttcgcaggatggtatgttttgttgttattaactgcgctactgcattgttagcagggtggacgcgctggtggaagtatctgcagtcgtggacagaccgaatacgaaggccaggcgacgtaaaaccgtacacaggcttcccatttggaattctttgccgatagtgtgaagattaatcacggaaactgggtccagcgtgttacgtaggaccaccgcactgaactactgttcagccctcgagggagttgctgttgttcattttgcgatcttgatttgtctggggcccattctgctcacctggctctgcacgagcgagaaggatgccagaactaagacagaaaacggtggccgggaggaagaccttcatggtgttaacatagcaaaccagacagttgaccacgtgttgggaacctgtagagacggacaaccggatacctgggaaccgaagaatacggcaaacgcttgcggcagtgtacacctctcaaaagcattaataggatgatgtttcaatttgcaaaaaaggaatcttggtgacgggggtaaacgtagtttactcggagaagtgccgtgaaacatgtaaagggcccatctgggaccttcaactgactggcgcaaggcgggtactaggaatggcgtgatgcctggaatgatggctaactgcggcaagatagctctacagacagacaaacaaatacatagggaatcacctgtttccatctatccgcggcagtgtatcaaattactcaactggtaatctaggaaggaggcagcagtccaagtcaggcagccaaaaatatgccaagcgaggataggatcgcgtttcggacctttcgtctgtgtcagccagcaaccagcacactctagaatcacgttcaaatcctgcatttgtcgacggtgaaacagagtttcatccactttcaccttcccgaaaatagctgtaacaaaacacctgcgtcgacgacgaaacacctcctcccgtcaggtaatttcctgtgtgtccaacacgtttccgcaaaggtttgcacatctgtcaaggacagcgcctccttacattcaaagtcagcctacaaga

SEQ ID NO: 3511 - DNA, 1970 bp, Toxoplasma gondii
  source 1..1970: mol_type = genomic DNA
cctttgtcggctaaaacagaccgtggaatagagttgagcaacagcaggtgtttgtgttagagtttgccttatcgcggtgcttgagttcattttttgcatgaggctctcaaaaatgatttttgtgaaatatgattgctgtcgctaggcctaaatacactttgtgaaacggagttggcaaactgcttcgatggggagccactttctcgcataacggctatgcgactcgtgtcgacatgtatcacctgggaatctccaagcaaggaagggcgccggaacaataactggcggcagaaacgtgatttcttttggggagtctttatgaagacaagtttgcattcaccattttcacgtagaaccatgaacaaactgcacagcgtgtccgtgtgagggcaaccgagagtccagcctcgcgtcttgggtgtcaagaggtcagaaagtcagtaaaccctcgaagaaaacgaacaggtgatgcgactaaaacggctctccttgtggcagaacagacttgccggactaacatcctcgcaaccgcgatacgtgctacctcagaactaagcgatcttcacactcacgtacctcaggagttgaactggaaagggagctgcagaaatcgcactgaggtctagaaagaagaatcggcacatgacgtagtaaagcctttgaggtgatcatatcaaaatgcccgtggaaagaagcaaatattcatgcttgcccacgaattcaagcacttctcgacctgtaggtcccggcatgtaagttagcgtcgtgtggactcaagagataacaaccacattttcagtgcacgcttctttgtcccaccacaactgtggcggctacctgggaagtaaattacgggaagctgcacaaggcagtctaacataaaactctggatgagtcagacgctgcaaccgtcaactctgtcgattggaacttgaagtgaccacaggtgtagagggcttcagagtgtcacggacaatgaagagttagagtttaagtctataacagctagacgaacatggtaaaggcatagggaaaaagtgttttctctgtacgtggagaagcccgagtccgttttttccatggatcagtttctcaggatcgtcggcttgcctttaccgctaccgcatgcatggcgtcgatttcgcattccacttccgtccgttttcgcttcttccacactacaggttgttgagaaaaacacgccgtcgactgtgactcgaattctgaaacgaacgcagtcttttctgcatgacgcttcacgtgcttttcgcttcttcgccgactgaaaactcgacgtttcgtgcacgcaactcagcgtaccactttcgttcgttgtctcgccagcagcgctcctcaggaggtctgatctttttctgtgtcttttccagggagcgtttttcctgcctcagggaaaagcgagttacttgctctcgaggcacaccgcggcggttttttccccacccgttctcccgagactcttcagtgtgtgtaccttgtgtgcgtgacaacctgttggtcgagaacagcgaagcgacggtcgaggtgcacggggaatctcttctgtcctgttgtttccctttttttcagttaaaacgaacgacccgagcggcaggcctcacctgtgcctttgtttttcttcctttttaccgaaacttttcgctcaggctaccgagacgcccgttcttcagctgcttcgcggctctctcatttttcgtatgcccgttgagaagcgagcagcgacagcgtctgtctcgcaagttgtcccgtcgactcggatgctggggagcagcagacgcctctacacgtctcgatgttccactttttctttcttggacagccgtgacgttcagtctccctgtagacaggttcggctcctgaggctcgggaactttcccccagtcgctctgtcgccaccctctcgacagcctgaacagcggcgctgcgctggctctccttcgcctctctccata

SEQ ID NO: 3512 - DNA, 2161 bp, Toxoplasma gondii
  source 1..2161: mol_type = genomic DNA
ggctttttgaggaaatggtatttctgtgtatttcgtttccatggcgaaacgttttttttctcgagaagttgttcgcgattcgaggtgcgagctttgttttcgagagaagagcagttgctctctgactcggcagaatccgcgttttcctcctgtcgaggcacagaggtgcgagttcctctctgtcgaaaagaggagaaaccgagggccttcaccgcagaagaaaaggaactttcagtctgttgaaagtgcgaatcaggcaatcttgagacagaaatcgaaccttggacgcgcgtggactctcggaaaatgtgaaaaggtaaactgttcctttttcggtgagttcgctgcctacagccttagcaggggaaagatgcctcgtcgcgtcctggagaaggcatacacacgaacgtttttcaggaaacgtttttctgcttctccttcggaatctataaagaacgcatggaaaggaacctactgtgtttccgcataggttctacttctttttattttagaactgggggaaaaaagctgaacgtcaagaggtctaaatgggggagcgaggaggcgttctcaccgtctacaggtggatgtgtttaacggaaccttagatttcagcatcacccacgcaagacggaagggctgtctctgattcagaagaaaggcgcgagacgcagcgatccactgtcaccttggcaagaggagctctttctctgcacaaatttcaggaggtagatcgaccagagggaaagcatttaagaaggcagaccgcacatgaagagaaaggggagtggagggaaggccgtggacatgaagcgacgcgcatgcagaggcagcggtaccaggtgtgaaagttaaaatccgttttttcgcgcgagcaaggcgcgtctttgttaagtctcctggatctctcgagatgcgaatttcgccgaccgcgaccgcagtcgacagagcaagtctctaagcctgtatgcagccggggcaacggcgtctggatcaatgcacgcgacgacagaggttgtgttggaggtgtagatgtagacagaaagcagtggagaaagagtttctcttttgctatcgaaattgaggctacagcaaggaacgccaagtagccgctagcaacgcgcagagtgctgggactcgagagcgagagggccgcagtgtttaccggttaacatggaccagctgttcctgtgttcaggtcgaggcggtgcttgtctctttgcaactgtgtccatttttattgatcggtcacaaaaaaactcgtattcgctcgcgtcaggatacactcgcgcgcgcagacgtttgttttttgagggcaacgaggcctttcgaggcgccttggtggggtcaaagagaaaagaaaagagcgagtcgacgttgtgtgccaagaagggtgtctcccctagcatgtttccggaaaacaaacttttttctccgctgcagaaacaaacagggcatcctcctccccagagagagttccatttttcgcgcggacgcgcagacgcgtgctcgcgactactcgggcgcagcacgcaaagatagcggggctcgccgacgcgctcttcagctttttttcatatttcttctcttttttccctggacttttcgctcgcgttttctggacagaacaacttgcccagcaacgcgaatgacgggtgcttccaggtctccgcctttcctcctggcctcctcctctgtcttcctgtgagaggtctcttctccgctatcgagggccaggaacgagaggagacagtctctgatgcttcgaagttttcgtctttttttctaaagggagtcgagcgaagaagtctttctgcgagactcgaaaaagacaaagaaaagacgcctctcgcggcgtcgtggaacgaactcggcgcctacgaaggcgctagcgagaggatcgcccgactctcaactcttgtcaagttctttcttcctcttcgtccacctcgtgtctatcttcttggatgctttttctcctttgactctcttcttctccattcccttccgttctctgcccctgtctcatcccgcgtcctctcttcttcctcttttgccttcttcttcctcgcctctctccttcgtcctcgcctctctccttcgtcctcgcctctcgccttcgtcctcgcctctctgtcgcgctgcctgttctccgccgcca

SEQ ID NO: 3513 - DNA, 1714 bp, Toxoplasma gondii
  source 1..1714: mol_type = genomic DNA
cttattcatgagattatctgtcctcctgcccggaaccgagtgaaggccaggagtctccgcgcgagtcgagaagggcgtcgctcctcgcccaactcccgccacgtacggtccgctgggacccgagccgactcccggcatgaaccggcgagcgccgggcatgagggaggccggctgtcgaggagcttgcatgttgacggaacgagagggggacgaggaagcgtagaaatcaaagaaacagaagaacactgaggcaccaccggatgaaaatgacggagaccggggcagcaaagagcaccacggcgcgcgggacgaagggcgccacaggcgaaggcccgcagcaagaaacggaaacggacgggaagcggatcgctgagggatcgattgtgtgaaggtttgcgggttgaatatttgtctcgagaacccaggaagaatagccgtcgaaagcgatgcctgggcaccttcaacgtccaggcttacgggaagcgataggctttgccgatgctgaaaaactggcgaaataaaacttgaaacagggacggaagaaagcaaggtcgtggtctcagcacggatgaccagctgcgccggaagagaaaggtgaacgaaggagacgcggttccgtgacagaaaataacacagaggggggagaacagacctaaaaacagatcaccgcagtttctttggaactgcacattatgacagcattctgattcgaatgcagaccctcgtgcgtcggtgtgcatacaccccagccagcaatggtgccgcagcccgctcgagtccaggagcaaactgtcttttgcacgttgtcgcaaagacctcgtttcctgccaacgactacatagacctccacggaagatggcgatggtaagacgattttcctgctggggaaaaaacccgagaacagtaagaggaaatccacaacgccaacaggagaaccagtaccggtactaccgaacgcagatcctgcgcggccgacgcagaaagacgattggaaagcttgacagaatacagcagcgcgaagacgaaagaaagaacaaccgaagaaagcttgaagaagaagtggagaggtcgaaaacacaacggcaagagaaccgcgtaaagccgacaaacatgtagaccgtctgccgtcgacgggggacttcggtatgcgagtctgagcagtgctgctaacgggaaagctgaaatgcgggaaacgataaggaaacggaagggtgacaaaaaattgcatatacgaacgagagagaaatacagccaagactcgcgaaaagacgaagtacattatttagagcagagacgggcatgcgcgtccgccatgtaagagacacgccttttcgcgaagaaaggccccttgtactgtgttttccttgccattcgccccagactaaagacaaaagaaaacttctcgttccatggattcgtgaagaagcgacggccagaggtcgttttcgatatagtcatgtgcatgtgccagagcgccagcggaaagaccgctacatttgcccctccgtcaatgcatgcacggaagaaaaacggggacgaggccggctgatctgggcaagctcttcactttctcccatttccggagacttatgacaatttccgtgaaagaggaacgcagctggaaggaaacgacacaaagaagacgggaaacgctggcgagccgagggagcgggaggcgacctccttcacggcaaacaaggacgagtgtcggaaa

SEQ ID NO: 3514 - DNA, 2033 bp, Toxoplasma gondii
  source 1..2033: mol_type = genomic DNA
tggaatgatcttgggaaacggccatggttcgggtcactgaagaagaagtccggctccgtttgtcactcctcatggaccacgccagcggctcttgcaggcggggcgctgtcgttggtatccctgtttcattcgatgacggcaaacaacatagtttctcgatccctgaagcgcttgtcacatgcacggaggtatggaaacttggacctttgagcgaccgactcgctctcaaggggggaaagaaccgggccgaaaccctaggtgagagtaggggagccgcaagggaagcggccgagacgtctacccttggggctctagacaccgggatatgttgactggagcatcggcaatatggaatatctgtggctaacgacattgtccacagatgttgctgggcctttagaggaagtctgttagtacagacggggggaacagcggccgcgtgcagtgactcataaacggcgtgaccccctggattcgtaggcacccgtcgcacccgttgccaccttgcgtcctgccgaaactgagggaagacatcgcgacgaacagcacggctcaagtgccgcatccccggcaaaagaaggtgttcagattcgccagcagccagaaacgccattgtgtgaggaggcgactacaaccaacggcccagatagtcttcgatttcacgtatcgcaaccttctttgacgaataggggtatggcaggggacggctccgcaaatgcgaagaaaccccccactcacgaaagatgccaaggcattggtttcatgctagatctaccggctctgacgagaatagaacgaatcgatatgcctgcgaatactaacagatggtgggaggaaagcgacaaggtacacagcgaagatcactgtgcagtgatcactaatccgttttcacaggacgagtatttttggggtaagtggtcaacttgtgcgacagaaggacgcgacgggcccgactgcacattgaaaaacggaagccagtaagactttctcatctttcgcccgccagtatactggatagcactgacgacaactgtaaactacccgtagcgttttcttcagtttatttcagaaacaacacaaaggaactttgccacggttcagtaacttcaggccccgcaaatcatctgaagcatgcgcgggctttgagcctcagttggctcaaggacgaggcaccgtgtataaaaattggcttttactccagcgtactttcgtgtagcatcgaataacacgtgaagggaattccatgaaaaagaaacgttcttcaagcaagctcacagtccagacgcacacccgtggaatccgcaaacggcgttcttgtctggagatccagagctgttgcatgcagcggtgtcgagacaaaacaataagaagtgtccacgcttgattgaaaaagcattgcatgcaacaacgaggcactaatatccaacgaacactttcactacctgtcctttccggcacactgcgtacgaattgctggcactgagaccacagcgttaaatccgctgcaagtgtcgttcagtatgtggaaagtctgtattagcgttcctcgcagctgaatgagcagggcagagatgctcgaccacgggcccctgctgaatatgtattggctttccggcattgtctcatggcttcgctccaagctctgtattttcttgttccctgtgtgaacacctgcatttcacgtcattgtacattgagaaagtgtgaaaacacatatttttatgtgtaccgccatatgcatatcggacaccgatattttcatggttcacctctgcttttccattgaacttcagttaatagcaagccgctgaggcgaggacagttgacacttgtttttttaatacgtctgtccttctagaccagaaaggaaccatttctaatggccgccacctctgcatgacggagctcggtgttcaacaccggcggaggaggcaaacggaccacaggttaccacgatatgaacaaacaagttcctgaggctacatgataactgttatgacagcgcatcaacggccgtgtttgtccagaaacca

SEQ ID NO: 3515 - DNA, 2740 bp, Toxoplasma gondii
  source 1..2740: mol_type = genomic DNA
agtttttcttaaagatccacagttgaggagaaactgggtctctggtttcctgttccacgccgccaaagtcttgctggtatccgccgcaactgaagcactgggctagttgtaccccttctgctgtgaaaggtgtcgtgatctttttggggacatgtgttaggtttcagcttatgtttctgcccgttgcatcagaaacactggagtaattgtacctcttcacacatgagaggtgtctcgacttttcttggaatacggcataggtttcaccttatatcaaaagcaacataccccgctattccgcagcaagcaaaagcatcggttcccagtagtatcgtgataaaaggacgaaagcaatcgacgcaggggcgcgtggaggccgtatactctatgcaaccaaattgttttacatgcgaacctatacacaacattctttttgctgcatgtacagctgtagaagggatgtgcggatagttctgaaggttggcgtgacccaaggtaccccgtagttccgcggacatcccctgctcggattctcgtttctcgtagggggctggagcgcaaacgtttttggcattctgtcattgttcggggggtgccgcagcagaacataatgaataatcaggtgcctcttaaagactgctgctacagtcatacatctggagtcgaaggaactctgcatgtattttcccgaatgttcgaaaggtgccgagcaacttgacacgaatgactatccggtacgttttcatgtcccctctccaggcaccgaatctttgttggtgttcaaacctgtccagaagaatgcctgattgtttgctcgccaagtcgtatgcaagaagcttccaacagtctaaatgcttgccattgcagaccgagagctgacaggcacgcatgacacgcggtcactggagttgatgaccaggcgttccttcggaaataaatgtctgtgtacatttcttttgagaagaaagacccagtatagtggagctgttgtttttaactgtttctgagcactgctgcccctgtgtggatactgctttccactacaaaattgagaccttcagggtaacgtcgttggctgttcatctcatccgaggaactgcgcagcataaatgcgctgttagttctgccttcgagaaagcttatgcatcacgccagtttgttcaggccgtacgtgtgcgtaaatgtaagcaaacggcacccgagcctggcccgcctctgtcgttgtgtcagccactgggagaaagaagggatccggtgtgcctgcctgccgcgggtttcttaaagaggaattcagcttccccaagaagcgattgctatttttggcctctgcacgtgcagacggcagccatgtttttgtgaacggcgcttacgatgataaatttggctggaagtacggttgtgccgcgacagtgcgaagtcggacgctgcccagccggtgagagtcgtggcatcgtccactctccttcgcctcctcgcctttcttcgtctcagtatctactaagcgagcgcaattttactcatagtgtagaaagagaggcacaaattaccttttttactcactcacttcttgcaagatctcttttgtggcgcgggagattgctcgcgcgaactgcagtcgttcggttccgactagtctgcgtccgactgcatgtaccctcatctctcccagttttatgccacaactttggttccactcttcatttgcagaagttctcttctggccagccgctctttttggctgcttttctggcctgttcacccgtaaactttttttcagggcttttcgacttgcggtctgtggccccgcctttgcgacgagttcgcgcctttcttctcggtcgaccttcctaaccttgcttttgtcacgctgacaagttcaactgagaccaacgtctagagttgtttctctctttttaactatctttccttcttcgtgagtgccggagaagtgcgttttccccgctctttgcatgtctcgaagtgtggcgtcgatgtctgcttgcgctggccacagtgcaagccaaggcagctcgtttgctcccttttttctctgctgttattcttgtttcttttaacatcataaaagagtcctcgcagtttccgcattcgaggctcagaatttggcgtcgattctgcactggaaggaggacgcgaatcgtcctgtccaaaagagtcctcgtttacttctccgcacggaaacagagtcgctttgtgtccatatttgttttagtttgggagaagatgaggttcttcttcagccgttccttcgtcggaggagcgaaagcgtcgagctgaccgagtactatggaccctgtacccaacatgaagtccgagttattgccttttctccatgtatcggatttttcggaaaaccagttgtctagtccactctcgtcaaacagtgctgttctgtcccgagttttgtgcatttccacccctcgtgcgtctcttgcattttcgcgtgcttctgagttttctcagcgataggtcaatcctcccccctgcgttgtggtttttctgcgttgtcgcctggttctgcattctccggccgtcttcttttcctgcgtagcctcgcgtcctctcagcgtgtgcgtactcccgtgtttccgctcttcgcctatcacgcgaacttgtcatgtccgcctgactgggagcgtgagagctcctttaagctgtatctgactctcttttttccactgacagcggccttggctcttccccggtttcgcttgtgccacaa

SEQ ID NO: 3516 - DNA, 2721 bp, Toxoplasma gondii
  source 1..2721: mol_type = genomic DNA
tcatcctttctcgcgctcctctccctactgttctcctctccacctgtctctccacttgctgctctgccagtctcctttgtcgtcgtcgcggcctccgcctcgtcggccagtgtgtcgacgccccgccgcagggccaggcggggaaggcggcgcgcgagcgaggttgagtcagctggcgaggaagaccaacccgacaacgaaacgactagaacagacaaggaaagacaggacaagatgcacccgagacgccagaagccagcgggacggacgcctgacgagtcctttgacagcggacaagcgactgaaggaaaacaagaagaagaacgagctgcggagagaggcagatgggggagcgaaagcaccagagacaggagacaggccgcgaggcgctttcagagacagacaggaagagacgcagggcaggagcaaaagctcgaaacctccaaccagcttcacgaggaggaaacgcgggggccgccttcagatgtcggcgaacgagagacgaacaaagacgaaagacaggaacacaggttctcctgcaagaaagggggaccgcgtttcctcagaaacgcgcgcgaaaaagagacggcgacaccgaaggatgcccagtcgtttgcgtttcgaacgctatgtatgtggacgagcaccgacccagaggcgcagccagccggcagcgctccgtatggaaggcgaagggagactcgccttcttggggcctctcttccaccgcagaagacagacgcaatctcgctcgtgaagaacgatattcagttccagagtttcggaaaaaggcgaaaaaacgcatgcaggctctcctggcctgggtgtcctcggggaagaggcagggagcagctgcggccgacgggcagccggcgagaaaaaaccgcaaaagacagagaaaacggcaaagggaaacggaaacaggcggcagaggaaaaacggagcggaaacaaagagagaaaccaggaggtgaaattacgcgggtgtcgtcgactagaccgtggacgcggaggggcaaagatggacgagaggagggaatgccgaaaagtcagacgcgcggagccgcttctgaccgaagatgtgaaactcgccttccacgctttttccggagaaaatgcgctggagctgcgaacagggacttttgccaacttggaggggcatgtgcagagagcgggggtgagacaggaagaaaacggacgctctctcgcagggcagctacgcgagatctgcacgccttcgcaaccgaggagaagcagagagagagcagaagaagaagaaacctcaaagacgttcttaaagcgcgaagcgtcgccgagaaaactggttggcgcactgcacgcggcatagaccggaaggaagcgggcgttcgcaacctcgacacgagcgactctgtggtgaggcggggtcgagtctagaagaggactcgtgaacgagtttgcagacggcagcgcggaaagcagagaagagagctcgtaacgcagacgagagaaggactgaaagcgagaagtcgagaaaaaagcgaaaacgacaagggaggtcctggaatcggaacctgggcgttcagcctgcgctcgcagagggcgggagacttcttttcggccgatggggggtgactggcgagctctacttcgccgcggaggagaacagcgaaacgcgttttgtcctctgcgttcagcacactcagatttcaaggcagaacccactgcgcggtgtctgtgtctttgcgcatttcaagaggcgaaagatggaaagcctccaactgaaaagccgagttttcctgagcactgctcgcgggtcttctgtgccccgtcctctcggtcttccagacgccgcgaacgaggaaacagatttttctctgcgttctcgttcaagcctttctactggatcgcttcctgcttctccgtttcttcgccttgcgttgtctctccctgaatctccaacgagttccctcctcagtgttccctgtcgcgacgcgcagctcctcccttcgctgctcttccccggtgtacatattatatacatacacacccgactgcgagaacggtcgacgaaggctgagaacagggtcaccgcctgaagaagccgcgcgtcttggtttcttgggtggcgactcgtctgacgatgtgacagaacgctcgggagttcttcgacttctttgctccagtctgcagagctaaacttcgtgtcttgtctgctctttgtgaaaaccgctgctgggcggaagaggcgccgcacagcttcctcgctcgagtcttctttcctttcgcagaaacgctcttgggtgcgattgactcacacgttctctgtttctttccctcgctgacaaggttcctcgctccgcctgaatgtcctctggagcttcacaagctctctccgccgacccagccgaggtgcgaagtctaaccgcagctaccgtctttcgcgtctgttcgagagtcccttgagttgtcagaagccctccactcgctctctgcatgctggaacaaccgtcaaacggttgaaccgaccgcacacgcatcgttttccatgcgctcaggcactcccttcgtccgtctctcttcctcctctctttgttgttcactccgctctcggagaggcctgttgcctccgtcttttttccacccttatctttatggctttgaagacgtctctctccgcgtttttgctgtctttccccgagaacaagctccactctctttccgtccccccctcgtctcgata

SEQ ID NO: 3517 - DNA, 1457 bp, Toxoplasma gondii
  source 1..1457: mol_type = genomic DNA
gtgtacaggcacttactgccatatacatgcgtagacagctttgtctatgcatagcgattttcataacgtcgaaaccgtcgtttagatttacttctgcattagtgattctgtgaacctgcataggcgcattcgtgtatgatcatgtatagatgactatatatgtgtacatgcatttgtagatttgtagagatccagagatatcttgccaggtagcattgggagtgcacaatgtgagacgccaagccagtttcattgtgactttgtgtctgtcaagaattgcctcttcagtttgcagcgaacgaaatggcgggaaaaaagaggcggctggagagattgtgcggcccgcgtctgcatgcgaagtgaaacatgaggtggaggttctgtccatcgcaggtcaacgaagagtttctctgttctgggtcgtttttgatttacgaaagtcttaaatctattccactctcgaaggctgcaaagctgcctgtccaatttcctctaaaagcggaaagagacgaacagcgaaaacgagagaggagactcgggagcgtcaacaccacgaagagagagcagaggaaggatagaccgagaagctgaagggaacatgaggagacagaggaagagtgaagaagagagagaaagtaaacaagcggtagaaaaacgacagaggacaggaaggaggacagagggacaaacacagcgaggaaaacgaaggggaactataagatagaagtaaggagagaagagagcgaggaaagatgcgagagagacctgcggtgtttctacggaggtttgagagacttgtctccgtttagcacctctttttttaacggttcgaaccgtcaaccttggcagttttctggattttggaagagactcgctgcggcaaacagtctcgaatgcgtgcatgcgcgcggcggcctcgttgagaagaaccgctggatgaaaaagagaaagaaataaactccgaaaggagtgtggaagtgatttatgccacggagaagaaaatgccgaagaatcgcgtctgctcacgaggccctgctgaaacagctgcatgcatgcatgcacgaatgcacatgcgagtcgaaggacgagtgcacatacgcggactcctcttcagaattagcgttcttttcaggcgagggagagacggaagctcttctccttttcaacgcaaaggaattcagaaggtgtgagtctccaaactcgcctttttttctgcagtctcggacacaggtcgaacagttgttgccctctgcagagccatccgcggaagtcgctgggctgcgcgtcccccactgcacaagggaggggaggaaaaggaactaaacagaatagaggacgaagaagagaagagaaggagaaagcgagagaagacgagaagacgagaaggataagacgaagaagaacagaggagaagaaaaaaggaacggataaaccgtgaagagagagaaacgaaaaaa

SEQ ID NO: 3518 - DNA, 4624 bp, Toxoplasma gondii
  source 1..4624: mol_type = genomic DNA
gttgacacagcaggtcgagtctcaatgttcgcccaggactataacggattcggtctgagtggcatgatcgactactggcacggcgattacaagtttggattccagatgaacgtggtgccgcctccgccgcaagcggaacagcctcctccgatgtagataggctgccctgtcttgatcatgtactgaacagcgaaaacaccgggggttgtcgctcagagtcgcacggtttttgcgctcgatgacacttgagcagaatgcgtgaaacatccgcggtttgcggaacacgtgccagcagggagaaaccgatgtatgctggaacactggcagtggacttgtgtagagacaatgtgccattgtttcggcgacaggccacatgctgtggcagcgataccccttttttgtccttttggtgcccattaacttgtctttccgacttttacctcgtctcccatagtcgttcttgctccgcgctcgcgaaaatggtgcaccaatagagctggcagctgtctgaagattgtgtgttcgagcaacggaacccgtgggtcgcaccagggtggctaatctgctgcactaaaagccgaagacagcgtgggttttcggagacaaggaacaagggcaaggaagcaaaagggacgggtagctctgttttgcgacctggcgtgggagatacttttccaatggagtaaaaatccaaccaccctttgcataaactgactccgtccgggggctgtagccgtatgctgttgcagagagccacggcttgaagaggctgtgtcggcgcgaatcgaaacgtttgtaccattatctgtttacagtataaggcgcatccaaaggctaactgcacttttgtgggtgaaggtctgaattcgtacgggttcgccttaacagcgcgtcgggttcgagcaagaaaaggtctcaaactactgagatggatcttctggctctctgctcgctgcgttgaagatgcgaacagatggcatatgcgaactgcatcttggactttgttgtgggtttgtgtcacgccttttcagtgggtgtgtagtgtcgtgagtccgcccaagatttcctgtccgttctctcactcctttctgttaagctattttttcaggaactgtaacagtgccagctttgagcaaccgtggcaagcgcttttctgacgatggcgacacacacacacactggcggttgtgagtctagcttgctgctacttcacgtgtcgccaagcatcctgggggagaacgcacagctgcaccactttgtagaaaaaaggatttgtccttgccagtagacgggagctagatgcgttcttgcagatagccaaggatacgacttgaccatattcttttggaacaagaatccagcaggtcttgctggttttcggcagcaacacggttcgactcgacgcgccatccgctaggaacaacccgcagaaaaaatcattgaagaactcctgtttctttggaagacctccaattgtacagcagcagttccattcagctgtcgacgcctaaatcgacactcgtttacacccatttatgattacctcattgaaacctggaacttgtggccgacacagcgtaactaaaccgcgtgggtttgtgcaagtttgaacaataccaccgtgaataattttgcaccgaacaccccccgcttcccaccccccatcatccgagacgactagttgtaaattaaaggaatcgataaataatgcaactgcaggagctgttgctttctttggtatcagatgctttttaagccggacttgcagaaggcacaagggcttcagattccggactgtcatcctttgggatatcaatgccaaatcgaccctttgtttttgcggcaatgaacccggtcagcgtccgacatgcagcccagcagcagaaaacgcagacgtattgctcaatgatactgaattgcatgccaacgaaaacgcccggttccactttccacctgtacagaagcacgttccaccaaactgccactattgtcgcaattggtccaagcccaatacagcagaaaagagcgacaagtagcgagaaggtagatgtcagcactgtgccgacgaacgccgtagcggccaaacaacagagaatcaagccttccagcatgaacgcccatccaatttgttgtgcctcgtagctctcaacgaagtgtaggttccagaagctgcgaagagttttagcagccatcagaaaacacacaccgcttaacagaagcacgccttgacctagagtcaagcccacggtccacgtgccgaccctcgcccacgcgtcagaaacgtgtccgtcatctggcttatgcaatctgggagacgcaatcctttgtcggccttcaaagcccgagttgccggcactttgaacagtagccaaagatgcgagaataacagcagcaggccatgccagtaacgctccgaaccaagcgtcaggatgcagacccgcactgtgtgtcttcgctccgtgttgggaacaatcgaaaatgctccagacgccgacgagaaatagagaattgtagattccttgagtcaagattacagtagatgacagacgacacaactttggagatcgcaggccgacagctaaaccggtaagcagaacgacggcgaagttcagagcggcagctccggcgtggctgatggacatcaaccccaaaacgacctgtcttgttccatcatcatcacgaactatgggctccgtaatgtctccagaaaaatctacgtgtacgaaaactgcggcgagttgccacactgcgcaacaaaacgagacaatagcataccagacagcagcgctgcccaaggataagcagtactcccagtgtttgaggcccaccagcatgcaacacattttggcaaaagcatagtcaactacatggggggcctttcgcagacttaggctaagtgttggagcaaaatttcgcaatcaataatctgcagcacagacagctgttttgccaaattacagtggtagtcttaagtcatgcctctgtttccaagaccacgctctgacagtgcagcatgatgtacaagccacaacgtagccggtactgtttttcttcatatcggtcgagagttcatgagtgtatcttcggtatccagcacagaagaactcagctaaagtaaaaaacacttttaatgctgcagagatcgatgcctgtgcccggctagcgatcgccaatcactatccttgtcaagacgccgcagtcgcggtgtctcgaacggcccgcagtccaaagagttccggggaaaaattttcagcctcaggcattcacttttgacgactgttcagttagctgtttcataacgactttttaacgcaatccattactgccgtggtaagtttcgatcctgacaagccatagcggatgcgaggtggcaaagcagctaggcaacgacccccgcccctcttgcagcaacgctgaaattcacgtctgtctgtcaggtaccgtgggtcgcactcacatcctattcctacatgtatcctcgcaaatatatggatacatatttattgctgcgtttgttagccgtggtccctaaacaccgatgtagtttaccgttagacgtgaaacacgagggcaatcggggagagaggcattttagacacttgtgtcctgtcagcggtggcaactgtggcgagtgcttagagtttccccgacgcacggatccttgtcgttttttcctcatcactctgagtatcagctggcagccaggagcgaattgtgagagacacacacgtcttactcagcccccctccaacaaaagcagttgctacctgagaacaagcacggtggagtgctctttctgcaacagatggaaagtctaccgccatcgacgaggcagggcacactctgactgtatctagcattattgaagcacaactctcttgcgttcgttagaactcttgacacccaagccacctttcttaaagtctccctcaaggaaataaaatgctgattggccccgggctacatcattcggaaaatggcggcatagttcccgtctcgcttttccgaggaaagagctacagagccgaccttatatgcggaatgccagcgcgaagcgaacaaggccagtggcgggtgcttgttcggtgtccgcgtcccccagtcgacgagcttggacaccctgagacgccaccttctgcaaggcctcttccctaacccgtagccgcgctcgctcctctgtagcttttccgaaacactcaccaaagaaccgaaagagggcgggtgaagcggacaagtagagtctccttgcatacgtgcattcctgtgtagacttgctttctgtccatttttaaaacgcaaactcgattacgccaccgctgtcgcactctgactttgtctcgtcgactacggcgttcgttgatgtttcccgagtcccggtgcatagttgctaacaacggtcatcctgccagttttttgccatcgcacgttttccctgttttcttccgtattgtcgaggagcgctgcgctgtttcgttactgagaagaactgtttttttggcatttcctggtgagcgatccctacgttttcgcttgtagtttctttttgccgccgtgctgttgatccgaatcttgcgaacccacaagggcgtccctgatacttctgccttcgaaaacaaaccagaaa

SEQ ID NO: 3519 - DNA, 2246 bp, Toxoplasma gondii
  source 1..2246: mol_type = genomic DNA
tggaagatttgcgtggttcaagacctgatctggcgctttcttgtcttcgtgaatctgtgtcattttgtgtttgtttcctcttgtgaggggaagtgtgttgttctcaacgaaatcataatcttcgtccgcgtcctcttccccctctccccttgctttctctgcttcgccgcgtttcgctgctgctcggaggccgccccagcaagagctccatgaatattgcagcttcgctctttcgcttcgcttgggagacgctcacagcacacccgattcaacttgcacagaaaacatcttttctcacttgtgcacccttgcacgtttatatttatacctattatacatatatatatatatatataagtatatatatacatatgtatatatagatagacagacatgcatatttgtgcattgatatgcacgtggaagtacactttcgtgcaagagttcggcgcagcagattgaggaactctgttacatctaaaacaacacgagaaacgccttgaaaggaagcgaattaaaaacatgcatgcaaccaactctcgcccacctgtaaatcacaacaatgcagttctagcgttcataagtaaactgagagacatcatcctcgcacggtctggacctctttgtttcctcagagacagagctacagatagataagagtgtacttagcgtcgcgcggaggtctgtggcatcgaaagttcttgtgattcaatatcagtggaaactcacatctgcggcaacggaagaagaaggcagggccagaaatgagcaggccgtccctttgtgggattgtgtttggagagactgtgctttagagaactgctcgcatttgaacttatcgacaattgtcaccaagctacatgcagtctgatgtacaaacggtcaaaacattcactaacactgcgcagattaatacgtgcatgcttttttcttttctgtcactgcctgcttgcctacttctcttgacttcgctgtatttgcctgttgatgtcttccgctcctataaataacagtctaccgacgcgagtatctttgtttttgtctctcgaaagaagaatctcttcccagctcctttgtgacccacagatgatcataacatatcacttctctgcctctgcaatttttctgtgcgtctcggagactccatttaactctacggatctacctcgattccagtgtctctctgccggtgaagcctacctgcctagcggggctaagaagtcagaagaaaatgtgaatgtgcgaggcagcgatgtgtctcccagatgttgatgtgaacaacgaaacgtcactctgaagaaattttatattttcttttcgcgcgaatcagctctcgcagtctgccactgcatggcagctagcccaacttcttccaagctggtcgattaaaaatgtctcagctgacggacttcgccccgtcgtcttttgctactaatcagaaggcgtagaaagccaagaaaaagcggtttttcaggagaaagaaaggaaatctggagcgacttcgaggaactcctctccggcatcattgccctcgtgagcgacagccacgaacgcgcaactcgctccatgcacactttccagagaggttgaaaagacgcaagatgttttttatttcttcctcttttttcttccttccttcttgtccactttgtccatcctttctcactgtttttcggatttttctgccgccttttctttcgcgttgccaccctcctcatgtcccctcatttacaccacatccgaggtgctcctttcttgtcttgcacgagtcttcgtttctcagcttgcaagacatccagcaaaaccccgggcatgcggccgcctttcatttcttccaggcgctttgccttctatagtttttccttgctccgtctctcgtctcgcgcggtcgtacgttccagaggcgtctcttcgacgccttgtcccgtgctctctgaccttctcgtccacaacctgctcagttcatttcacggttgttcagaaccgtctaatcccttgctttaacagcagaacgtactttgttcctctctctgatagcgagccaatctccttgtcgtcctgattcacagaagaatgcttctctttctcgcattcgcggtaggcgaggaactcctctctcttctctccgtgcacgctgcttcttctcctctctcctctattcagcagacctccttgtcgttcttgcagaaaaaacgactttctagtcgatttcttcgagggaaagacactgctcgtgagacacacga

SEQ ID NO: 3520 - DNA, 2400 bp, Toxoplasma gondii
  source 1..2400: mol_type = genomic DNA
ttatgttcatttttatttagcacggctttccgcgattgcctttgcttgtggagatgagcaaagcaggctgtcgcgtggaggctaaagtgctgtcttgcgtccacgcagtgtagacacaggatgagagctcggggattttttaccagtttagcagagtgcaaatgccgcttcggtggaccagaaattctggtggtagggcagagaccgctcaagcgtcttggttgttgactagggaaaggacagctgtgcgatacgaattcgtggacggcatcgtggcaaagaaatgcgcgtatccgtcgcctttgatatccgcaaggaaatgcatgcacagtgtctgtgtctttatcgaccattcaaggtgtcgacgagtacatttgcccagacacctctactctacacgcagacggtgccgctttttctggtttccctccggcgttcctcttgcagaggatacccgggtttatcaaccgagttttcggtgagattgtctcagccttcttgccaaattctctggcccgttgtgttgcttttttcgtgacgtaagtctctcacatgagtcgcgatgaacaaagaagggatctttcccaatagagtctgcgggcagcgcggtgcgcgcgcgtcctcctttctcgaactctctcctccgcaacgctattgtctttgatgtaccatcatacggccactaacgagatcggtcgcattcgtttctgctcgtttgccgcgtccttcttatacagccctctctttccgcagtcggagtcgcgccaagagtacggggttcccagagaagcatcgacgaagtctggtggcagttttgtacgtttcgtgtgtatccgtggaagtagcacatatacgcaagagcgaccctttggcagcgctattgtctaactcatgcgaaattcgtagccgtttatttatcaggagctgcttgctgacatttccattaacgccatcgcgccgttaagagctgaatatgctgaccgtgtcagtttctcttagctggaagagctcaaatcttgtggactttctacactgaggtgaaacacccctgtctaattaagtactcatttgttcttcggtgacgcttgcccgagcgataattcaaagttgatagtcggttatgtatgtggtacctccccggctaagcgtcccctttcttttaaacgcactttccttgtcgccgttagtatgatctcaaagtaccagaaggcaagcgacgtacgtgaatctcggcccgcaaactagggcagcggcaacacagggacacacatacaaaaataaacagcgggacatcttgttggccttgtttggagtatttcgtcgctgaacaaacgcgtcttagttaactgtcaccacgaagacatgcattgtttctggacacattcggtgaacttgcggaggacgtacacgtgacgcaaggtcttcaggacgatttctccactgttcccagctgtctgggcgagaggccggcaaaatgctcgctttcagtttgagtgtttctctggaatttgagtgttcgcgacactgccgggccagcccatgatgtgcgccgtacgaacgcgcgaaaatactcctttgtctttggtcgtcagaaaacataagacgtctccgctgctatcagggcttatgaaatacttcttgtatccgagctcaaacccctgccccaaacgctcccctaccatgcacatcgaggcttgctgcgtgcatgcgttgtgccgatagacgcgggaaggtcggttgtcatggagggtgagagggactttttaacctagctctgaaacggtctagaagagggaacggaagcgcgagcgctttcacgttttgcatttttgtcaattcacggcgttgcttcagcgattcctcgcgacccggcaggcgaacaacatgcagctcgattccgcgagcttgctgccgcccacatccgtacgctcgacgaacctgtgcttgccccgctttttcgccctgtaggtcgctggcagttttctcccagaatctagactcggagaattctgctggggacaagccggcacagctgcttcaaaacgacatccgccttcccggctttcgttccggcatcgagcggcgcggaactctcttttccactgtggtcgatggaaacccgcaccccttcctacggacggagagagaattagggagtttcacgcacgtcgtttcctactaatctttaaccccagggcgaaacgactgctcagagtctcgtctggctagctgtcatctcaggtgtaccgacagcgcggacgctttacacgttttaggcgacaacatgcgtgcgcgttttgaggagcgcacagcgaaggtcgggtaggcttttttgtcgcgcgtttttctctcggagtcgccttcatagcgcgtttccttctgaagagagggccgggacga

SEQ ID NO: 3521 - DNA, 4383 bp, Toxoplasma gondii
  source 1..4383: mol_type = genomic DNA
taaccgtgacgaacggtgatgctaggaatttctgaaacgcactccagcgagacgtgaatgaacgcagatcgcacacgcacctggagaagctcacaccacgcgccttcgctgcagccattctggacagatgtctcggagagagtgccaggacaggctgcagcgtcgcgttcgcttttcaggagaagctggcggagttgcgaggccacggcaacaaaaaggacaacatctggaggggagagcctggacactgaagtgagttgtgacctgaaaaacttctcttccgcacgctggataaggtcatggcggaaggccgcggacagctgagcgcaggggatagcacacagcggcggttacgctctgggttcgcttccatgacaacattgccagcaacaagattatgagatgaacgtttctgtgacacaaacaactcaaacgtagtgattaaaagtaaagatacaaacagttttgtagcagccacggtttgctttgcatcctgtcgtcagactgatgaggcggcgcgcagcagcacgtgaacagcacacgcgattgcaagcgtcggggtacaacaacagaacacacatggtacggtaaaacgcggcgagaaaacagcgtttagactgaaagcgaaggcgctcctgagaagccgaacacggggagtatgtatcgtgtacagaagcgacgggattcctgacttgagtcactcgcacatacctgtcggcaaaaagtagaaaaagcagctttatccttgctgtcctccatttcgaactgttcggttatcttttgcacgatctgagggaacacgcgtccacctaaggaggaccgcagaatagaaatgttttttcttggcggcggtacgatctcccgatgagtagctgagacacgccgctccgagctctggcagactggacagccacatgcaagcgcagtccccggagcagagaggcgctcaatttgacggtgctgacttcagaataaaacagagaaacaaggggggtccgcataggatcaagcaaggccgaaacctatgctgcaatgctccgatttgtgtctgggcatgcgcagcccaatacaagagatatgcctgcgcaacttcgactgttgagggaaaatccgctttcagcaagacatttccgagaataaaagatgcgttggcatgcagtgagattgctgcggatgcaagagccttccttcttccgcgcgaaatgacacggagaatagcaatacctctacccgcgaaacttcacagcaggctcgctgtggccgcgcaaaggtgggcgactgcagtatcgattcacgcgaccgccgctatcggcaatcgagtagagcatctaaaaacgaaaaactgctttcgtgcaagacttgaaactgccatagacagaatatatgcagtgatgactaggtttgcctgctgtagaccggtgtcagagagcatactggaccactcaagtaccaagcccccctggcaacacagtgcaagcttatggtcatgtgcgcgttctcaatcacatgtatctagacgatcgcgaccgccgctgttggagtcggtctcgacaagatccttcaaacacagaaaaaggcatatgcatgaaacttgaagagctgtttgacgcctctatgaatgctctctcttggcgcgtcccgtctgcagcgctcccagttgccacaaatcgttagacacgctgcatgctgcagcaatggtgtcacctccgcgtgagttttcaggatccttcattgctgccattagatgtcctgtttggtcaatgtggatcagcacaatagaacttagattcggcaaacaaagaggccttcacgatctatgccaaccatccacttgccacacgataacgcctgcgctcaaagatgccacgtattttgagcgcgtccttcagatggatgtgcgctggcttcaaaaatcaaaggaagcaaagactcgatacaactgccattgcccttggcggggtgttctctgtgcctttagaagaaggacaacacagcaaccatctggaagaatacgtgcaaggtgcttttctgggctgtgtaccactcgggaagttgcaacctgcgactgagacttcttcactgagattaggaagagtccgtatgaactcgcagcatccgaatttggcgtttgtcctatgtggagaacacgagaaaactagtttcgttcaaattgacgtcacagagagaggaacgaccacatggattctcgcttgtgaaactcccactgtgtcgttagttcacattccgtttctaccggaagcagaggtcttttcagaactcgtaaagagagcagaagcctgcgtttcataggaagagtcatttccagcgcaacagtgacacgggtatccatttgagcgtatccgtctggttattcagaggcattaattttctgtcgcgcgaattgcacaagcataagctgctacctcatatggtacagttttggtggcggcggtctcactgagtggaaagtgaggcttcggatatagcgacgccgtcaaccacgaatccctgggcaacaatggggcgacggtgtaaagcgaactgaattgtagatcgtgatgatcaagtggatgcaccttggatcgaaggagaaactctagcagtcggtacaagatctcgggagtaaattgctgttaacaatagccctccacgggaggggtgcagtgaactgaaatagtatttagagtctcgactgtgtgcctgatgttcgtgttttaggctacgatgaaaccctacctcatcttgtttcttccatttatcaagtacaatcatggatctcattgacgatagtgcagatcaagcagagcactaacggcatccaagaaccagagttccgtgatcgatggtaccgtcggtgccatgtgcgtgatatacctgatgcgtgtgctgtgatttgagatgccttgttcatttagcatacggaggagctagaaaatcatatcccggtgctgtggggcagcagtatcgaatacgattataacaagcctttgaactagcgtataaagtgtgacgcaaaaacgaccttaccccacgatacactcagcaattacagtcttgccacatgtatcggcgtttaaatcacagccactttgagcagtgcgactaccctgggactaacaagaaggcaatatgccccatatggatggggctggtcgcagcaaggaaatggtggcgcggcgacacagtgggctgcgtcacactcagaagaacaaagggaagcaaacactttcagtatgctgaacacacaggaaaaatcttgcggtcgtgatagaagttgcctttcgctcatgtggtcgaagaaaattatattttcatggaacgaccgtaatcaccacggcactaggaggccgacttcatacattgtcaggcctgtctgtgccgtctgtctacgtaacatgaatggggctcactgtctgttcatctcgcaaagcaagaaatgacgcggctattttggtgaaacaaattagtgtctcatgacgttcgttttcaccgggtcaggcggacctttgaaaccgaaactcggttggcgcctctgcctacaggcggccagagggtgtagacccttagaggtcgttcgacaagagtttttccaatgtctggcaaagcattttgccatggcagttactctgaagcagatgaaacgtcacagagtatcatctctatgcgctcaacattatactggttgatttttactctgataaagcaggctactttctgaggcacatacgctgtccctgttgcagggcccgcatagacaacagcaaatctcgcttttgtggttgtcttcgaaaaaaggatctatgttctcaccacgcgtccgtgatgcactcttcagaacttacaggactgtttaggcagggagaactcgtagacgcagcggagaaaagaaggtagtgtagctggcggacggctgccagttagtgccgctgcaacgtgtgccacaggaggtcgggcgacatcgacggcccggcacttgccagcgtcctcaggtggttgcttcattctgtgcctcaagaatgcctgggcctcgaagattcctcatgctcctagtacctgtttgcagaaataaacaacacttcctccttgcatcttggatctgtttttggtttgagatatagagagtttaccctcttttgctggctcgtagcaggcacaaccccaccgggcccctctgtttcgccttgcagagcatgcagcgttgcatgctcaaggcgggggctgtgtccgagcacgctttcacgggccttgctgtggctcttcgcctgcaaatagattgcctcctttgccagatgacttgcgcgacgcccagttcacagttgatcggttgattacgctgtcacacgtgcccgtgcgtcaggcaaagcaactgcctgctggagtaaa

SEQ ID NO: 3522 - DNA, 1292 bp, Toxoplasma gondii
  source 1..1292: mol_type = genomic DNA
gacaagacagagaaaacaggaggaagaaagagactcaccgcatcgcgtccaccagtccccgcgggtcgatgggccatccgttctgcagggaggacgaaaagtcgaggagagtggagagaaccagagacaaagaaggtctacaagagagcgcagatcgagacgtcctccgtttccaatccgctcttcgtcctctcttccagttgcaagtagcctcctcctctgcttttgacctcagagagaacagcgactagaaccttgtgccgtagacagagtcatgggggcttgtggaccggagctgcgataaataaaaaatctcttgaaggctcgtccattcgcaacttaatgccacacaagcacgcgagttttgtttgaaatttagaaaaagaggctttttcgcttctctcttttctcgagatctgcgcgttggcgctgtcttctcttcagaatcccctttctccatgaaatgtcgttctcctctccttgcttcttctctctccggtcacaaggagaccgggagggagacaggacgagacgagagcggtggagaaaaaagctggaagcgaaagaagacacgcaggggaaacccaggaagaagcgagagacgcgcggagcagagagagggcagaagaggaagaagagaaggaaacgagatgaacggagaggaagaagagaaggaaacgagatgaacggagaggaagaagagaaggaaacgagatgaacggagaggaagaagagaaggaaacgagacgaacagagaggaagaagagaaggaaacaagacgaccggagaacagaaaatgtctcttgactggtgagttttgaaatgaactcggcgctcagctgcgacagtggagaggccgcgacaccatcgaagagtttcctcatagagaagaggcaagacgaaggagaatgagaagcagtagagacgcagatgtttgtctcatttcttccagacatgccggcaaacagagagcaacgagaagccgcagcttcgcgtctccagatgtgcgcggcgcatgcagaaaaaaaacatcgcatgcagactgagacggcatttttttcagtgtcccccggggctgtttggagaggggagagaccaagagagcagctttgcaggagtgtagccggaggcaaatctggataacaggaggcagcaaagcagaaaagaggcgggaaggagctagcgggagaggaggaagaaggcgtccttgcactggaggccgcaggtgagagactcaagaagacaaagcaacctcgaggaagaagcgcgacggaagaagcacagtgtcgcca

SEQ ID NO: 3523 - DNA, 4281 bp, Toxoplasma gondii
  source 1..4281: mol_type = genomic DNA
gtgaaagcaaagacacgcaaactttggcagccgatgcacagataccggagatacgcaggaacgagatacagaagcagactggggttaacgggatcggagcctaaacacaaaagaaatgcgttttgtctcctgtgctgacgagacacaaatgcgcatgcatcgttgccctcctctcaccttcttccaccattgtctttatcaacgcactcatggaggcgacctcgatgtcaacatcaaactcgtctccctcttgcgagacgagagtgaccttccgggcatctcccattctttcttttgacatcttcggagaattcttttagcaaacagcgccaggtctcccgacgacgaagacagaaatggcaaagacgattcagagttccgtttttgaatggggtatgcgtttactgcttctgtcaggtctacgcggtgtatctgggccccccaggtaagccacagacctatttcgccgtcttccgggggtaaaacgagaaaccaggttttcccctgaaaaggtcgaaaatggcttttcgcccgacaaacacaaacagaaaattccagcgaagacagtctcaaacagaacagcgtcccgacagccagaagttaaacacctatccttttgtcggggaaagaagttcgaacctttctcgggaggaatgcagacaacggaacttggaaaaagatgctcaacaggagggagtgggcgtgccgtggagtgtcgccttagtacaccaaacaaagaaagggcatatctgcgtgcatccggtgacggcagaggtgtacgggaaccagaaaaaagattcgccactaggaagggaagagagttctgttacctttcttgggcggcttcgcgagaaaaagctagaggggcacagagacaggaaacgtgataaaagatggtttgtgacaaagggggacgaaatgcgcgctttgtagaaactcggggaagagtaaagaagagaaacgggaagaaagaaatcagacttgttggcgtcgacaggtcttcgccgccacactgaagtgaagggggccacgggggttttttgtaaagcaacagggagcgggaaaggacaacgaaaacggtgaagttcttcacagcgtgtgatggcaaacacgtctctctctgaaagagaactgctgaaattcaaaaaatgaaatggcgtttaaggtggaacgaggttacttctattcagtattttgcagcacttatcgcttcctggcaaagacgcgaacgcagtgcaggtgccccttggataacgagacgcaattcctaaaagaaaaagcgacaacattcgtcactcacttttccctggcttctcctcggacgcaaagaagtctgcacacaggaaccacaggacgacgtccgacggacgctgtcgctttttgtatgcccttcgctgcatgcgcttcaaagtggggatagggtgcgagacctgggattaattttgatgtttgtcccacaacacatttaaagcagcggttcttcacttcattaatttgttgtttttcatctgaaaacttgctttagtcgacctgtgggtgacaacgatgcaaagaagaaactacaaccggccgcaagaccacgaccccctcgcgctccggcgtaacggtccggtgtttgactgctcagtgtgtcttgtacctgtttccgtcttttccttgttttggtggacagaagttgatgaatgcatggttagcggaagggatagactgaaacgaacagaagggagcttcagttgacgcgggaaaagacgccgttcctcccatggtctttttttaatcttgaaaactgaccgcggtagcatacagacgcagcattctccagctccgcgtccagcctgctaacagagtccatgattatatcccttgagtcacaaaaaggatcaaacggttcttgacgtgtcgacaggcactatgtctgcacatgtgtgatcatgaagcgtacagaatttgataggcaaaggcgcttctccgcatgaatatttactgagaataaatgtcaagtgcatcgaagcgctgcaacatacaccctggcccagcacgttgaagtatctagatctgcatgaagtggaaggagtgcgatacagttatggggatagaaacacaaggtcacgtaggtgcatatctgtttgtccttaaagagacgtatcgacagacttgtacaggaagttatgtaattgacacttgcgaatgtttcctctgttttggggaagggggaattgagacactttgaggtgggcggaacggacgaaaacaacgatacgggggcttgtggatccacaatgttgcggggtagagcgccaaacgacgacaattcctggtgttatgactaaaggatgatgaacgaagggggtacacttcttgaagaaggcaagcatgatttgaccaccagaaagcgttatcgaacgcatacaacaacgcccgacccaatcgcaccgcaagaaatggacttgctgctcggattcgggaaaactagactagtcctctaagcgaaatcaccgttgcacctgggtcttcgactctgaatcctggactgtgagttggagagtgaaaaccacagcgaacgcttgctcaaatgtcggagcaaacaccgcgtctaagtccacactctgacagagacgtatgcggcggcgctgcaaccgcttctcgcctgtcgtgtaaagcgaactcaccagcacctgtcagtctctaattgaacctttctgaagtcgaagccactgagggatgaaagccgcgttcaactagagccactcccgcgaacggtgtctacgaatcatctacaggaattcgaaggggaaatgagtgctaatctctcttggctctgtatgttgagatatgtatcaagcagaggcgagggggctggtagctttttgggtccatcatcggaatgttttacggggaggctgcgcacctcgatggcggctggttacctcctgaggttgtaagactcaagggaatagcgtcttgtacaccatatcgtttataagatactctcaatcgtttttccgaagcattgcatcctgcgggcagccacgacggggtgcggaacgtggaagacagccagacagacctcatccagagacaacttgctctcctacagactatcgctcacacgaacaaggagtcagtgcgcctacgcagacaactgtgccacgaatccggagaaaaggcgtccatccgtagaacactaaaggaacagcagtgcaagcgacgtgaggctcggaacacagaggcgctttttacacgaaacaagtggccaaaggcccttggtgcatgtctgtaactacgattcacatattcagagcctcagatctacctggtggaacaaatattcaactctcgcacaggctcgacatccctcagactccagcattcgagtaaacggccagagtaaagtgtgagcctgggaacggagatgctgtgtcgttcttaacttctaattgtctcagaattgagatacgaagacgagtcaccgagcttcgatctcacagaactccgagctggactaccgatgtagatcttgaggatctttgctttccagatccaaggtctactgtgtttgcattggttttgaggacattcagtcattcaatatatctatgagcctattccgggtacaccctgtcctgtatcagagtgctttacatatccattcgtctcagttttggttcttagttgcaataacctttgcactactttaaactacaagcgtcactcggagagcctttgagtatgatccacgtgaatacagattctccagctgctttaagcgttcgggttgatgtattctggggcagtattatgttaatcttctttggtagcacgcaaatccatctgttccctgctggtaaaccaggtaggggctggtgtcgggcgtagttaagggtggttcctcgaccgagactaatctccggggaattgtcagtttagctctgacttacggtttctagaagaatgcgcattgtgagctactgttattttgacatcgttcagggaaaaaagtcaaaggtgtgagtcgcctcctccttttgttttcttttcctgcagttgcagacgcccggagcctccgaaggctgcgcatgtgcatgcaatgcagagatcatgcttccttctgcatccattgccgggtcgcacacgcccgggaagatagaattcacgcgaaaaacaggttgaaggatctttaggcttctttttttctattccggtaggaaacgttgggctatgaagttgcctcaacttcacgtggttctctgtttcttccctctccggttctgccccatcgta

SEQ ID NO: 3524 - DNA, 4464 bp, Toxoplasma gondii
  source 1..4464: mol_type = genomic DNA
tcctcactgagttgttttcgtgtttcgaacgctggaggcaggatgtggaggcagcgctttttgtggttttactgtcttcgtgctcgacagaccgcaggccaagaagattctctggtgtcgagcctggaggcgaagacaaagggcgagattgagggcatcaagaaagactacatggagaacaaagacaaactcatcgagttcattcacagaaaagtcatggatgtcgatctttcgttggacacggaaacgattgctgttctacgcacttgcgacaaacgaggcgtcgcaccgtaatttggtagatatcgacccggtgtttgggaaaaagctgactttttctgagacaatgcaatttacggtgtggaacatttttctttgcgtgcacacgagcatctgcgcgtgattgtcttccggacacccagacgcggctggagtgtcgaaactctgcggacttctttctcccagctagatgccgaagcagagcactccgcatgcagatgcacgtgttcgaggaaacggacgaaaaggcgacagcagactctccctgagtgtactcggggcctatgataccttcagtataagattacggggtgacaacaccaaagcagaacaccaggtcactggacacacctacaggaccacaccagagaggtctgcagaatgatatgaacagcaggctttcacaacgctttccgggctgtattctgctaagccgccaagacggcaagacagaaaatctacgcatcacaatttagcaggtctctgtaaaagcaaatgctgccgaatagacattggtctcccaccaacgacaaggtccgcattttagactacaggtgacgtcgaatttgaaactccagtcaggattacagccggagcatttattgaaatgctcaaacttctctcgtatgtttcgcacttaaaacctacttccaattacttacccgtcacacgcctgtctccggagggtcgctacagcatcagaaggctcctcccttttggctgtgcactgtttcattagtattacagacactttccaatcaaactttataaataccatgcagtttcattttcgaattgctgcaatcctatgtgttgaaccgatgacgacactttcgctttaacgtcttatccagggcagtggaggcggtcctttgcaacatcgtttccgactgctacatacgcagaaatgcttcgtcggtgtcttcacgtgctcaaccttgtcagtcgtctagctaaaaaaagccttacagtgaactccggagagcgagtaggaccacacaacgaagctcagatcattgtagagcggattatacgttacagcaagactgagatcgtcgaagagtgggtaccatacaacacatctcagattttctgcctctcctttcgttgcctgttcgttgtgagatgcacatcggcgacagcgaaacctggttcaaaccaccttaaacacatgctttccctcaactcgtgttttcaaagactcacattttaccgtgtctgaactcttatcgctggtcctttatcgtctgtcggtttcaccggaacaacacaggctacgccgtgcacatggctaatgcgttctttcatacacgaactttcgctaggacggttgattgcttcctctactcctgatccggtacacattctgggatttcctaatggatagaaagtatacacggcgttcctcacaaacctgcagtttgaagcagtccgatttttatcgaagcagttttggtgcccaagaaatggcttcacttcccacatgaagagagcgatttctgaacggcgggaatatgacatgtgcagtaaaagttttctccaccatgccacgtaaataccttgacaagcggttcgattttctatgctctaggaaatctgttgttgcacgattccaactgaccggtttgctcttcggcggggatacatcggcaaaaacaggtcaagtgttcgttcagattaacaactgaatatgtccgagcaacgctacgccagctcttgaccctgctgactccaggccaagaagacatcggcatttctggagctggcaaatatctttcataactaaaaacaatatcggaatgctttcactggcggagcctcataacataaacagaggaaaacttcttttctcttttacaaacgtgttacacatcgccgatcagactatttcgagtttcgttctcagccggtctagcccgacgaggcggcgacacagatgtcgcctgacattcagcaaatccgccacatgggccaccgaatcccgaaaaactgttttttcacacgattcggaaaaaccaaacgagctccatagtcccgcgggaaggccccattggatggccgcatcttcacgagtgcttcaagtttgtcctcggttcccagaggtacgcgagtagaaagagacaactacacactttggatctttacaggacgctcgtgttgcccgtcgcatctggttgatctcttctcagcgtcaaacattaccaacaaaacttgtctcgcccttgcttgcaccgttcgtccagtctctcttcagcggtcagttcgtggtccgcttttcgggaaacgaccttgtacccccacatacccgtcttctcacggaccgtgacaattttcgcggccttttttaggttcttctgaagctgtctggaaacctcgtcttggacgactttgtcaaagtctccgtcggcatcgcctttttgacgctttttgtcgcgggtggctgccttttctgctttcttgcgcaagatagccccttcctttcggattgcgaacgtggttgtgctgacgagatcggttgaaaagccatccgagacagtcatgctgcgatttgtcatgattttactgataattcgcctttccacctggtgcgtgagcggatgcttgatcatcaaaacgtctcctgcttcacactggtccatgaacttggtctcaaagccctgaatggtgctgccgctggacacaatgcggccttctccttcgacctcttcaacgtcttccagctctacttcctcctcttctctcacctcgtcatctctctcccgcttcctgttcttctttttgcgctccttcttcttctcgtctttcaaactccctcggcccttaaacaccagggccccgctccttcgctcgtacagactctttgtgattccgtcagacatcgtggacacaaacttttaggacacgcgaggctgcggtggtggcagcacaccgccctcgaccctactccaccccttgaggcttcgcgtctccacagtttgctgacacgaaagttaaaacgctttactttcacagcgcctcagggacaaaagccccgtatgaacgcattcaagcttctacgacccctgaaaatctgtccacgttgtcgtcacgcgaagtcggttgcaagtcagttcgcttctttccttccagacgtcaacaagccacgagcaacacataccgacaaaaacggcgttgaccagcggaaaccagttcagctacgaatcggttatcgtacctcattccgatcgcgacaatacatcgaccacccaagcgacacgccccaggatagagacagacggcggaagtatttcctggaaagagggaatcttcacgagaaaacatcattgctgacttttagggattcggtagtcgttttccagcagtttcttcacatgcgcctgcatgacgtcgcccgtaccacgcatgcatctgcacactcgctgtataaagctgcgcagggcaggacactgccgtcgaaaaaatgtaggagtgaatgtagacgcgcatcactgctggattaactggagcgaaggtgtaccacttgacttcttttctctggcattttgtgagtgccatcgtttgccttcttcgggaactgtagcgctccgactgctcgaccacagggacggggcagagtcgtgttcgcgtttcggggtttaccgctttggtttcgtgagagatcaccgccactggagactttttttctcgaggaaaactttcctctcagcttttcagggtaaatttgggaaattgcgcttttcttcttccttgtgtacgggagaaacgtcgcgaaatacacttttcactggtgcggcgtagtggcggtgatgccacatcatgcagttgaatcattcagctaaagtcgatatacagatcattcatagccccgtccgtcttcctgagagtgtcaactctgttttttgtcgtacgagcaagcgggtgcttgctgcggaaattctcgggttgaactcttgccgaagtcagttctggatggcacatggctccggcgaatcttatttgagtgacaacaatttggcggtgacgcaagcttgcctgacgttgaacagatatgctatttgtgttcaacggggggacgagggatctcgcttcttcggcgtcgaccaccaaccttgtgcaacaccgctctcttgcagctcgccggcatccgtctctctgcggtggagtttcctgcactcctgcgaacaa

SEQ ID NO: 3525 - DNA, 3403 bp, Toxoplasma gondii
  source 1..3403: mol_type = genomic DNA
gtgacttctttgtgtggacaatgaacgacactctgcagcacctaactctctgcgtacacatctcagtcacaaagagaaaaaatgctcgtaccactggagatcacgcgatgccaggccttgagtcggtcttggtgaggaacgaacgcgacgggttctttcgacgagtggctcagcatcgaaatcgcactctgcagttcatctgcttcctctcgagagtggacgccagacgctgaggtttgctcttccttgcacacccgagtcgcgtccgtttccgtcgagtttccttcagcagtggatttcttcgtttgcctgttctttcgcgcttttccgcgcacagatatagccacacgtccgaggagaataagtgaggccgcttggcttttcgtgtcggcaaggcctcgctggatcagcaggtcgtctgcccggattctcttggaaatggcggacttgttgacgcctggaggactccgaggagccgaatagcagcagtgtcttatccgatgttcttcgctggcgaatggctgagaaaacgcaaacgaaaacgcacggtgaaccgggcgcctggcgcgtcggcccccctctacatgtcccgcgctcagtttgcctgttgcgaacggaggcgaggccacggggacgagtagaaacgaagggcaaagtgcacacgtagatgaaggaagaggcgcatgtgtcgggatttcagtggagactgaaaacgggctaagtgaggcgcaattcatcgaagatttcgacgtggaaagacgcgcagaacgacaccttgacagtgagagggggtgggtggtcatgtccagcggacggcggaactgcgagtcagaggcaccgacatcgggtaacccaaaagtaagacagaagaggaacgcaacgaacaataagaagaaggaaacgtaaagactcttggaaggcaaaagaaatgatctggtccacacgccgccgcccatcgcgccgcacgcggcactcgctgctgtggcacacgtcaccgagcatgagacccaaccacgggcaaaaaaggaatgcaagaaaaacaaggagcatgaaggggggtaagaaacagaatcgccttcaccacatgatgaagacggaaatgatctggagtttcagctgatgcgaaggacgcagtgactatctgttcacatgcacaaacggatctcgaacagcagcgtgcatgcgaatgcttttgcgttctgaaaactttgcttttgctgtcatgtctcccgctgaagagcacaccgttttaccgcctgccattgtgtacagacgaggcgaagttgaccttgttttctctgcgaattacggtggaaggaagagagagcgtgtgtgggcgcttcctggtcgagatgtgtcggcactatggacgaagcctgctgttgatcgtgctcagaatcacacagaaccttaggctttgtttagcaaaaaccacgttaacacaccagcgacacacagcagtcactcctctgatggtgatggcatgtgtaccggacgccagcgcagtttcttacaaccgtccacgaggtatgtaactcagtgatgatggaaatccttttgtcgttttctatgagacatagtagaaccatgtaaaagactgcaagtagttggaatcctataaaatctggcaagcaagccaaaatggcacaactgaatttgtgcctgcagccacacttgacagccaggtcacggtgccggggttgctgctggacagatcaacacacgcaccgagacacttccttcacagagtcagcagctgtgttgctatcaagggatcatgcttcgttcttatgatgaaggaaagagtagaataaggaaacagtaatatagacaaacggcatacaggtggaagtaggaatgacctgggatcgggatggtcgttaaactccggtacagggctacatcggtgaccatcgcataggtcagtcggtaaacagtcgaggaattgtgttggtttcttcacatatctatgtttcttgggtagatgcaggttgtgtaaacgtgtaagactcactagcagaaccacgaacaacgtatatgcgatgatactgacagtcagcaccggcagtgtcgtctcaaatcagaaataaacgcgcgacttgcggtgctaacgacttcttcggcgaaatgcatgagtgattatatgcactacggtactgcaaagtttgttttattgccaagggtattttgccaactgcctgaccgtccaccagggagagcatgagacaaaagcacggcgagaaaaaatagacacgctatagaatctaggatgctgaatattactccaatcatgacatacagacgactgacttctttgtggttactgtacaccccaatgaactgctacagacagctacaagagttggatttcaatatccttcgacattaagactattccgagtcggggccagtagagtatcgaaaaagcgcatgtcatagcagatgagcacgcgcaatgcattcctggtcgcagaattgtttttgggtgcatgaagtcccaggtgccgcgaaaccactttgcgccgctagtcccacgagacccatgtgtcggtcaaccagcccgacacaaagacttgctgcacttgtagaaatcgtacacattttggtgacaagcgtggtactttttcgttgtgtagtgtcagccccagcttcatcgtgacgtaccctgagtcacatactcttgacagtgggagagatagcggcaaccgccgtagaaacctgcttctacacaactatcgtgtaaagtcgtaatgagttttgaaaagtatagttgagttgaacgaaacgaaatccttcccagtgtgaaaaagtcttcagttttctgaaagccgattcatgtatctcgtcctcacgccgccgtactcgttttttcctcagcggcagtcccgtgtagatgcctttcatgttaatgcggaatcgacgctcccagaaaagtcgttttttcggtttcaccaaatatcccagcggttcatgtttcctgaccaatctctgtcggggtggtaaagtgtgtggcatgtgtctctgggaatgaacgtcgaccatatcagacagcatgagccctagagatgcacgagacgtccccgctcgaccctgcaaaagtcgtctggaaagtagcacctgagtgtgtacagttcttaaatgcaagaactctaagtgaagttagcaggcatcgaatttcgcgtgacttcctcacagtggcgcgctgttcacgaaaaaaacctgctctgttctcgtccctcccttctgtctgaagcgacattccgcagtttcacactatttcacctgtcagtcgcgtgaaactgccgtcatcggcggtagtcttttcccgggtaacgacgacctgaacggaaagctgcttctgtaggtacacccgagcccaagctgtcacggagcgttcgccaaa

SEQ ID NO: 3526 - DNA, 1180 bp, Toxoplasma gondii
  source 1..1180: mol_type = genomic DNA
aaaggaacaagaaataggagaaaatcagagaggacaacgaacgccgagaataacgaaagagcagacagagaccttggtggcagaaggggagacgaaaggagactgcgattctggaaaagctgcaaggaaattaaaacttcttcagctccagattcgcactctctctctccttcctttctcgtgaccaaacacagatatatatatatatatatacatacatatatacgtatacagagatatgtagatagatcgatatgtagataggtagagattcgtagatatgtgaatacagatatgtgtatgtgattatagagatgcagaaatatgtcgaagttacatgagttcagtgctctgcttctctcccttgtacacaggtatgcgtatctgtggagtacagtgtagcccgcaagagccaagtataataagaagagacggtcgagagcagtgagaggacgaagtttgaggggaagaggagtcgagagattaacgcaagatgcgaaacacaccagggagacagttgcgcgcggcgactcttctcgcgtttttttgggttttctttggtcgaggaagaagtggaaaaatagaaaagaaagacgacgtccaccggcctcgtgcggtttcttctcagttttctgcgttgacttcccgcgtctttttttctttgtaaagcatgcatgcgcatgcagcgctctctctaatacgtcccactgtttgccgcgtatttttccttcgcagcttctctcgcgcctttctcgtcacactttttctttcgcttcttcgttttcatttccgtttcttctgggcgtttcttcgcttcggagaagctgtccagcctttttcgtgggggtttcttcgggaccgacgggatcaagtgagaatttttgccatctgtccttctttcccttctgtctccctttttttcgtcgaaagaaatcgttttttttttccttttttctcggactgcgccttccctctagaccgtctcgccaacgcctcctctctcgactctcttttgccaatccccatcccctgaggttttcggttttcttgcctctcttccggtttcttctttttgcgtttctctcgtctcgttcgttctcggcgccttcctgaaacgcgtttccggctcttctcctggctccctgtcctgtcgccttctccgtctcgagaacagcaccca

SEQ ID NO: 3527 - DNA, 1880 bp, Toxoplasma gondii
  source 1..1880: mol_type = genomic DNA
ttccacgacagagtctgcggctgtctagaaagatcttcaaaagaagtcaggctcgcgtagctcctcgccagaaaaggcgtctgggactgccggccgttcaggacgctgtgctgcgacaggcatgagaggcgcgtgcgccaacggacatagagaatggcgtcagggaagccagcccaagaagcaccctgggcagcagccggttctgtttctcgcttttcgatctctcggtgacagggcggttgggcgaagcatgcagacggacaagtgaaaaggctcgaagcgccagagtccaaaggtgaggcgtagccctgcaaaggacatgcaccctcccgccaaggtgatgcggcaggttcccctgcatcggaagactcggcaaccctctcagtttgcgtcggcgaagtccacagtcgctcgtcatgaagacgcgaggaaagacctgtgcgagggggccgaacagcaagcggccgcctaagaagccgccggcctcggcttgccacttgccgagaaaggcgttgaacgcactgttcacgaagtcccccgaccatcttggctcacaaccatggcgaattctcccgttcaaggaacaggaagacacactgccagtccgcgttcggcgtcttgccgtgcttcccaacttgtcggataggtggagcagcgagaggcgccgtggtcacggtgtgcggttgagaaaacgtgagacgcaacgaaagggtcgagggtaggaaaagcgtttgcgtagaatttttgtggctgcagaaacacgcttcagagtgtcgaggacgagaggattgccgttctttgctagagtggaacgcgcggcggaaacgaataggcgaagctcgacaggtgccgggcatgagggatggatcggctttcaggaacttcgacgaagcgttttaacggaagcggaacctgagacacccgatgattcaacgaatttagagcggaacctgaagaacatgccagcgacgaatgagtacgtaaacgttgactgcaccaggggcaagaaaagaatctcttgttacgacaacgcaaaaagagactcctgattagtcacatgtgtctcctccggtcgagagtcttgggatcttgtgccgcttccgatttccgaaatcaagttgcgccacgttaaggcagagctctgccgttctttgcgataagtcttgcaggacagcacatgctctcaccagcgtctcaaagatttggcagaaagagaggcaagttatggaaaagggaaccgacgcatgtggaataacaaaattacaaacgcgcgagccttatctcctgtttcgaaaatttactccgctgcatgtgtatgtcctcggcccgcatgcaacggcgaggtatttgtacagatggaagacggacgctctttgacgaagattctccatatttggacagaaacagtttgttgcgttttcgtatggcttttgcctgttaaaaggacacggacacacactgcggcggaaactgcaacattgctgtcctcgggacacagcggcgagatgcatgcacagtgcgccgcattccacacgtagagacagttttccatcgcaacttcttgagaatacggtagatctcgacgcagtaccaacacagaagtgccacaacttgtggcgtaggtacagacaagaaacgccctcgctgtgctttcgctttagcctcacgtggaactggcttatgctgactcatctgttcgcggtatgtttcttttgcttctgaatgacctgccgcgcgtctcgaagaagcaagcttgtcttgaagaaatgacggtttctttggtcatcgtaagagtgcagttgccgcgaccaatccactctactctcctgtcgcctagttcccgccccttttccgtttcgactcctgttttcgctcaacta

SEQ ID NO: 3528 - DNA, 2210 bp, Toxoplasma gondii
  source 1..2210: mol_type = genomic DNA
gactttcgactaacagaacatgcgcgctgacaatctgatcttcggcgcgaacaccacgtgcatcgacctgcatgcaactcgaagaagtccactcccgaagtcgaacgcgagaggcgaaacacacatgtaaatatatatatatatatatatgtatatattttcacttgtgtgcatgcagaaggccacacaaccttacatgcacttgctccgagaaacggatgcccctccctgaaagactgtcacgtaagagtcggagtcgacgggagtctgatctcggcagagagggaagctcggagattccttgttttttaaaagaaaagcagcggcacttgggcggacaagcaaaagcacgccatgtagacctgcggtttctctccaatagacaggctgtcggaacagattctccgatgtcttcaacacctatgcgttggctgcatctccccctcgaaaaaaagacgaaggactgagagcaacaagctcggactggcgtgtttcatcgaggagacagacgagaagatggacgcgaacttgcccaccatacacgaagaaaaacttgtttcgacgcctcgaccctgcgtcccggcgtcacgagactgcagggaaggaagagaagaaacgcagaacgcagtcgttccatcaaatacttcacgccaacaggagaggaaaaagcgcgaggcatgtaccgaatatgagacggcgttcagattcgatgcgaatcgacagctgcgctgttaaggcacacaggaagtgtcacccacgtcgacggcgtacgcagcatcgacctccacgacgttatgccaaggaaactctcagaaatcctgtttcttcacaaattctcggaggaacgtacacttcgcggcgcgcgcgaaagtatccagtgaacaggtgcctccagaagacgccgttccagggtcggaggaaagcgaagaaaaggcaaaagagacagaggactaatctttcgacaagactcgactcaaggagcggtcgaaaaaattctcaagaacgacgcgcggaaccggcagaaaacgcaaggctttcccttcctactcgcagttcgggtcctccccgagctgttctgcaggcgttggtctgtgactgggtgtttctcgcggtggtttcgaggatttccacacgttttgcacatctcttggcgtacaaacggaaggcagcacctctctgcccggattcgtccgctgctgcgggagtttctctctcatttgtcgcgtttcgcgtcttgcgaggagactccgcggcgccacgtggtcaacgggacgacgcagccggtatgtctcattcacaagaaagcggcaaacgggagaaggaatgatggcgggacttgcgtctctcctcgagaagcttctcgccgaccctcgagttcgcatgttgctcaccgtatgcatgcagcccgacagacagtcgcatgcagctgtgcacacaagctgacgtgtttcttccggacttcctcgtgtctgcggcgaaagggctctgccgaaatcgtctccaccgagaagaggctccgcaaaaaagagttcctcacttcttcatctgatttgttccccgggctctcgttcctccctctaggaagcctgtgtgtggatctggggcgaaacgctacaggagacttgcaaagcagctcgcaggcatctacaggtgaagagaaacaaagagttttttacgaggtgtagaagtgcgtctctcgaattcgtgaaaggttccacgcgattgccttcgccgctgttgcctccaagttgccgtgggcgtggctagcgaccacgacagtgtgttaagcgcctagcaaaggggttctttccttttttcgatctcgaggctcggcacttttccgtcctctgagagagggagccttccttgtgtttctttgttcgctttttcagggactagccggaggagagaaaacgcagcttctgactcttcggccatctgatccgcatgcgaaggcgcgccggtcaccagtgtcctgtctttcctcgctgttctctgttctcttttctcactctcaggctgtgccgtccatcgctattttcttgtgatcctgttggtttgcctggcggcggcttctcaggcgttttaggccctctcttcgtccctctctctctgctgtgcctctgcgcccctgcccctctcaacggcttgcagctcttttctcctgcgttctttgtggaagaacgaggaaagaaaacactgcgttgcca

SEQ ID NO: 3529 - DNA, 1033 bp, Toxoplasma gondii
  source 1..1033: mol_type = genomic DNA
ctgcagcctcagcttcgctaaaaagagcgtcgcatctctccctgctggcttcgcccacgacttgcttgtttgtgcctcggacgaagtaaacgtacgaatggaactctgggtctcgcaacgttgggagaaagcttctcaactctttctgcacaatgcacttcaagaatctacgacgacgccccagagaaagacgattctggtcatgtgtcaccagggaatggattcgctcctggctgtcgacgaaattcattccattgaagagctcttcacaaacgagactgtaacttggggataaacaggactgcgattagaggcttctttgcaacctgccgtgctacaaaggctgctcaggaattcgggaaaatgtttgcatctacgcagcccgtaacgccttgcactctcttctcaagctttcaaaaaaagcttgtgcctcgagtgatcttgacggccttctactacaaaacattgctggctagcacggtgtcgacggcatccagtacatcgaagaactattcgggtcgcgttcccccttgcgatgaaacgctgtcactaaaaagaaaaggcactttattgaatactgccataaacgccgacagacgcctgcctaaaagctgtcaaaatactgttaacaacattgatgtaattctgtctaaaaactgcttaaaaggctgtttaaggtttaaaaggttccagtgctcaacagtcttcgcttcctgggggcagagaactcgccctccgtccaagaaggaacttgagagacggcctgctcacaggaatgcggtgcgttttcttaggacgttcttctttagagtgttccgagaaagtttcacttccactcgattcgggactacgcccacagtttccaatggcagacaggaagcgaatgagaggagaagaaaaaagtaaaaaccgcattcgaacgaaaacaccgacgcacagaggtctctgcttctgcgcgtggagatttatgcaccgcatgcacacagccacactcgctttagcgggtgtcatcacactgacggacatgcccaga

SEQ ID NO: 3530 - DNA, 1643 bp, Toxoplasma gondii
  source 1..1643: mol_type = genomic DNA
acggatcttctgtatctgtccttcgtctgattcacaattgtatctagacgcatgcatttcgatcggcagtgagtgaggagaataccagaatactccatttgcttcttcacatgtcggtaggtgcgtcctgaactacacactgataagagcctgtagtacgtcttcgaatctgaacgcctctttcctgattgtttcctcgtgtgacaacgcagacgaaatctattcgcatgttcgaaattccgaacgaaaacatgcagtcccgctgcaagcaagcacagattgaaaaagctcggaagtgcagaagcacagactccgctcacagtcaggttgcatggcgtctgcgccatggtcgacagagatcgaggaggaggatgcgcggaggaccaccgacactcagcagggcagggagaagaagcaaaaggcaagtaaggagagagggatgacgagcaatacgatgagggagaagcgagaagaaggctgtcgcggcgtgagtcgttggaacagacgctcagagaagggtgtcggcaacgcctttctctgccgggaactgcctgtcgcagagacagagccgagcggctgcttgggctccacagaccgagaggccagccgaaggggagcgcagcagggaggagccaggagggactgtgtatcacgcgcttctgcatcggcaccccacatgcgccgtggattgcacgagggcgacgaagcgactcgctgctgagtctcttccttggcagacgcagaaagagagagaacaagaccggcggatgttgcgcgttctacttcacggaagacggcgagaggaaactggagacagtcctcgaggagagagacaggcatagccactgccggagtctcggaggaatgcgaacaaggcccgagtgaggaaatcgaggaaacagcgaacaaggagagagaagggaagggggcgggagaaagagagcaggaaagagagcgagacggagatcaagaagagcacacacgtgtacacaaaaagaagagcgagcaaagacaagagaacggaaggggaacgagccaactgaggtgacccgcaatcaaggaacggcgggagagccgtgaaagagttccttgtcgctcacgagaaaacgcgaaaagcggctgaaacgaagtggagtttttggcgaaaaacttgaggcgagcttttgtgtgtaaaaaagctcgagtgtgtcaagcgccgagggacgcgtgtgacggcgcggagacgcgggcgacccagttttttatgaactttcctttctgaagtagaacgctcttttcttcgtttcctcccttctatccttcacttttctgctatcttctctcgatagaactctcgaactcttctgtgctgggcggtgtgcggcgctttgagtctgtgcccggaggcgcgagatgttaaacgcttttgcgcgttccttgcaggttgaacggcgagcgcgttgttgcctttgtgcgtcgacttccaaaagctgcgagaggaacgggagccagtcgcagtggctgccgcgtggtgacgcgttcttccccggtgtctgtggcgccgtcaaagaaagcctgagaagagacaagtcggcggaagaagcgaatttccgacaccgctctcgggtgtacgtacagctgagcgagcggtgggtccacctgca

SEQ ID NO: 3531 - DNA, 3515 bp, Toxoplasma gondii
  source 1..3515: mol_type = genomic DNA
aatgttggtttccttagcatggccatctgaggaatgaccacagcggcgtgcacgagtcacctttccagattccccggtactataccgacgtgtttatgacctcagctgtgatccgtcgtcagaaaaaggcgctgcatggcagccactcgtatgactctatgcagctggtcggcagaggctgagctaccgtagtttgagaaaacatacactttattctttcaacagttgacgaacctggtttcaaatcgtcgaacaggagataatgatcagcgtcgggttcgcactctacttcaatgccttctgtctcggtgcctccgccatctggctccaagtatgctcgaatgatcgatttcctgtcaacagcgacggttgctctgcatgaaacaacggagcagagttaccggggcggcaaccggtaggcagctcggagcactgtactagcaccttacccggggacgttctccagagaactaacgaagacacatctgctggtgcagcgcatgatagatctgcgcccaaaagcagagtagttgcaaattacttgggcaaccggtgacccccctcgaagagagacaacatcaacgagggagctcaacagctcgactgccttcatacgtggactgcactattttcgccgattcgaccaccttgaatgcctatcggtgattcaaatccggaccctgacagcatgaaggaagacgggacttaacgttttttaacaccacatcctccgtctgtttaaatacacttataaacaccgcacaacacaaaacaaatatgctggcactggacagttattccgtcacttacacaacagaggtttttgtgacaccgaaaaaacgggtggggcgagtttgctggacggcatccttgggcacctacacgcagataacgccatacacaagcaaatggaacacgatccccggaatcttttggcgacgtcttctgtggccgtcccaaccctacagcagtaatacagcacgtgtacatcgcgtaacgatgcttgggagcaaacgatacagttctcagaaatcaacttagtcaccgagtgactttggtttcccaacaccatatcccagctgcttgagaagaatcgccttcacgaggatctctgtgagggtgcgagtttaactatgacgttcgtctggaagctgcgcttgccgtttctgctcgagtatccatgtgattcaccgctaatgtagtggatcgtgagatactatcaggcgttcgcacctttgaaccgcgtttctcccgttcttttctctttcgctggatttggccttgtcgccctgaaggtgtgctgactggactcttgctgccggtgcatcccatgctgacgccccagtcgactccggatttcgctccaattttacctcaactccatatactgacacgccgaggaacgcccagtaatggccgaacatcgaaagctcccgttgtttcttccgtgtatatcgacatcacctgcgactcgcaacgcgtgcaacaaccgcgcttgtgcggttcgcaatcacaacgagagagatgtctcgcgagacgagtttttgtcgagatgtcttccgttgccgttgagcgagaaacggaggaaacaacaaccgcggtcgacggttacggtttctgctagtttgtgattttggagtgcaacaatttgcctgtcggcgctcactagacacagtcgaactcattgtcaaaacaacaggctttggtgaatattgatcaagctgaccggaagggaactcgtctgtccggaactggattacaaatatgaaccggtatcttgaaatgagctgacaacatcatacgcaccttgtttaaaggaaaattgacgggttgcgttgagctcagctcgtagtcgcgtgcatcctgcatgactgaggtgcggaagttgtgctaaactgatgcgttgctacacaggcgccgctggcatccctaatacacaggtcgcccgctctgtcacaaggtgaagcaattactccaagaagaaagcagttatgtcaaaacgactttttgggggatgtcgagcagctgttatgaccttcccagacgagtagctgggtggcccccgtctctgtacacagtctctctacaataagctgcgcttgcgcgtggcgttgtatgtcgccgcgaacagctccaccgcgttcggcatcgttcccagtagcatttatgcacgtatactaccggtaaattgcacaatgcggacaggaatgccaacgaaacccgattcgaatgtcaagatgatacccgagagaactggccctcttgtttgctttcatctcgtcgcatcactctttgaacggtcaccgctagaggagccacgcggctatggaagagatcgtcttgatgacagaaatgaattcgccctagagacggacctctccctttcgttagatctttccccggcagtatatagatatgctgtaacaagtttctagatacgctttaacagacacagacgcttctttcacttaccatattgcaaatactggctttcacacagcgtcactcggtactgtcgttcctgtgttggcggcatcgactacaacgtcttgtcaacgaatcaggccgtcggttcacgtccatatagaaggtatcgtccagaatcaacattgttcagggctatctcgggtagaatcactctaatcgcaagttctcaagagattctccgcagcgcatcatctacactgcaaggtccacttccaatctctcgaaaacagttggtgagcttcaccagtagaccactcccacgaactgacgttgcccctttcgcagctttcagttgctttgccaaagtgaccgcattcgcctggtttgagaatgacaacaaaccgcccaatatcatcaacctcaaacattgttctctgagagacatcttcgtgagaacggtgagtccacatagaagattaagatcctccacagcataccgccatgaattaccatcgtgaacgtaggcatatgaattggaagcgaacaccagctacagaatacagcccacaaccggatgctcgtagccctatacgagcgtttgcgttacaccatacacccagtggcatccacgtttctcgatggagataccatttcatttttttgtctttagagtttttctgcatcccaatatttgtcgtaatcgccacaagaaacaatgaactcaatgactacaatctttcggaacatcacatttcagtatgtctttctactcgaggtgaccgtttttttctcgtgtcggtccttcggcatcgaatctgctaggatgtttgtatcgggtggaggtcaacatgaacacttcacaccgcaaacatccttcgacagtgacttgttttcttctgcagtgggcgctgttgttgatcaagaccatgggtcacgtccgacactgccgagtctaagcagcgacttcgacgatccatcactggcatctctactgccatcacgcagcatgattgccactgttgttgatgggagcatgcacaactcaatttcaggtgcatcaggaaatgatgaccttccgtttgaagcga

SEQ ID NO: 3532 - DNA, 2065 bp, Toxoplasma gondii
  source 1..2065: mol_type = genomic DNA
agcagcaaaaagtagcactacgaaataggcttgaaactcgcttctagttcacaggcgtatcctcctctcacagtcagactcgcatgcagagaaggcgatcggtttactgctcacctgtctcgccggcagcacacggcagtccattcatctagctttacgcaagggtgaagtacgtattttgtttcgttgtcgtgactccgttcggatcttacctctgcagattcccctgatgttctgtgctcgatccatgtaaggtgtgagacgaggaggagagatggcgagacaaaagtgacagcgcgcgcttttcgcggtttctgtgaaatcggctgcctcctcatctatcaggctgtctcagcggaggcaattttccgcctagagaaaactgtgaaagggtgggcgacgagagggaagagagaagacgcaggtggagtctggagaagagtgatcgcgtctgtgtgtacgcgagacagaagatacgcagaacgttactggttggctccccatcctcaacactggaaacgcgcgtttttgtctctgaaaaatcattggaaaaaaggcgtgacgggcgcgcacgaggagtcgtttccttcatttgaaaacgcagccgttcgagaacagtctactgaagacactcctctctcttctggctgtagaactacagcgaccaacaaggaaatctaatccttttcgagtcgatctgcacatacgctgctttcccccatcttgtacatggaggactaccggagatgcccacagaaaaagaggtatcttttctgcgtttgactgtgtagaggcctctgaagagttccgatctgcaggatgtatacaaaagggtgaatatgcccccgttttgggaaagacctgcctcgacggacatgtttactcaaggcgtcatctgtctacagtttgctctgccgtctccccgctctctcgcgacggcgggagtcaccccaggtgaaactggatttcttcttgccatcgcgtgcatcctgtttctctcccgagtggaaaagaacgagagatggatctactaggcgttcgactaaaaatgggcgctaagaccgtgaattacctttctcgagtcgaagctctgtcgcgccttctctccctcacatcgcatggagtggctccggctgttgttttctgacgcgacttctcatcggtaattctctcctctctcctgctcacttttctcatcgggaattctctcctccctcctgttcactgtcttccctgtctctgacggggtgtgcgtcttgttcgatctaggagacacccgttcttctcgacaactgcagtctgttctctgcgaaactctcgtctccagtgtttttccgagtcactgcttcaggcaggacaagaagagagactcgcttcacacataccccacctccaagcggagaaaaaaaggctcctgtgtcgtctctgctctccggccggtgttagctggcctgtggaggaggagacacgagactgttctttttttttcgccgagcgtatcgtatccggcgtctcggtcgccgggagagaggagggccttgggagagccgcgcgagacttctcccgccgtcatgtctctctctttctcctcttctgcgcgttgcttggttgggcgcggtgtctccgcgtatctttttcctgcgcctccatcgtttttctcgtcttctgctcctcgattcggccaccgtcggcctcgctctttgttttttcggtgtgaaaaaaggggagacgcgaacctctctccgtgtgtggttctcgctcaagttcaagacccagcagggtccagtccgcgagtagtgggagagagagagagcggtcgcgggcagctcctggacggaggggggtagtagagacgtcttgtacgtctctctttttctgcgctttgcatgtgtcgtctgctcgcggagtcgtcgcggccagggaaacgagaaaaatcgcgtttcctcccggagaaaaattctaaaaacgcgtcggtgtctcggagtgtctgtccgcctttcctcaccacacccgctgtttcgcggcgccttcgcttccgcggccagacgatcgtcgaggccttcaa

SEQ ID NO: 3533 - DNA, 3264 bp, Toxoplasma gondii
  source 1..3264: mol_type = genomic DNA
aagtgccaaacgtgctcgaaaagctgtttctacggctggacaaatcaaatttctatatgggcaagatggagacattcccaagaacagggaattttgtgagtgcaaagagagttcaagagagtgctagtacatacgaagttgtgctaagttcaggcgaaatctgtcgcacgtccgtcatgcctacgaactggggtgctttgacattgaaagagttttgtgtttgtgaaattagatgtggtgattatcttccatatgtaactagtaaagtctggaaatagatgtttgcgttttctaacggtatttttccatgtgcccaagttttggtatcggatatgtgaatgtgtcaagaggtgtagaacagaggtgtgcagccgttcggttatgtcagacacctggtctggtagatccagattatcggtgtgagtgaaggtttgaaatgatggggaagggcagtgtgaaggcgaagtccttctcccctgtggagaatattcttttgatttgttttccgtcaccgtggcatatagtcgccttcaccgttagatctcatggcattgtaaggttgccgctgatgacggcagtgcttaatccttacccatgtgcaatgtctcttacaaagccttgcccgtactataggccatgccgtccactgtcagcttcagttgtctctgactttgactctgggccaacgcttcaacaacgaaatgtcagccacgtgtgagtccaccatcgccaattttgcacacctcaggttaccacacccatcttgaatggtgtacattatggccgcaattataattttcgaactactgtgtgaggttggtgtctgctgtaccattcgtgctatttacaaagggacaagcgttgttgcgggccccgatgccgagttccgaacaatatctagaaatatacacccaaaacccccactccagcttctggcaatgaaacatctaaaccctgagcagatgcggtgcgtgtcgaagctcgccaaacaaaactgttttcctctgttcactggcattcgtgaccggtcgaagcgtgtcagcctgagtagttatctacaccgtatctagactcgtctgacaccgacagtcatgcaaattttgctacatgtgaatgagtatcacgtttggtgtaacggtagatctggttagccatatatctacagaatagcgctctctaggtagttacgcagtttagtgcacataatatacacggaggtctttctttggagagattgagagacagacaaacaaaggaaaaaaattccgacgtcgcgggtcaaccacattctatgtccatctgctgcctcctcctcttctctacctctacgtgtttctcgcagtcgttcataccgatgctggactgcaagtgcacctctcggacacagaagcgtgggccgatccgcacaagcgtcaaagccctctgtgcgaaatcggagtgtatttttcgcgggacgcaccccgaacgtgcttcctttattcaccttcgcaggggcacttgtaagtttatccagaaatgtattacaattctccatagatgcgtattaaactacctagttatatgcgtaattcgtgtcgtgcgtacattgtgaaactgccaataacgttgttgatccgggaccgtgacactgtacaaacgtacatcgaattccctcacaaatactcacaggcgattacgttcgacgttaacgtttggtctccctaagtgctcgacgatggcgcttttctgaaaagtttcaagctcagctatacccggagtacatggtttgcttcgtcgaggagccggttggcttagtctgtcggattcgcgtgctccagcacgacacgcgccaactctgcacacctcaatgtacattatctttgtccatgagagaaagacgacgttgcattcattggctgcaaccaccatccacactgtttcaatatttttcaaacagaatcatcggtgtcgtgaaagccaccctgcacccgcaatcactaccgaatgtgttaccgtaaggggacctgaatatcattttcacggctcgacttttaaacattaggtactacagaccctgctatcgcacgccaactgcgtgccatcgctgacgtgattagtgatcgctccgtgcggcaactagtgaacttcgtcccgatggtagaggtaatgtttgacgtaggaccataaaacaaccggtgcgctgcggtcaccccaactggtgcaaccacaacgacagtcataagcgtgtacgctactgcagacagcacgggacaaatgtttctatacgactcgcttgccccagacatggcgaagcaactgtccctccatagatattctgagacgtatttacgaactactatacaacagatgctgcatacagctcagatcgcacgttagaaatcggcgtaaataaaaaagaaaaaaccgggcgcaacacagacacccgtgaaaagaatttccgctcttcacagggcaaaaaaatcctggcagaggcggaaggtgagatgttaacgggaggaccagtgtagctgcgtgcaattcgaagctggcgctttggactgggccgcgtccacgaagcaatttttctctaaaagtgtctcagtaccgccggaaaagcagacgtccagtgactgtcctcgtgtttctatgtccaaaaatccagcttcgtgtgtatcggcaggcaggcgtcgtgggatgctccctcgactcactcactcccaccgcaatggtccggtgtgaactggccggaacaggtagaaaaaagacgaggggaaatcgaacgcatccccgattgctatgcaccaccgtgcagcaggaagttgttgcgaggtgttacgctatacttctgaacgggcgctaaaacatatccactcggcaacccgatttcactgcaactgagaacaactgcgtgtgtgtgtgtgtgtgtgtaaatcctgcgtatcccggcagaaaaacaaacccccgccacatcatctccatcaccaccatccacacagcgacgcacccttttattcgtcgcacagactgctactagccggctagctcgtttaaaaactccgggtcggaaaggtgcacctggtgtcagggaattgtcatccccccgcacgcggcgtctgaaagtgggtctgagacggcagggagtgtaggggggatgattgccggcgggtgaaccacatcaattttgagtgcttcactctttcgcctcttcgttgcacccataattctttcgatacattttgtatcgtttccactccgagttacgcacatcctgtcttttctgcaaaa

SEQ ID NO: 3534 - DNA, 3550 bp, Toxoplasma gondii
  source 1..3550: mol_type = genomic DNA
ctttctgtgtatttagagaactttgcccggacgcttgggtcccgagagcagctagccatcgcagcgtttgcagaggctctgctgatcattccaaagaccctcgcggtgaacgccgctctcgatgccacagagctcgtcgccaggctccgcgccgtgcatgcaaaggctcaggggcagttgcttgacgcggctgggaacggggacgaggaactcaagtggcatggcttagatctaacttcagggaaaacgaggaacaacatggctgctggagttatcgaggctgctgtgagcaagacgaaggcactgcgctttgctacagaagcagccgttaccattctacggatcgatgacttaataaaaatcgcccccgaacccgaacggggccaacaggatgactagagtaaactctacaaaatgatggtagaaaagcgaacaaaaggactagagaaccgcacgcgggacttggggagataactgacatgtgtgcgcttcccgacacgttctcgcgaactttttgtattgcgaggaaaaagtccgtcggttctgttgactgtttccaccaggaagcagcgggagatcgtgtccactggcacctttgttttcgacgcacgcgcgtggactcgtgcttcgctctcgactgccgagtcactcggtttttcttcccggtttgttttccagcttcgctgcttccgcttctctctgaacgacacaacggtgtagggtagttcacaccgaagaagtgccgctgcctcgattcctagctccgtaccatttcaaggacgcaaactgatcgttatcatgtgagtcgcctgtctactctttgcgcattcttggctgtactctattttcttacatggttcgtgaaaaactgttctccgaactcaactgttcgctgcgaaaaagaacatcgaaacaaaactccaaacttcgaaaacgtatagatacttctctatatatctatctatctatctatatatatatatatatatatagatatagatatagatatataaatatatgcatatagcgctacactttctgcttgagacatttgtggaagcgatgcggggccatcaacgtatcgtgtcgttggaatcgggtgcatgaggaagcatggtcgagcctcgccacataatgctcaatttgggcattagagtgatacgtgtaatcatcggaagtgcaaagaagccgctgcaactaagaaccggggtttcgtcgttactgtacacctttttcgggggggcgtatcgtcgagtcggacggctggttgagatctttaaggcctttgcttaccacatccaagttctactgttagcatcgtgtcgagaacagttaccatagatttaatatacgtctattttgagtacatgcagtattgactcggtacacttcaaatctaaatttatactgtcaccctgtagtatcgtgcggctgctttgccctgcattcgttctgaaagtttcgcttttgggagtggcgccccttgacgacattttgcgctttatatgacgggaatactaatgcatcacttccttttaacagcgcactatatcctacagcacaccattcaaacaagagacctctggatagaggtgagggtcggggagactttgcaattcattcaccggtaagaataggtcaacacgaacatgataccagtacggataaaaaacaaagtcaatcgggtttaatcttctgtgcaagacacccgatggtggcagctggaacacggaagttaaagggattgttcgaatacttctgcgtccaggcttccaattgactaacgaatggctcgagtagttggaaccttgacgcatatttggaaccgtgacgcagaggcggatgagaagaactacgcaatgctctttctgctcttcggcctacgccgttcgagtgtaggttccaagaaactcttctagcatccttgttgtccacacaatatatgcgagcaaacagtgcttggcatgtcttgtgtgggaaggaacgtttctacggcgttgcaactcccgagttttcgaagctggactcaactggagttccttctatcccaatcagacaggcgagttcttgacgccacttgttaagtttcctgtttctttcttgaaaggcgttgtgtgtcgcccgcttctcacccttggcgggacttcgtcacatgccaccagagttgctctgaatccactgttacaaaatcccggcactttcaacacgattctgctcacgctggcgacgaggtggaccgacatgccagcctgttcgttccttccaaggacagcagtcgtgcaggcagtgtaccagcaaaacaaaactctttactgacgctaagatctatggatcagtggtcctttgcttcctcacaccggggacacgacgctttgtcaagggcggaaaacttctcgagcttgtgaacggttgagcgaaagactggcttcgttgaacacgcaacacagcaaaagatcgcctctgacccataaaagacaagataatctgtaataccaagacccatttcgatgttacatcaggtatgctacatcaggcaagtaaatatccttcaagtagcccaggtaaccctcagggaagggtcgcgtgtttcatcatctctttagcatcgacactttagatgacggagagagcctacaagtcacaaaataattctcgcatttcgtgtgacttgatgacgaaaaagaaaagcatctctggttacatcaaaacgagaacagagcagacgaagaaaaatttgtccgaaccaggaatcgaacctgggtttacacggccacaacgtgttgtcctaacctctagacgattcggaccgaaagtcggtgacggaccagttgccctatcgtgtgagatgctattctgtcagccacactctttcaaattcatgcaagaaatggtgtacttctgcttgccttcaggtctgaaaaaactgtatgttcgaatatcaatgcaagccgaaatgaggtgggggggatctgcaggtggtgcacgcaaccgctctctgcagcacaggatgctgcagcgctactggcatggggcatgccattcgttttcgagaatgttgaagtgcctgctcacaggagattgctttggagagagagtgaactgtagatacgggaaaaggagtaatagagcagtggcattctaaaaacctttggagaggcggcagcaatggtaccctcgagaatgtgtggagacgggccgatagttcagttggatagaatgcccggctacggaccgggtggtcgtgggttcgaatcctgctcggcctacacttttttctgtgaaaagacagggattgcgtgaacttttgttcgttatggtgactgtcagctggtggtttactccatgaagtaccttattgttcccaagtaagggtttggaagcgaatctggacacaagtcgtggtcagtctaaatttataccttgctcttttcgtctgtatgtggattatcgggatcttcacttggttgtttacttgagaagagtgcattgttttcatgaactttcatttcctcttcgacgaacgcgttgccgcttcttccgcccgtaattg

SEQ ID NO: 3535 - DNA, 4432 bp, Toxoplasma gondii
  source 1..4432: mol_type = genomic DNA
tttgaacacggttatctgctccttcacttcggctgtctatccacctgctgtcgccggaaaaagacgaaacctgggacggaggaaggcaaggcgcggtgacacgcttcaaatccgcgacgctcggcgagtgacccaggcctgcaggggcatcccgcgtcttctccccggtctcgcgcgctgccacacttgcggtgtatatacacctggccacagtgtatgcgcacctcggccggttgtatgaacaccgcgaggtgtctgcgcgacttgaggtgtccacacgccgcgaactcgtagcctggggagccggcgggaagaaacggaagtcggaggaacaactccaagagacagaaactcggtttgactgttgagggtcgaatggtagaggagtcctcgatcggagacacgagagtccccgtggtgatagagagaaaaacggcagctgagaagaagaatggagagcccgcgctcccaatgggagacgcgacgaagaggacaaaggagaggaagacatgaattcgcgaggccaggagcgagaggaaggatggccctcgcgacgaagagccgatcggggaggaagtagggtgagaagcgtctgggcgaggcgctcggaacgactcacagttgacgaagagagacgaagcgaaggcgccttggaagcgacttcagcgcgggtcggacaggaaccaacaagtcctagcggaacaggggaaggcgacaccgacagccaaaggggaaagagagacggagaagaagagtaaaaagaggaaaataatgaatacgccggagagggagcggatgactcagtacggagggggcaccccgcggaaaaagaagcgcagatggatgaatacgaagaggggaaagaaaatgatgaggaagactgagcagaagcagacagagaaaccggcgagacagcgaaggagtgagaggcagcagagaccccgcggagactgcaagttgctgcaccgggtcgcctctcgaccggcacccgccctcctcggagccgccaaggaacactcatcgttgcaagagagaagagtttggtcagactgaaggcgaaaacgaaaataacatggcgcgtgtctcacgacagacgtgcatctggcgacgggaaataagtctgttcgcgagaggtcctggcagccgcaatcgacttgcgtctacatgtggaggctgcaatagacccttggagaattatcggaaacagagtcattggtagccgccattggaggagaaattctgttaacggaaggcgaaagagattttacgatgtctctcgcgttcgtcgaatcgccccagcaagacttgatctcgttcacgattttagggatgtcgggtacccagggtcggttcctgggaaaacgatttccgaaccacctacgtaaattggtacaacgaagttaccatgtcctccgtacaaagctggacacaatctgtggatgtaacggggaaaaatgtggagcgaactgtctgttcgtagtatgcatcgagacggcgacagcgtcgcgaaaaggcggcgagtacggcgggtcgagcgagactcagaagaggctggtggctttcacttatcagtgtcagcaaacggtcagagcagacgtgaaggtgagaagcgatgaaaaaatggcaaccaaagaaaccgcgttcctcggtgctttttcgcaacgtcttaagcttgcctctttggtgtgcatgcagccggcgaaggcgagacacaacggcgacgatcacgcgcgcctgcaacggttctttctcaagttgagagaccatacgggatttcgaggcttttctatgagcgataacatgctatctttcctagaaaataggaattgtttctcaacggatcaacagctggcgggttggcttcgttccctcgcaagaatcggcacggaaatcgggacccaaccccgtcggctgcacgaaacattctgagcgggcggtgagacacgtctgcgagccaaagctggaaagagcagacgaaagcaagttcagacacacagaaaggttttagtggatgaattgctcttctctgagtcaatagaaagggcgcaacgtttgtcgcaaaaggccgggctgcccccatttaagtaacgaggtctcgtttccctgtttctcagtccgtcacacaaactgccaggagagattctaggcagaatctttaaaggagttctcagaaccgcgatcagcccaagacaagaccggcaataacacgacttacatgtgcaccagaaagtgtaagtgaactcttaccaaatccatcctctttgcattacacagaactgcaagtttttgtttctcctgaagtaaacggaagaacacaagcaggggcaattcatagacctgctgttcgtgacagagatcgcgttcgttcttggggaaacgacgtgggcaacgctaagcagaaagcagcagaagctagactcttctttggcattgcgatattgccgatgacatgatagcaaacctgggacactgagtttgattcttgtatgagatatggatgagatacaggcaaccaagttctgtattattgctggacaccaccagcccactgcagtgcttaagaaacctaaaagtgttggatttcaatatcctacgacaggaaggttatttaacatctgttatgttcctggcggaatatatggattactgttagtttagatcgtgaaggtctttgtttaccgggaccaagatctagtgtgttagcatggtttcgagaataaattcacatggaatcagcgggctactacgcagaaatccgtccgtttaaagcacccacagaaccataaaaatttgcaggtgtctccctccatactctagtcgttccgcggtggcttcgctgctctcctacatccgatgtatccatgcgcgggccctggaaattttactcgcagacagtggcagaaaggagtgatagatgcctgaggacctgaataaaagtcaggatctgaaggcaaaactgctgaataaaggaaaagtgtcggggctcgatagtgtattacggtgacctggtatccagcaccgggtcaacgccgctgaagtctctgtccacaagtatgtgaacgaaacactttccttctatggatatatttaagctgctaagcgtgtgatgcttgtttttaaatgcgtacctctttgatgcagcaggagcgtctgtctcacacacaagtttctttccttgtcaggtaccaggtacgcgacaggcgaagagtcggactggtcctttttgcagtgtttgagactcacgtgttgtctgggtgttgtatttcgctataagctttgtcggtgccaagcgttcgtttgagaagccaacatctgtactcaagtggtacgaaaaccgtgatacttatttggcaaatttgctttctcctgttagtgcgtacagaaacccggggacttatgtgactccatgccagatagccggttccataaaacgttccacatcatatgcttgatcgtaatttgtgtctggttatgcagctctagccgtgccgagttgtgccagatacagcacgtctcaccacggggtagttcaccgcagattccagtaaggtgccgacacgggtttcattcggtaaacctcgacgacatagacatctacccggtaacgtggaagaccgatcctcagatttgaggcgggcagcagccacaaactgcagagatgtgcttgccttttacgaggatgtgtaaatgccggttgttccccgtaggactgcaccaggattttgttgctgttgtttgtttagagtactccatccttctacggtcgtcgccagagggtaacacttccaatctccaaaccactgtcaatgtgataacctcaatgatgtctcattcgtttgtgcattggtggttaaacagagtacgtgttaccgagctgctcacatttctttgttatcaacgaggtaggtagcccctattacggaagacggaagtgtcaaacaatcatttaaaaggatatcgtcgaccaactgagaaagaaaaagagcataattcgtgagagactggagacaacgtgaagaagccttgttggagaagttcgtccgtatcaaggaacagagtatctcgcgagagcttctttttttgccggctattgtctgtgtcagtcgccagtcttcagtatcccgggtaaaagctcttcggtccattccaccgtttttggtagtggtacgtgactgccccagctgtttattgagtcagttttatggttttgtcaatcgtttctccacctcacaccttctcccgacacaacatcctccgcgttttgcggcgtttgctccgtcagcctacgtgactatacagatccaggagcgtttttactgggactagaatttgtgaccataaccaacaaagctggacacttttcccgccaccagttggccaggtgccgcaagtttcgttgcagccttcattctctgtgacaagctgagctcga

SEQ ID NO: 3536 - DNA, 1181 bp, Toxoplasma gondii
  source 1..1181: mol_type = genomic DNA
tccaaaagcaggcagcaaaggtcacgcagtctcgactggacaggagtccagttcgtttgcggagtgcaacacctccttcactgtagaaaattgcgaagaaacgccgagtacgtgctctttccagttgcctcagcttaccgatctgaagctccacagtttccacgaactttctcttcttctcccgggagccctcgaggatctctccgatggccttcttgaggccgtctgtgctgagcttgctgttcacaaagagaaacagacagcggatgataaaaatatgcacactaaacgcctccgaagctcgaccacggcggcaaacacccattacctgcaccggattatccatcaagaaatatcgacacagacacttcataagggccgacccctgaaatgcgtgattgaaccactggcatagggaaaacccgagccgagctgaccactacaaacgctgttccgttccattcccgcctccgacattccctgattcttttctcgcctttcgccattatccctggcttcagaacttttcaccccaatcgagcaccttgggtcatcagggactaaatttcgatgacgtgctacatgcacgccactccgatcgcagggcgaaaagtcaagtatattctttgtgtttgggacgtctggagctgcaagaaaagctgaggatttcttccgtcctctgtgtcccttccctcagaagtactcccgattggaaacccgcagtcagatcccagtccaggacaatggtcgatggttcggcgacccacgcgacagcacctcgggaatcggggtttgaggcgaggaatcctttgccctcgaaaaagttgaagcaaaagtaaacagaagagatcgagctacaatttgactgtgtgagagaaaacggacagaaagagagggggaagtcgtgctaccccaggcaaaaacgattagaacgtgtatacagagcggagggatcttacctcattttgaaaggaagaagagaaaggggcgggaaaccgggaaaagggcgattcgcaaaactctcaaatgttcaacagagagagcaaacaggagtctacccgccccgataaacagacaacaaaacactgtgtaaacgcgaggaggtcttcccgtaaaagcgcccgcagtctccccccctaacatgctgcctttcgcgtcctcctgaccacgcaagccccaca

SEQ ID NO: 3537 - DNA, 3540 bp, Toxoplasma gondii
  source 1..3540: mol_type = genomic DNA
ggaaaagatgagatctgcggcttgcgttccggagtcagcacaaagacgtccagagtgaacatgcagaggtcgagagacagacagttcaacgctgttttctgtacctcacgtgattcctgttgcgtttgacattctctgggggggaaatgttggagagagacgcgcgactctcaaacaggagtctctgaccgagctcgaaatgagaaaaaggaatcgagtttcctttaactgccgagtggaggtctggcgtagatacagcaggaaattcacatagtggaaatcaacaatcctgaagagcttgaatgcgaatggtagtcagccgagcggaggggaagtttctcgcaggctggccctgcatctctcttctgcaaggcagagggctcgtgtgtcgtcgcaggcctctttcttggaaatcataacttctgcaagttcttgtgtctccgtcgttgttcgccgcgggtctgttgtcagcacgtccttggctgctccgctttccagcacctggaaggtccatcgaagaaaaacgtgtaaaggtggttttctgttgtcatggagactggccgtttgtctattcagtcgtttctttggaaaaaaaaacgtaattgttttggttttctcgaggcctcgaaggaggccttcgccttgcttcgagtcgtttgctcagtcaatcagttccaccgttgaacgaagaaatacagtttaaaagtatgtcaggaacttcacaggaagaaggctacgcactttttatcaattttctcagtaaaatatgcagcctcaggatacgacaagccgacgtcgaggtggcaaccctcaccctgttagtcggttggtcaccgatttgctctctgtatcgatttcactacttgtctccagacatagtcagatcactctctgtgcctcttactatttgcctgcatagagagacaaaactctctatgcctcttgcatatcttggttttgagcagtttaatgcggacagtatccaccggacgccctgctgaggacaacggttgtctatcatgggtggaccttgccgagttgaattcttcagagtctcgaatcgttccaatcagtgccatttctgtgggagctgagcacagtttgtggtcgctactgtagaaaatctctggagtaccgtgaggctcgcttcttcgagctctcggttgtccacacaagaggtcgcacgcaaaccggagaaaccatcttccagacctgccctgcaagaacagatctgacgcccccttgaacgtttgttccttcatgtggtgattccggaggcaaaatgcctaccagacttcattgaatagagttttctacatgtggttttagattcgacttcactcttttacagacggttatggaaactgcgcaatttccatgaagctccccaagaagtgtacctttctgtttcgctcgttctctctctcgcgcgcggatctcgcgggctttttcggtttcctttcgccctgagtacgtaaggaaaaggaaaggttaaccgctatttaaacacaacagttaccgtagctctgatttcgtgtgtgtccagggaactttcggtggatgagctaacactcagaaagccgtcctgggtgtctttgactgaggcgcgccttctctcgacgtgctctgtcgcggtaaagtctcactgacatgcgtttttttctcttcagcgactctgtcttgagctcttagagaaactgcgtgttaaaatgagcacttgcaagccaacctaaacacggttcatcacctaaaagacatcaaggttttgaccgggtggtccttctcaggcggcaattttacgggactcgcagttccacgagcaaagagtgccatttttgtttcagtggtttgccggcatgaaatgccgaaaaaacacgacacggaaataagtgtctacgcatatatatatatatatatatgagaaagggaatctgtatcatacagctgaaagcgtggtagggatttcgctctactgatttggaccacggataagatctgccttctcgtagcaacttccagagaaaaaaacacggactggtgacaaaccaagactgcaattggtcgatctgccgattgtagtcagattccagggtgttgtcccacttgtttcactcttttgtgcttgcgctttgctgcatttccacgttccctccaaagacccataaacgtgaccgggaaagacgtcacaacctcgtactttctcgttttctggagtccattttcgggggcgttggacaaagggcactatagattccggttttttgggggggagagttcgatcgactttaccgtctacaactcgggagagaccagcctatcagtgtacctagacgcacgtttatccgttaatcgacaatgctgctattttagttgtggcaggtcagccacccctggagggaactcgcgtcgaggtcttttcgggtgttcgtcgaagtcaccgtcacacacacacacctggcagcacttggtctttgcaagacaactgaacagcaagctcttcggaagcgtcacgggcgaaagtttttctacctgaacaagactcgtcgcttgcatcacactgcttccgtttttcctgtctgccctggttcccctagacaagacgacgaagtcctgagatgcgtccgtggcgccggtgtgcgtttgtgtgcggctcttgacggaaacgcttatattcgagagttttaaaagtcctttttaggtcacttcttggcttttgcgaggcagtctcttggtgtcgactgccttcccccaccaaagaatcagcccgcaacacagcgcaccctcggtggttcagggggaggacggtgattgacgcgaatagggagcgtttttcggcggtaaaaagaaacgcagatttcaggatctttcgagtttccttttcgcgtctgagccgaactggaaaaaaccggcacctcgtcggtctcgcggagatttttccgacccgcggcagtgcccgcattgcaagaaaagccgctctcctggcgtcattcgcggaaccccagaaacacacagatgtgaaggggcatgtgactagcggatccggttccgaatcttttgcgaaaaaaaagctgggaataggggagatgcagaggcagagagagcgcgcgtcaacaaagacagcgccgtcgtgactcgtggtttgtgtcttgcgtttttcttctctggtttctcgctgtgtgtgtgtcgcccctcgctcttgggactttgcctcctttttctgtcttttctctgtccggtttttttcgcaaaccgctttgccctcgctccgccccattttttctcccctttccgttatcatccggagcttcttgcggttctcccgcgagaccgtctctcggctttttcgtcgaatccccctcctctgtctcctcgccgccttttccatcatccctcgtgcctcctcctcgcccccgtccctccctcctgtcttgcagaaaaacgcgagtctggactgtctgttcgcctccgaaagaggtgctcttccccctgtgttccagcctctttccagtcaaagtttctcctctctcctgttaaacacaa

SEQ ID NO: 3538 - DNA, 2611 bp, Toxoplasma gondii
  source 1..2611: mol_type = genomic DNA
tctctcgttccgttcgttgttcacaggcttctcctcgttctctcggtgcgtgctcccctctttgtcccgccccacgtcccgactgtccaggagcttctctacctcgtcaaaatcgaggtcgcccattttcctggagtggaagagtgtgttgcaattataaaaggaaacgactggagcggaaagaagaggccacacacgacagccagacaggctcgtatacagaaaactaaacggttcacgtcttcatcggcgattcccgtgacggtttcacgactccccgtttcgtgacgacagtctttatgtaccgaactctttacaacagacacatatcaaagcgcctatttcctcccatcagcttacagattctcgaatttaaagacgaagaatgaacgtgtatctccgctcaaaaacaacggccacgttctctttttccacccgaatacgcaaaaacgacctccatgcacaccagaaaagagcagggagcaccttggccggggctcttgaaaaaagcacccttttagtagactagaagaaatggaagggaaaattcacccgtaaagcaacatgcactgtcgaggcagtgagataatcttcgagttgggatacaataggggatgtatagcatacataagggggactgaggggcggtggtagggcagaaaggagaggcaagaacagagtcagaggagacgagatccagggaagagagaaggagtgttgtacaacgaagatggtcgggggcggtggactcccgggaaagaaacgaaatgaagactttcgcctgaaaaagacgacttgagttagagcaccagaaacgccgtcgcgcaattcccctttgtgtagctggaacttgcttgagtttttcaatccgagaagagaagacggcgtgcagacaacgctcctgatctatatctgcatgtgcaccacgtcgaacccaacgactctttcagcaggcccgatgaattttctccatcgccaactccgtccccactccgatgtcaagttcctctttttgcacagactgacgaaactgagaggaaaacgttgacagaagtgtgccaggtaagctcaggaagttcgtgactgctgcagtgttccgctaatgcccccgatgtcccgcccggagaagaaaggcggaacgaagcccagacagaggaacaccttcgccctctctacgtctgccttctttcctcggaaaaagtgccctttctctcagaaaagagtccggcgcgaaagaaaaaccccccacaaaaaagagttggcaggaacgaacctcgcggttcctggtggacgagagatacgccaggacctctcaaaaacgagttggtgtacgccagacgagccaaaatcaaaaatcggtgcggtgaaaagccaaagtttggttagacgagagagaagtgagagcgaagagcatcttttcttctcaacagcctctttttctttttccacgacctttttggggcacccacagtccagacatgtaacggacgcgcgttccctcggcttatagtcgaaacgcccccagaaggtgcgcgtgcacgccgcacgtcgttcagaatcgagatacgagcaagacaagaataaaggaaggaaggaaaaggaggaaaaacaccctcccctgctttcactcgactctttttgtctctattccttggattgtcgcctctttgtcagtttatgcgcgccgagtcttgtttaccacagttgtaggaagagctagaaagccgcagcatgcatccggggggccaggcttgacggtgtctcctgtgtcgactcgtacaggggcccttctgtctctcccgaaaacagaaaacgtctagtttcttcacctaaaagttcaagtctattcgagaattgcaaatcaaatcatgttttggctatcaatgcagctagccaatagtctgtcttcactgttttaaccatctcagttcatgccctgtacaacaacgcttcttgacagctccagcctatgcttgtcacaaatatgaatgccttctgacgaggtgccttgcttcatcaggaatcctggagtgtttaacttgtaaagcgactctctggtctatagagttgtacagagcttgattctttaatggaggatacatggaagctacgctgtgcgaacttggattccttcaattctggcgtgtccgccagagtttttgcgaaaacagctggactgatgctgcgctcgactttttgtctcctgtgaatgcgccaacccacgagagcgaggggtgtttcggatgcgctgctccgtggcaaagagcgacgagaagagagcttttactgaacagcggctcgcaggcggcgtcaactgtttttactcggctgtcgtttccgcttgttaactcgaagagacatggatctttgcctggtcttccctgcgatctgagtctcgtatctcctacttctgttgtaatgagaagcgggaagcgtcggtgggagtgttcttcccaaacacagttttaatcaccgatcagcaacgtcagcaacgaggaagagaaaaaaatacaatcacttctggagcctccccacgagacgctgcttcctttcctgttccagcgtgatccactgtatcttcatccgacaggcgggagactgtttcacatca

SEQ ID NO: 3539 - DNA, 4767 bp, Toxoplasma gondii
  source 1..4767: mol_type = genomic DNA
aaacacattttccttcttagatctggctttcacccacctgcaggtgaagccttcaaatcgctctttgccggaggaccagacccttctgcagggggcgctttaccaggcggcagctttcctttgggaggtcctgcttttcctggaagaggacccgtttttccttcaggactccccgattctcctttagaaattcctgccttttcttgaggaattcccgccttttccttaggcagccccgtcttttcttgaggaactccggccttttctggaggaattcccgccttttccttaggcagccccgcctttttttgaggaacttccgccttttctgaaggcattcccgccttttccttaggcacccccgcctttttttgaggaacgtccgccttttctgaaggcacccccgcctttttttgaggaacttccgccttttctgaaggcatctccgctttgccttcaggaactcccgctttggctgcaggcggcggtggtggcgtttttttggccccttcgtctggggttgatttgcctttgggcgggagaggcgagttggaggcttttttcggcagcggacccttctttcccttgggtggcggcgggggtggcggcatgctgtggacgggaatggattggaagagcggggcagggcaacgcttttgagtatctgaataatttaccggtgctgctggctctgatcgaagagtacgctcacgcaccctcgatggagaacgagaataaatctgtccggtaggcagcgcatccgtgattcggggcggatacgctggacggggctgacagcaacgcgcagacgacgagccatgatcagtcccttcagattggctctctcgacagggtggagtgagtttattggagagcggaggaagcaaagagtggcacggagaggcgggacacgaacgggaaggaagcggaagaggaagtctgggggcagaaccgcattcttgcggtaggtcaaacgaaaaaaggtcatcgcgacggctgtcggtagccgaagcagtggtacgcgacctccggcacctcgtgcgtgctgctgtgtgcccagacaagcgggattccacacagccttcactgtgcgaagactcactccgagaactctcggagaagacatagaaggaacccttgggtgtgtcagcctcggcagagagcgaggcgacgcggcgggggggtaggaaacagcgagggggttctgtcgggatagaattgagaaagatgagaaacgacgaattggacagaggcccagaggcggcagcttgcgctttaacctgagattcggccactcgatgtaacgatagagattcatgacacgcgggagacgcgcactcgatgcgcgccgttgttcgagagaaaggcatgccaccagtcaacttggcgaatacgggcctctcaggtagagaacaagaagttgcggagcagagaggagcagagaaagacgttctcgagggtaatgcatttagtacggcgtttctatcgtcgttaacagagggaggcatgggaggcagcggggccgaacccccgcggcctcgcgggcagcttgccgggcaagacatgttcgacggaccaccttcgtttttcgggaactctttcgagtgcaaaaaagaaaagaaccgttagacatactaggacaaaagagaatggctagaaaagcgtacggatcgggctcacgccgttctggaaaagttctccgttaactgcaagacacaccggtcgcctgggactccccatctcagacaggaggtagacgccgctcgatacagcggcaggaccgagagcccggaagaaagaacgagaatggaacgattggtaaatgatgatttagtggaagataagcttagtgttaaagatgttcacggaaagatgtgtcagctcccgtgttgcacagtggaactcggctgttgacttcgctgcccctcctcgacgtactctctctgctcgctcccgccctcgtcgcttttccctgcgggtggcggttttcgctttcgttctttgagccagggggagaatggatgtccgacaacagagtgtgtgttcacgagaaatctccaaaacgtgagaaaggttgggaatgtgatttaaaggtggagcacacacctggaggaaatccagcgatgctgtgtgcgcaagagcacttcccggttcgagcgcctggccagtgagacacgcgaaggtccaggtggaaccccatcctcaacacattgctttctccactccctttgaaaaccactgtcacatcttctgtttcgtgtgtccccgattgcctgtccaaattcatacgtttcacggtcgcatctgtcggtaaaaacgcagccggtacctctctggctagttcgcagttcggtgcacggcgatcgaaacggaagccccagtaacgtgaagggttccagaaaggagtgcgctcatgaaaactgccagtatactacggttaaattcagcatcccaagtccaggatcgaatccaaacacagtttatatccgacaccgcgctagagagtgtccttcgtagagtgccttcgtgtaatttagagtgggagatctcctgtacagaaggcgtagggagcgcaaaatgtcgcaacttcgtttcttttcgtgcactgtagcaacgaaacaatcggcatcacctgtctaacggaccctgctgcaccgcctccccaggtagtagacggtcggcgtattctgtcacgtcgatttctatgccttgaatagtctgtgttactgtgtcgaatgggcagcagggaggttgacgtgccggccacgttgcagactaccagcacgtgtgtcaccggaacggctgtatcctattcgtagaacatatgccaggggattcactttgccagcgaatccgatgtgtcacagcagtcttgctgttcgactgagcatgtttagcaactcgttggacgcatcgtacgcgtcgtccgtctcagctggctgtagacacaattagtaaccgacgtaccggggtgtgcgttagtgtgtttgaccggagcttgaaatggatctactcactccgttttcacacaattcgtagtcgacattctgagttcaattgattccgaaagcgtatcagacatggtgggactagagactccaaatcggtgcttggggcatctctttggtaagaaacttcccagacagaggggggagagttgcctcttccacaagccacccgagcgtcctcggagaaaacaacagaaacattcctcgtatgccgaagtccagactatctttagatctcgactaaggttttattatcctgcattaccgcagtgcagctggcactgattctctccgtcagtgctgcataggcttctctattacgaatcccgtgcctcagttgtctgtggtacacgactaccatcctcgccaccccgagcagcgttcacgtcaccccatattcttgtttgacgcgactgaagctagactctgttttacacagtgtaaaaatggcattcctaggttttgctgaactacacgtgttggactactgattgagatcttgaatatctgtcttcactgtatcctatcctagctctactgcattaccaggaaccatgtatgcgagagcgattaaaaaccccccaaaactacgagattcttgtttctcgcatgtgcaaggtttacaatggggagcagtcgcttgggttcgtggttacaactcttcgattcttcgcacatggcactagcgcttatatgccgctccagtgaaactcctgatcgctccgcgggaacgaagagtagattgtagaggacctgaaccacctagactcccgcgatttccttgttgtacaattcttaggtctgtgcgcgcctcctacaaagtgtccgtgccccccccccccccgccccccccgcaccctttcaggtccagctcacttgaagtttaggaaacctagacctttttcattttcggcaccgttttgccgattgttgacaaaacgaagcacatgcaatttgacagaacaagagtgatgcttttccggtaagctttaatcctactggttgagacgcgtagactcgggagacacagtgcgttccctccccgccacgggagactagccactcttgcatgttgctcgtctcccctcgcggcagcacacacgcgaagatatccaatttcttcaaaacaagggatacgaataagcaaaaagcagcaactgcgttgcaagtcaccgcagctgccagctgatatcgagcttgagtgcggcatcggggggcggcggctttctgggaggtgacacagttgccgagctcttttcgcgccgccctccagcacgacaaagcggggaaaagcgtgtggtcagcagacacagaccgagcggcagacaagggccgtccgagagcaaatgcacaaaaaaagctccttcttttctgacatggaaaaggaccggtctctcgtgtgccactttctcgcagactgctctcttgaccacgtaccgctgcgttccggactggtcgcctctaaagcagcagcggctaattgggagtctcggtcctgcttttcgtttgtcgagtctttgctcgatacacacttgcaggaaactcgtgcagaatattccgcacatcgttgtacttactcttttgagaaactcttgcatctggacgatatcggacgggttacgccttcattcgttccgaagagccatctgcctcgggacgctgtgtcgcctctttccccgggtgtcctctgccgcgtgtttcgcgactcgggtttacacggtcctttccaccggcacttctgctttgcaccaggaaaaaa

SEQ ID NO: 3540 - DNA, 2900 bp, Toxoplasma gondii
  source 1..2900: mol_type = genomic DNA
ggattcactcgacggtgttcgtccttcagctgaaaagagacagttggatctttggggaaccgaaacaggaaaaacgccaggaaacgagcacggcggaaagcgcggggacttccgcgagagaaagaagtcacatgcacatggggggagactgcaactcttgtttctgcagagtcgagcgaaggaacattgacgtagaactgtttcctcacatccctcgtccttcaatgtgacagaacaacttacgcagacgcgacaccccggtcagggactccagcaaaagtttcaccaagtcgtttgcctcctcctctcctccccagaggctctgcctcacccagccccctgcctgtctcctcatgttcgccaggctctctccccgtcttcctcctctctctttcttcctgtcctctttatcccctttctccttcgttctctcttcttcgctagatcttgctggcatgtctcttcactgtgcgtctccgtcgtaggtcgagttttgtgttagcgagttgcagttgctgtgcatcctgaacttccgcgtctccgtcagcacacactgagacgtggatgatccgcgataacctcgccgcctccatcttttcgacagccgcttcagatgcccatgcgtctctcgagtttctcgtggatgccgaggccgggaccgaagcctgcgagttcgtcttcatcgggcttctcccggttcaagaagtcttcggcggcgacttcctcgtcgaggcgcatcagcgtctgtagtccccagagcgaggagggcagacccggcaggcgctgcgacatcgcgcagagctctctctccatcttcagacgcagtggagcgtgcaggccgtacagccgcgcagctcgctggaattctgttctctcgcgctcgcggaggtggagactctgccgggtctccagagggtgccgcggcgccaggcctgccggcggcggcgcggagacgcaggagacagccgagacggcggagacagaggagaccggagaggccagggaaaggccctggtgaagaagtgcgttcggaaagtgaggaggaaaggccactgccgccgccggcgcgcccgccagagccgccgaagccgcagacgccgacgcttcgtagtccatggtgtgtcgacgcgtcagggagcgcagtgtgagcaggagacgtacgggattccgagagagaagaaagcgacggagtagcggagagcggcggagagcggcggaacgacgcaacaggatcgcagcagagactggcgaggaaggatggactacgaagagaattgagggagggattgaaagagacaactgagaagagaggagcagcagtcgaggttaggcgagagaaagggactgaaatggaagagatggaaggaggcagagcgtctttgagggaaggaatacagagaaaatcgcggaacagcaccattcaagaggaaggcgttctggaagaagacacggggcgaggagaaaaagactcctctcaaagtggcttttcacgtcggagaaagacgaggccgagaagcgttgtgtctttgctttcttcacattgtgtatcgctcatgaatttcgtcgaaagaaacattttgaggagctcgtcacgcctcattagagaccgccgttgcagcctcgcagtgtgtacattttgtctggcaaccccctgaattttcggatcgctgcactcgaagataagccgatgtgtgcgccgagcctgccgccactgttgggagagagaagagaggcctcagtcaaaaaagaaagcgacacagaaaacgccttccggtgagcttcacacttcgggtgtacgtacacttgcctctctcccatgcacaccctttcgtcgggcgagaaacgagcgcggatttgggagaaacgcgtcgcaggttcttccgtctcttccagcctctctcatcatcgtctgttttgtgtctcggctggcttacgcttcgtcgagtggatgcacagcgttttacaacggctgctgtccgctttcgtgaagttttctcctcgacaccagacagatctgccggtgctcgtgacctctctctgctggtagataactttttctgcgtcccctgcctcccgtcgagctctctgcctggcgtgggcttcctgattttccctctttccgtcgtgtccgcggtgtatgtacaccatgtactacaccccaggagccgggatgtgagcatctcgagaaagcccccgcgtcggccgcttgttccgggaaggaagccccttgcgtctcgtgtgtgctcgcgttttgcgccgattcgagtgaaggcgcttgccagaagcagactgcgctttgtcagtgtctcgtttcctctctgcgttcgacttttcgctgtcgttgcctcctctggtttccatcccaacttagagggtcgagcgaatccgagaaggcatcactgtttctgtctgcgtgaaaaagaattcgactccaacggtggccgtccaggcacatcccttcctcgcgaacagtatcgcttcttcgtttcgatagtctcgcaaatataagcgtcatcggacaagctccttggatcccacggcgtgtatttcttcgcgaagccttcggcatcttttctccgtttttccgcattgtctccttgcttcgactcttcctctctgcgactcccctccctccgcgcctgtcaaaaccgccttcgcgcgtctcttttctctctctcttccggttctgcgcagtttctctgcctcatgcaagaccaagatgtctctctcccctctgtcgagactcttctctttccagtagcttcccccgcgatctctcgtcttctctccctctgatcgctcttcctcttcccccggtctctctcgcttcctctccgcctgcgtgtctcctctctgactctcctgcgtttgcgcctgccctcagatcgctcgctgcacca

SEQ ID NO: 3541 - DNA, 3806 bp, Toxoplasma gondii
  source 1..3806: mol_type = genomic DNA
ttctgcatttcgtctgttctctccaaagtcgtagagtctctctctcccttgccctctgctctctcctgtgacacagcgttctccctttcctgtcctttttcctcattgtgtcctctccttctctttctttcgtcccctccgtcgctgttctctcccgactcgtcgctgcttccccctcgctctcgctcttcctcggcgagttcttcctcggcgagttcttcctgtgccgcacctgtggcgcctccgccgatgacgaggaggtcgaatctttcttttttcattctctcgatcatcgcttctctgctgggcggcaggtgggcgagtctcccttccgcctcgccggctagagaagagtagtagcgcgtctccttcggcaccatgctcttcttgtggttgtagtacaaaccgccgtaggcagctgctccgcctaggccgaccagtcccgcggagcaagcgaagacgcgtccgaagcgcctcatggtgagagtcgaggaaagcaaaagcaggggagagtctcacggacaggccagtgggaagaaacggcagaaaacgaagaaaaggagggagagagagagaaggggacaaagctaactgttgaagggtgagagcgatagagcgatagagcaataatagagcgagggagaaggagaggacgagaagaggaggagaacaggagaagaggaaaagaggaggggacagctggaaacggaagcgacggcggaggagacagaaaagcgagagaggcgaagagcgcaagaaaagatgagctgatctgctccaagcgtcggtctgaacgcacagaggcaggccgaggagggggaaggaaacgaaagagggacgttgaaataatggaaagtcttcgtgccttgagaacgtaggcgagaggatcgatctcctctttgcttccaaaacgcgaaaacgcgctctccctccagagtgcaggcgcgtacgtccctgagcgcgtgtgtacatccaccgcagcatatgcagagtttgcggtgtgaattcgaaccgacgcggagacccggtttctcttgtccgtcaaccagagtagtttcgcttgcgtttcgcgcagaactttccagggcgtttgatccagagactcgcgagaagactcctcctttttcgagacagcgagactgtctagccagccgatacacacagcttgccagttgcacacacagaagacgcgtgtagtaggcgcgtctgtccacccgaaaggttgcattgaaagcgaggggatcgtggaaaacgtattggagacatcggagaaaagcaactctctctctctctgcattcgcaaatcccctcgaagttccacactttcagaaccacgctgactcgagttctcccaaacctccggccgtccctctcatatcgtccgctttgtacgagcagatgctgagtaacaggagcctcaatgaagagagaagcgcggcgcgccttggaatccttggctttcagaggagttctcagcagcacgaaacgcggacttgacgctggaagaaaatgagggaaacgctttctgcttcccggctgtgacgtatattatgcagtggcgcgccggtgctttagcgatttctcgcttccactgtctcacacgcttgcctcgagacttctccattttagagcgtcggttgtcgaagaagtcttcgtttcttgctgcagcacgaagttgcccgccagcgccctcgacatctccatagaattcagtttttctcagatgcggaaagcgaagcgtcctctcctcctggagatggtcggatccggccaacgatctttctggatttctttgggtcgtcatgagcaaaggcgactcaagggtcttgacagttcttcctcgatttctcaagtggcaaatgtcgccgacaagttgccgcatttaaagtcgatacacacacacacatacacgcagggcgtctggagtctctctcccagcttcactgtcgagcgaacaagcgacaccggagaaaaagtttcgctttcggactccgaattctgttcctctgagttgacaacaaagaaaaaagtgaagactctcaagagaaaaaacttccgtttcctctccggtgaacgcacgcaccgccctcgcagaacgcagcagagaagtcgaaagcgatcactgctcacttgtgtgtttcgtctaggaactctggagaaaacacaaatcgtactaaaggattagcacctctgtgatactttcctgtgggagtccaccaagggaaagagactcgagaagccgcagtcgaaaacgttcttccggcgcgtcacaaacaacgttgaaacatccaggcaggaatcaaaggaggcgtcacacatgctcatgcggacgcgcgcggtggcgcgtgtacaaacattcgacgaacttggcgagtctccaagaacaaagtacgaaagacagagagatcaagactgagccagggagacaaatcggtggaaatatgcatctctatatgtacaaatggctgaatatatacatatatgtgtctgtgtagatcaataggaaaagggaaatggaagcagagcgaaagagaaagagatagatcgacatcggtagaaagattgatatcgacagataggtcgacaggcaccgggagagcgaaacaactcgagggaagtagctaatctgggcagatcttttgactgtttttccagagtttaatcctgacaaaactgcttttcttctcgaattgagcagttccatgagtgaaaacggtaacagggttaactccagtctgtccctgagtttatctgcatccatgaacaggcaacggaaagcctgaacgagtcatggtaacggtgaatgtcctgaagtgtgcgctccccaagtacgaggcgaaccgctctcagtcgaaagagcgttccttgttttcgcgttcggagtgtatgcgcctgagactctcgaaagaactcgagggaggaaccgtttctaggaaacaaacaccctccggtttgtttctctttttctcttcgcagacggtcgctgcgaggctctgaagcaaactgccgattcaaagaaaaaagccgacaagaagtccgagtcgtgagaaggaatcctcacattctacacggttggtgcaaatgccgttttttcacttccagaaagcgcttgaaaaagggtgcctgcaggtgacagtcgctgtttccggctctcttagccttttcgctcgttcttttcacagagcccgtgagtctgtcgagttaccattttcagcctttcgcgacaagccgctgtccggcctcgaagaagtacatttttcagagttctagaaaatgcaggtaaaagcaccgttgcttcgacttgaagagacgtcgcaagggaggattgtcgctagctgtttttctgtgtctcagagactacgcagaaccgtacctctgcttcggggggacccctgtgtcggcatctcctttgaaaagaaagaaatctgcctctcttcttcagtgtgtgtttacaacaccgcgcacaccgattcaccgccactgttcgcgtccatcaaacgaagcattcaaagtatatcttcattcgcctagttacattcatttttaggattccctttgacggaaacgcgtgccttcatgaaggagatgcacattcaaggaaatacgcatttatgtgtgcagcaaagcgaacaacagattctgcgtgtgttttctctggagggaagaagggagcgctcgccagtgtcgtgaaaagcaacgagagctcgtgaaagtttttgtgttttctgcctcgacgcagaaatctaggccaggacctcgaaacttggcgaaaatgaaagaaaaaagactgaaacgttcactgccca

SEQ ID NO: 3542 - DNA, 2005 bp, Toxoplasma gondii
  source 1..2005: mol_type = genomic DNA
ttgattcgcacgcatgcgtatggactgctgagaggagatactttgacctgcggggtcttgtaaatcttttttcttctctttaacgtgtaccgagcagtggtggacctgcgagtcccctctttctcttacactgcgtttctttttttgtctcctttctaggtgtctgtgcctctcatgttaaaatcataaacttgggtccttgtctctgtcttgaaagcagttagatagggcctctggcgacatctgtgaagacacaacgttcctcccttccctggttccgctcttcacacgttcccggtgtgcaggcatgtacaccaacgtctgctgatcaatctattcattcattcatacatgcttttgttcatgtgtatgcatctgtttttgcatttgtatatgtgtatatgcgtgtatatgcatgtagagaaatattggcacttcgtcgaatagtgcatgtcacctgcaaaggtgaaaatctctgcgtttttttaacgagagcatgggagaagagaaacaaactgttcgaagagaaattgacggcattgcctcaccccaactggcggcgaaacatgaggaagggaattctcaattggtgcagattctccgtcgctctgcaagatcctgcacaacgactgaatcatttgcagaacagtgtacttcgaagtttctccaagtttcctgttttctgcctttttttcgtttgaaaaagcgggatgtccgtctcgacaaggcactgacaacggtccgctacaggaaacaaagaaatgagcaactgggaaacagagcgctcatcactccttaatgcttcaaaataaacagtgtaaaaaaagaaatgtattcgagatagacacacacacatatgctgttactccgctctcatgatctatacatgcacatgcaaatatatatatatatatatatgtagatatgtatatgtagatatgcatgtaggtaaaggaatttatttgggtaagcgtcttcagcagaaaggtacgtccacaaagagcatttgcgttccgtcattcgtggagacgaatccgtctctgagggcgttgtgccgtcccgatcggagtcgcttcttcagtgtccgtttacgcagaaaagcaccgtgatgtgtgtttgcctgtcactctgtggttttacccttcttcgatcttctctccattccctgaaagatgtctccaaagaagtctcggatcctgtgtttccgttcttcgttcgtctcccgcccccgtggaacctagagcgtcggctggtggccggcgttcttccgctttctccttgagttttcgtttttgtgtgacccttctgaaaggagcgttcgtggcagagtgaccggattccagaaaaccggaactttcgcggagagagtccagagtttgagagtggcgcctcgccttcaggtgtttctggacgccttccgcacccgcagtcctccttttcaaagccttttcgatgctctgtcgttgtcttttcgggaaataggcgagaaaaaagggacgcgaaaaagctgccgacctcccgtgtgtgtttggagccgaagaaatccgtgtttttctggcgcaaagagcgtcagctgaaacagcatgaaaagaagcatgtgcgtggctcgtcgctcgtccgggtgtacgtccactctcctgtttgagaacgcttttcgctctcgaaaagacaacgccgaattctacatcaaaacgacgaacgtgtcgagactttgaaatttcgcttttgcttctctcctcacggtcgaccccgtccagagacctttctcttgttctccccgtcgcgttcttctgctttcagtttcttcgtttctccttctgtcgtatcgcctcctatttttccgcttgacttcgtcctttcgtttctctctgatctctgcacgtccttgctctctccttcggtgcccagagtcgccacgagcaacaggaagtctgcttttcgtggacttcccccttctttggaaactttctgcggaacctgcgactgaactttcaactcaaagcca

SEQ ID NO: 3543 - DNA, 1475 bp, Toxoplasma gondii
  source 1..1475: mol_type = genomic DNA
atagttctggacatcggtcgatcttcgaggtagatcaactggtcctgcctccaggaacatggaattccgtacagattagtttaacaagcgctgctttttttgttcatttgggctggtcacgcgcttcagatcaatgcgtttagcatcaactaagctatcatttgtgaacgtttagagtgtagctgcttcaagctgacggcatacaagcgccacccgcctctcgtacaatctctctctctctctctctctctctctatatatatatatatatatatatatatgtatatacatatatatacatgcatatatgtaccagtctacatggctgtatatacaccactatatagttctgcatccatttttccaaacttgcgtcctcaactgttgtgtttcaataacggttaacctgcccttttccttacttactcatggcttgaattatcacttaaataacacctgaagagagctccctgttacatatcataaacgagcattcatcggtttatatgaactatcatttccagagtactagatacttatatctctcctgatatattcaatgtgctggggctggatcctacaagtaacgacgactcgcggtttcacttcctgtaggagcggcggacttgtcggtaactttggcacagacttccccattttactctccaaaacacgcagagagacctccaggaacaagaggatgatggttggcattatgttcccgtctgaaacagcttcattgtttgcgtactgatgccagaccgaagttttgtctctgtctcgcatagccgcttccgctttcgctggcttccaaagtcgacggccgtgtctgcgttttccgtgccagcactaagaagctcttttccctgtcgcggagcccagctcttctggctatgagctcacatcagccgcccccaaacatttttcttacctttgccttccgcgtgactttctctagtcctcaaatccccgatacatgcacatttcgatgcgtctgcatgcaacaaataaagaagaagacggccctcactcagccttgtttgaagagatgaatcgatccacacgtagcgtcgatgttttttccgacgaacaagtacagatgtttgctcgcttttcaattttctgttgcgggtgtcctgatgcttgcatagtcgaagcagccgccggtgttcgctcgttgctgacgtcaacacagcagagatttgcgctttccaacacagtgtcgctcttgccttgttttttacgctgtctgttttgattacgcaaaccgaagcttgcgtcacggtatctgtcgagccattctctttatctgtgcctgcgactattgttctctgactcttctccctctcaagcgtcagtcgctgctgtccagcagctagcctttttttcctggaatgctaagtgtccacctctctttgaatttcagtgcatgcaggcgtcttcgtttctcgagaaaatgaccccgaactgaaaaa

SEQ ID NO: 3544 - DNA, 2053 bp, Toxoplasma gondii
  source 1..2053: mol_type = genomic DNA
cggcagttcgtgacagaagaactttgtcttttcctgaaagaaacagagggagagagacgaaaagcgaacgcgttggagagacaaggacgcctctttcgcagttgcacatccgctcgccgaagaagcgtctgtcaaagaaaaaagcgaatgaggtcaccacagtctccgaaaacgaggagacactctcgtagcactctgctctcatttgtgaaacgcactctcttccttgctccccactgttctcgtccactcctgctccccctctctctcttcctttttctgatgtcttttcgttttccccttgtctctctatctctctctcaccgccgttgacggcgagctcgtagagtccacctcgctgaaaatcttcggcagcacccaggtcggtcgccgttcttttttctgcgcatgcagcgacgcgtgggcagcgtccgaaggcacgagagaaaaccggagagccgccgagtttccttccctctgtgcgggagttgccttcacctacagcaacggagacagcaccggcggcgagagccgcagcgcagagtcctttcgtccagaacatcctctcactcttctgctcccgcgtctgcgtcggagagacagagacagcaaccggcagaccttggagaccagaagaaaggaggggagaggaggaggaaaggtgagagaaggctctctgggcgacgcgtcgccaggcctggctccggaggcttgccatggtggtgtttaggaggggattcaggggaactctggagaatttgaaaacggaggaaaagaggatgattcaaaattcctgcagcgtagacgacgcagctgaaacaccgggccgtgagcatgcgttgagagaaccggcaccgtcggggacaccgcgcggaggttcggcgacggcgcgagaagacgcgtttctcctctcctggatgagagagaaaggacttttggagaaatcaggaagaaaggaacctttcgtccaagttgaaactcacgaaaatgccacgggagccgcgcccgctgaagaaaacgacaaagcaaggaggcaggcaaatcacagatcctccggggtggactcgaaagggaaaagtgagcgcgagacagaactgtatgcagtggagatttcgaaaccgactttcttctcagccttttcagagatgcagagcatttgaagagaaagacaaagaatcgaacggccctcctccgagtctctccagctgcgccgtttttttctctcggtgcccggacgcgctgcggtgttcgctggactttgatcctctcaacaagagagagagggaacacactgtaaaggcgcggcccatgcctgagacaggaagaagagagaaaggaaactggagatcgggacggagatcgaggcgtctttttatctgcttttttttgcgatacatcttcagtccaacttccgcgtcggcgaggaagcggaaaaaccggagactcgcctgtctcctgtgtcttgttctaaaaaactgtgcatgcgcagcgcacccgggagatcgccagtcgcaagacagaaaagacgcttttctgctctttctcgctcttcgcgcagaaggcaatgttctccccaggtttcatccacttcgacgacgaggttgtctctcctcctccgtaaaaggaatcgggaagcccgttgtgtgtctcctgtcgcacagccccggcctcgcctggagtagatatctccgtttcctcgcgccgatttcgtcttgttttctcttcctcttcttctcttcttctcttcctcgaagcgccttacgcagattcttggtccgaagaactcgcgagcgcaattctcagtatttccgcagtcgccactacgactgcggctacgaagccgtagacctcgctctctccctcaattcttcctctctgtgctctcgtcgtctcggtctttccttctctcgcgtctgaagagacgacgcagcagaaggagttcctctgctcgcgcatgcgtctctccagagagtcgatgtctgctgcaggcaccgaggtcttaacttcctcagaggcgtctccacctctgtgtgtctcgggagatcggccgcca

SEQ ID NO: 3545 - DNA, 2319 bp, Toxoplasma gondii
  source 1..2319: mol_type = genomic DNA
gtggaacgacagttcgcctagttcaaagcaaagggagtagatgagacaaaacccccagtgtcggagaatgaccatctttacaagccagccaacaacgtgggagacgaaccacacacttgtcaactgtcggtggatcgtgcttgcattgattcggcagtctaccactagtgtccccgcaaaaatttcctctctttttcctgcgatttcggggaacagcaactccaacgcgtgtcttcccgtctcttcgtcaacgaccagcagcaccaccatgacaatcaagtgaacgacgcacatgccgtgcaccacacgccagaagccggggtgcgggagaacgagtgagcagtctctcgcctggatgaaacagtacatgcagacaagaatgagaagcgctagcacgacacgcctgacattcgcgctctttggagagctggaaacgggagatgaccaatcaccaaggagtgaagaaaacacggaaggagttgcaggggttggtttcgccgctcccgcgtgttcctcagatggacgaggcgtcgcttgtgtggcgcctttttggcacgcggggtcgtcacctggtgcagactctccccccttgtccctcttccactctccctcgacacacctttctgcaggaagctctgcagaaccagcaacatcgccaggtttcccggcgccttcgtggacagagcgcacgacatctttcatctgggaaggcggaaacagctggtcccagaacccgagaagcagtaaactcaggatgagaattgaaccccagagcacgcgccggggttccttgcgagctgagttgtcagtggagacttccaagcttttatgctcaccatgggccccttgctcagtcggagcgacaccgcagtcgacaagcactcgaggcgaacactcggccatcgagggactcgaagcgcgtgtggttctcgctgactttaggctgcctggtgacgccgcattgttgggggttccggactcctttcttgaagggagttgcattttgcctttggatttgctcacccagacgtgtggaaaagacccggacgcagcgtttcgcgtcggtcctggaaactgcagcttggaaagccacgggaaacaaactgttatggaaaaaaatcgggaagggatatcagctgcccgctacacgaaggccgaaactgtgggcggaactctgccagcacctgggctgcgtgcaacgtggccttggactactaataagacaaatcctgcagactggctctctttcctcctgcgagcgacaagacagctggcaccgcagaaagcccccgatatcgacctcccccagagtcgacgtctcgtccttcgccctttgaaacaattatctttctgccgccaggagcagacacaggagaaagcaaagaaccgtcgaacaacatgcctcacacttcctggggcggaacgaactgtgcaaagagtagccggtcataggcaagccgttgcctctacgagctcacacgtcgtcttttattcgggctccaagttcgtgatggcatcagcggcgaagatctttttttcccacatattcttgaagttcgtccaaaccaaccagagaaaaaaaacagaataaacggatagcaccttgtcgaatgactatgggggatgacggtgtggaggtgaccttcatgggcgccttttcgcagacgtgagacagctggcccccttagctcgccttgtctccagcgcagacatgccatacagccgcccgtcagcgccttcttaatttctgtctccaagtcgcttttgtggcgctatttttcgtcagatctcgatggaattgcatgacggcggattctcacaggctggatttcacaccgcacgccgagcgcattcacaagacactcgcgagtttccgaatctcctcgttggcgctcgcctaggcagttgctctcaaggaatcggctctctgtttttcatttcagcggagcatcgaacagaggtaacgaaccagtaggcgcgttggtcatcgaacaacttcatcgcggtgtgaccgtgtgtgccaacgttttccccgataaaggtaatcctcgccgctcgtgggtcgatttttgaggcggcatggcgggaaactatgccgtccgcacgtgttgcccgagcctctgggaagaaacaaagcacatgcacgatggtgtgtctcagaatagtacaactggcattctctgctaaccacgctcgactcatccgtatctgtttgtctggctcttcggtggtgagcctgatggacttgtaggcctagtaaaagtgtaatcctcccccgacacaagtgtccatgcatcccgtctatgagaccagggtaga

SEQ ID NO: 3546 - DNA, 1930 bp, Toxoplasma gondii
  source 1..1930: mol_type = genomic DNA
aagaaagggaaaacaaagagggaacagagacgccgtggagaacgaaaaaaagactcaaacgagagaaagaacacaggggacgaaccaccatcgctcccgcaaaaggagagatagagaaaagacagaacgaaagacacaccagaaaaaccgcgctctccactgtcattccttttccacgatcccgacgaagagattatgtgaaaatccccatctcgttctctgctgtgaacctctcttcgctggctcaacttcttcatccccgtcctcaccaccatctgtctttcctctttcactcctctgcatagttcctttcctctccttcctgcccctctcacgtatctctcagctccctcctctcctccttctcctttatcacatatctcttctatctctctctctggttctctcctcctctatctccttgcctgtctctctttctttctctcggccgttccctcctgctttctctgcctttttgtctccttctctgtcgctgcttcctatcgtccattctctgcgtgctgctctcctcctttctccccttctggctctgccgctttatctctttcctcctctccctcttatatctcccgtctcggatccgaaggtctgctggaaagaggcgaggaagggagacctgagggccgcaaaaggccttgaggggagagtcgagagcagcaggagactaactacaaaaagaggagagacgcagaagacaaggacgccaaatcttctcgctcttctcggcgaagacctgtggcaacggcacagcagcttgtgaaccagctacgctggcgctggggcttcacctacacctggccgggaaggcggaatgaagtgagaaaggaagctgatttctacgtcgactgctggaaaaaaaagcctgaaggcggactggtgagaagggagagcagactacgaaacctgcactcgctttgcttcctttttgacacttcaaacagccattcggcttatactccgcgaggctgtctcgcacgagttttttccttcttcgcccggcagcaagaccctgagagtctctgcagacggacgctgctagggtgaagagatgactttgttttcttgaaaagcagaatttttgcggcaggttgcgcggggcagagctcgggcagcagttgccctggaaactcgtgcgagcggctgtctgcaggggcgagagaaaaggcgcaaggaacggaatcggcgcggagagagggacgcatgctttcgggtgtacgtacagccggcaaaaccaaggtcaggtctgagagaagcctcccggcgtccagcagacagttctcttcgttttctctcagcagttgattggcgtttggacaacgaactgcgaagacgccgcgagtggagaaggaactcttttcccggtgttcctccctcttcttcctctgttcaaggcagtcgtccggcggtccgtcagcgatttccttcctctttgtcgtttttttcagctttctcgcttcttcgcaaggcgtgtgccgaactcgtcgcgccttcctctctcgctctccccatttgtttccgtctttgtctcctcctcttcctcgctcgaccgccgctctcagcgccgcgcctcactcgcgcttgcatgctgcgtgcgtttcggtaccagttcttcaacgaaaacctcctctcttccttcctcggccctcagccgtcgttcttctctccggtctcctttgccttcctctcccctgtcgcctctcgtcggcgttgctcctgcaccctcccgcttcgacctctgtcctattttttttccctcacgcgttgtctctccctccgtaactctctcctctttcgagagagacgagaaacgttcgaactcaaactgagtctgtcctgcctgtccgtcttctctttttcgtcgctcctttctgttccttttcttctcctcttctctctgttttcctcgaga

SEQ ID NO: 3547 - DNA, 1785 bp, Toxoplasma gondii
  source 1..1785: mol_type = genomic DNA
gaatccatgaccgagtggaattataacgaagaggtgtttgtcgtcggaatggtgccgagacaaaaaacgaaatgtttagacgctcgactgtgcactagcggggggcggggtgcaaaagggacgagtgtgctcagtggttcggaggtaactgaaaaaacggtgcaaaacatggagccttacgtggatccgcagggggcagaacagatgtctcagaagaaagttcgagagaacagaagaaaaacgagaaaagtgatgggcgactcatgcagagtggcgcgacgagtctgtctctcagacgagcttaccagtgctgggcggaggtaaaggaaagaagtcaagacgcggaccttgaggggggtggacagcatgatgaatcgctgatgtatgtactttagaagcgcaggagttaagagtcgagcggcatggcaggacgaccagttgtcctttatgcttcgcagataggcaatatatctgctgctgagggcctcatttctggagagttgcgttgtccctgtcgtcgcctcaccctttatctccgtgtttgtctcttccagggcagccttctgactaccgcccaacgggcttccttcttcggattccatttgagatagccgtagaagcagaggaagagccgtcagaacgcttgccgcggcagaaaaacacttaaagggcgtcacaagattgatataggcaagaggaatggacgtcaacaggctgattcataagtgacgctcccagtaagtggcggacagccatgaaaatgagcggccgagtttgcagaaacagagaaagaggtctgcatcctggcgaagagccgccggacaccctgcttctctttcacagttcgtaggtgccaagaccaggaccaaattatcgcccttcttggcaaaccttgagccgagttaccggagaggttagccgaaaaagaatcgaaacgaagacgccattttttgtctccattgcacacggacggaccgtagcttgtctctcagcatatcttacgacgttatgcggctgttatcgctaacacaccacaaagagaaatggtttatcgaaaaacttgttagccggatggtaaagagatgcagaaggcagtccgcagtaattcggttttcgtcagttgtggcgtgctggcacactcacgtttttccagcgtcacatgctgcctgattcacgcagaaactgcatgtgcgctgcgtgtctcgcctgcctcaggatgcccttgtcggccgatagtgaggaaggaaaaacggctccagcaaaatgttggttctattcggcgagtgccggtattccttccacaaggtcgagacaccgtcgattgttttccttccggactgaaccccggaaaagtcactttgcaccgtagattccacgtgctccagcgcggctgtcaattttcgacactgcgcgaacggcttgccaacaagaccaggctcgcgcgcccggcttttcacattcccgacggcttatatacggaaggctttgccaggcgtattctggccgcgtggggtcgaaagaaagtcgaaaaagagcatgcttgtcaagtgcatgcggccatgtaggttgctaggacccctgttaaatttccagggtgcggggcaactaagtggcctctcttcgcgtcgtcttcggactgttctctgggttggcctcgcttcgccacagacacttgtcgacgcgtctcagggagtctgagcccgttgtatttttttcgctgtctttttggcggttcccgtttcccctcgactgccgactctcccctctcccgctccgtcgccacca

SEQ ID NO: 3548 - DNA, 4433 bp, Toxoplasma gondii
  source 1..4433: mol_type = genomic DNA
caagaaagcgtaccgagttcatctcccagaggaataagaacatgatttccacgctggagaagcgtgaggttttcctgcacttctcccgttactgtgaggaacttgcaaggaggcagatctgtagccaactgacacttgacctctgctcctgagcaagacaacaaaatatcgagtctctcgtctttatcgtttcgctcttctctcacaatcgatctcctctatctcttctctccctcctccatcgtcttcttcttccctctcttccgggtcgctctccctcctcttctggggtgtgtgttcgtcctcgatagcccgcttcggcatgcctgctaaaccgtctctgtccctagcttctcctgactttctgctttctcgttcgccgcgcgaggctcaccgtcggaagtctggagaactgcgtatccgtcctcgagttgcttgacccggccagtgacgccgacggtcttccccacctgctcagcgaggtgcgtcgccggaagagctctgcagagagggagaaaagagaagagtggaaaggacgtagaaagataaagaaaaaaacctgaaggcggacgcggcagaagagagcacgaggcgaagaaagaaacaaggacgaagtgaagcgggagggaaaaggaactggatgatggtcgaggtaaaggacaagtaagaggcagaagctcaaggaaagtgaagaagttagagacaaagcaagagagaggagacacggaggggacatacacgcgaagaaaaggcaggaggcgaaagcagagaagccgcagctccccgcagcagtgaaaagcagaaacgagacgaagagagaagcgaaggagagacgcagacaaggtcgaactgacgaagacatccaacgggccgacgagatgaaacagctggtgcagagagacgggtgaaaaacgcgtccaaagtcaccacaaccgcagaaaaacctactggcaatagaccgcaggcattgtgatgagagacgttttctcggaataaaaactgaagaaaaactgagcgccgagaccggcaactgcttcgtcgtgtgtagagttggcggcccgccgaactgtcaacttgaaacgcctgagatggcagaacgtccctgcttccagggaaaaggtgcagcaacaaaagaaaaagcaaagtttcttgaagaccggcgacaggtcagaaggtgtcgaactttcaaaaggaaggcttgcagagtcgaagacagagagtcgcgctgtgagcagaacgagacggcgacaatatgccagcgggtggacaaagaaagcttcaaggggggtgtgtgcctggtcttcggggtgtcttgttgctgtgtgcaggttttctcggcttttcgcgtgcagttctcgttgtttttaattcgtttctggtaccaaggaaacgacctgctgtgaaagacctcccttctcaactcccatcaatcctcgaacgactgctcgtgtctcctcgacttcgcgcatgtgactgtgcgaccaacaccccccttttcttcgcgcgtctgtttctcgtggcttcacagaaatcgagatacacgaaagacaggctgcaagtccagcctcagaaagctacttcccccaatagacttcataaaagttgccttcttgagtctggactagcgacttcctcttgttgtcaagagacgtcacaacgtccccggtgtacgtggctgcaaaagatgtttgcgtagacatacacgtatccgcgtagctttacatacaaccatagatgcatacaaacgcctgcatgcacacagagatacattcacacatgcacatacgtacgtagattgttgctggtctgagtagaagcttcctcccccagttgatacgagtgtaacggcgacccatgtactgagtgtcgagaacgcagtccccaggagacatggccaacgctgtttcgtctggacgcgcttcctgactttctgtcgtcctccctcttcgtggggtgtgagcaaatgtccaagcgtacatgttcagcgatggagagaatggccgaaagcgcagagaaacgatgaacttctggaacgccgtctaaacgagtctagatccatctggggtgatatcctcgtctcaaggcacagacacggatatccacgcgcgtctgctcacgcatatcaaggtctttgcctggaggtttgttacgtcccgcgcagctgtaggtaaaaagtatgttagtggcttagacttgcgctggagcacattgtttcattcgatagtccacactaccctgaattatttaactcagttcattaggactaggtttgatattctgtatcaaccgatctaaaattgtgatgtctttctgccaacgggacactttctacgtccggctgaacggcggagatgtgcttgtcaaatgcacgcatccagtgggcttctgagttcctccaatacaaagagtccaggaatctacggaattcctcgtgaaaaattctctcgagtttctctggtataggaattcattgcactcagttaggactgcttctgcactttcaccttaaagctatacagtttacggataatctatgcaaatccgtaatgctctgagacgcgatagtaggccacgagcgttccaggacgcaccattcaggaaagtgtatcgaaagtgacaccagccaatagcgacagaatgtcactgtgaagcagcagacattttcactccaaacccttcgcctgtgcgaacggccaaagagacataaaaaaacgataggcttactatctccaccaaacctcttggattctgctgacaggaggcgcacagttccgtttcgacggcgactcagctgaattgatgtacgccttagtgtgcatacatagtgaaaccctgctgaagagagttctgtgcgtgtgtgcgaggcacgaatcatgcttttctggaagtttcttttgcgtttgttgctctgccaccgacatttctccagtctgtcatttcaagaagacatcttaaaagccgcaaccttcctctatagatttgttgactgacgtacgtatcacccatttctgattttatccgtcgacaacgatgtagtaggacgcacttgactacgagtcacacgcaagcgaaagaaatgccgtcttatcaagattcagcgaaatggtggagtcggatgcttcgtccggcggcttccacctaaaagactttctgttgaacactggtacggctggagtatattcaaatcgttcgagctgtctgcttctcgacgactgctgacggcactgtaatgtatttgggtccacgactgtgctagcctgaaatggcccacggcatttgaacggcgctggcttctgccacgtccaaacccccgagaatccacgttcagtctaacaagagtccttgtattcgacacttggcgtctacaaagtgacacagatcgactgctacaaagtacgaacagatgaagacacccggacttcgctgcggtgtctacatcacttggcaagcctctcattcaaagcgccaggaaaatcctgcaatgcgcgctgctgcagtgagtcatcagagccttttctcgcgcgtagaaagtgaaaacgaccgtgcatttcgtaagtgtgccttgccatcgatcgatccagacgttcccgtgcaaaaatccgtacctccgcaacgatacactttgaaggcttatctttggcttgcggcattggtcttgattctgtccggattcgagccacaactctggtttaccgggttcaacagccctcccgaaagtgcgcactgaatagtgctgcacatcacagagacacgacagtttgccacacacaggttcccgaatttccagccgttaatcccccgtagttggcccgcaaaaacctggagtgcctccagtatcagaaactgctcgaggatcgaggacacgcgaaaagtgcagaataaaacaagtgacgactcactgggctggtggaaaccggtcttgtggtgtacagacacccgagagagtcagcggcgcatgcgcggccgcctggctcgcatgcgcacgtgtcagccttcttcctgggggacccgcgagagaagttgtatgatgcctgaattcgcgattgcaacggcgaaaaagaaatcgcaagttttccgcaacggagatcgccctgctttttgcggggtcgaaaaactgtagactgaccgccagtccttcagcacatctgcacatctcggtgcgcgttcccgtcgtatcccaaggctacaaagacacacgtggccggcactttcggtgtcctgcgccgtgtgttcttcctccttgactttttctctcgaattcccaaactctgatttgtctatcttcttggaaactgtttctttgtctttctgtctcgtttctgtctccgcgcgtcgccggcgcgtgccccgtacatcgcgatcaaggtgtacgggcgattcaaaaagcctttctgggtcgttttttctgttctctatctgttttctcgacaaga

SEQ ID NO: 3549 - DNA, 4045 bp, Toxoplasma gondii
  source 1..4045: mol_type = genomic DNA
tgtatgtatgagcagaagaggactgggcaacttcttgagagacaggggggtctagacgcgagctggaagtccagagacagctgggaaaacaggtttccgttgagtcgcaaccagcgctttccaaaggggcgaccaaagtccggcctgttttctctcttctctttcgctttttcgcacttgggtttcgatcgttccgtggagacagctgcgcgcccgcgcaaaatcgcggccactcgcatggcgtcgatttggagtctctccgacgctcgcttttggggaagcacctccaatgcaattgtccctcgtggacactgaggtcacgggcatgaaccctgcagatctgtcgtctctacgagcacaaaactaccgggagataggcgttcgctgggagcagctctcttctgaaagaacggtacatgtttcacacgaacgtaggaggtccgaagacgaagccgtcgagcaactggtttcctgtctctgagctcaccggacttccatacgcatttcgtgttcggcggtttccagctgagaagttcgcaggaaactcgagaacgctccgaggcaaacgacgcatgcaatcaacgtgaagagaaccttcggcggctgactcttcagcgcctccttcccgccgccgcacaacacttgaccgagaactgtccacactcccgagaggaccgagccgacaccggcgaagagacccgtcgcaggcgcacagcccgcccccgcagaagcagagaaagaagaagagagagaagaagggagagacgaagagcgagaagaagaggaagcggcgtcaatagcgattccgagcaacgtaggcgttgccagattgcaggagctgcaaacgatgagggaagagaaggcgaggaacaggcgcttgcgcgttctgtctgggcagaaacgactgaagagagcgaagagactcgcccgggacgtagccggggcctccggagaggaggcgcctttcgacaagacacccggcatgactgcagccgcaaaggagacagggcggagacagagagaacgccgttgacgcgtggaggaggggcgaaggaagagagagaaacgagagaatgatgacggcgggaagagatccggagacgggggcgcaggccgctttgggtaggaggcgagactggcagaacgagtcgcgggtggacgccggggtgagtcgaagctgtgagaaaccgcggggagggaaaggaaaagagaaaagcaagcggaaggacggagggataatgcttcacgaggaagcagcacgacgctgaagaagacccgcgaggctcgagcgaaaaaccagccgacaacactcaaacactcgaagcaacggctgcggtgtctgttgcctggacgaacgcgacacactcgagggggattcgttccggaaaggaggacttccggggggtggaaaaaggatgcagaacgcgaacttcgcggagaatgggtgaagacagaacagaagaagtcgagaaagaagaaagaaagagccgcgcgatcggaccagcagaaaaaacgctttcaatgccccagcccgctggaagctgcgaccggcagctaccagctgtcgatacaccccggaggcgtctgcgtgtctctccgcctcagagacacaaaggcaaggcaggcaaaaaagaagggaggaagacagatgaaaactaaagaaaaaatccagtcgttcactttttggaattaaagggtgcttttttaagctccctcaaaagtcaatgcatgcgtggaacgcacaagccgcgaaccagacgcacaccgttatctagagctgtactttaaagtaggtatcctcgcagcgcttagaccatactgatttgtgtcacttatgagataatcaagaaatgtaacatataaaatagacacgcacaaaacaagatacagatacagataacaatactccaataacaacgaaacctaaagatgcatatatatatatatatatatgtatatatatatatatgcaaacatccatctgtttggatctgacgattggcaaggtcccccacagactacaggacagaggacgagatccgctgcttcctcatggagggaaggtgggcgagttcacacgcgcagaaaaaataacagaagaaacgtttacccgtggagacacccgaaggagattcgaagcggaaaaaaggtgcttgcatttttgccgagacgcagacatccagcgatgaacgccgaaaacggatttcgtcgaggaagcgaagtcgtctttctggagtggacgagcacgtagaatcggtctcagttcgtttcgctgaaggactctttcaaaatttaaactatggacgcaagcgtagcacacctgcatctagagccatgcacagtgagcacgcgcgtatctacagacagaacgcagatgcagttatgtgggtagaacagaaaggcacacacacaaacataggtagcacgatctgtgaaaaacatgcacaaagacaaattcatgcacatatatgtatgtctatatgtcgatgtatagctgctcgtatgtatctacgacgctaacggctttatgtggggaggtgtcagtattgccagcaggtttggagtatggaagcgcacctttaggtgcttggctgcttcgattgctggcgttaaatgtcgtcgaacgctttcttttgtcgattaagaggtatagtgcctgcaagaggcttttcctcccgagtctcttcgtcgtagacacgccatacgaaacgccgttgcttctttgcatgtcccagctccgattcactgtccttacgtatacgagttcagacacgaagacgcacacatttcgatgtagatctaattactgtatgtgaacataattctgcgcagacacatgtatgcgacgtgaatctgtggtcatctctgtgccccacttcccctgttcaccgatgacgctggatgggtcagcgtggctagttcctccgttttccatctaaattctcacccagcctgtagtcagagcggatccatatctggtgtggctccgagcagaggctgtatatttctgtgaaagtacggagacctacacagacgcgcattttgaggtgaactcttgtttggatttgaagtgacgtgcagaacgtgctttcaagctcctccgcatacgccgctcgcgaagccccatgcggatgccattttcgctggtcgataaatgccacatacagacttgcttttcccttctctaaagatgcgacccggaaatgcaactctgcgtggggcagagacgcgtattgcgaaaaagcgctgctagactgtaaacactttcagtggtctacgcccttggtctcctcatgtcctttccgggaacgttttgtgtcaaatccgagttatgggaacgcgaatgccgagcgtgcttttgaaagtgtgtgtctgttccagggaaagagactttcacgaaaactgcttgcacccccaggagctggacaacgtgtcttggcgtggagactatggcaaactactcaagtggcgggctagaggcaagcgacctggaacgcactgcgcttcaggcctttttctccgcttctcttcaccagcgaaatgagtctttcctcttttctggatttgtaatttccgcggctcgtcgcccaactcatgtgcgttttctgcaaaccgttgttccctgaagaacactgtggcctgtgcgcgcagtccagtgtgaccagacacgaccattgcgctagttgcgcgaaggtgcccggcacgttcgcgcgtttcgcggctggactcgtgaatttgcgccccgtctgcgcgaaaaagcgtttctttgagtggaaagaggcttgttttttgtgttggcccgtgcgaggtcgcagatttgactcagaacccacgggagcgtcgcgcgccgttcgggtgtatggacacctcgcgaccaggcgcgcgcgtggcgacaggccagtgcatgagtgtcacttttgcgacattttggattttgtcggcgttttttcgtttctctccgtccgctcgcttttttcgtgtctttgagtcccgcaaactccaccgaactcctccggccgcgcccttgcttctcgcgtcctgaaaa

SEQ ID NO: 3550 - DNA, 4086 bp, Toxoplasma gondii
  source 1..4086: mol_type = genomic DNA
gacgttcgaagcgcacttcagccaaaacctaccctggatattccttctcacccccctccgccgttttttggtggagcggaacagtggaccgtgtgtgtcgcaattcgaagtacgaagacagggaggctgcaacccccagcgacgcacggtgaacaacaacgaaaggaaagaaaagcttcacgagcgacgctgcggcgaagccaccttcagtattctgtccgatgtcgtttgtgcgaaggaaaaagctagaggggtgcgatacacgtatccgatacatgaaaaactgactctcaacaccgacgaggatgaagtcgaccacagccgtcgcagcgccttccgtctctcctggctgctcttcctcctgtcctttaaaaagttgaactgaagcacagacacagttcatgcgactgcgccaggattatcaacgctcataacagacacgtctcatgtttcgtagagcgtgacaccgtgtacagcaatctgctgcttccgggccacaacagcctgttgtgcagatcgaagcaaaaatgcgaactattgtgagaggaaaacgtccgctggtgcagcaacggcaaagaaagttgctgctccagcggactagcaagctaaacgaacactcggaaccccggggggacggcgcccgaagaaacagagggacgctgtgtgccaccctccatggctgctagtgcggttttttgccccggaaatgtttggcaaggaagccaggaaggaaagaacagaaacgtctcagggcacagtctcacgcaaagaagaaaagttgaacacccagacttctccaacaccggagtcggcccaccaggctcggccttcggctcttcggaaagaaaaactcgaatgcctcgggggaaaagtgaaggatcgaacttttccaggaaagaaaaagttcagcctaaagaaacgtaagcgcaaaacgaagagacgttgcagcagcccggctcagaagggcgctgtgtcggaccatgtttcgcgttcgatttttcaacgagcggaagttgcaaatttcgaatcatgcggtcctgtcgcttactggaacgttcgactaagcccagcgacagttagaaagcagtagtatgtggaaagcgactaatgtgacaactaaacaagcggcaaatcccattcgagtaaagcctgtctcaaaagctgatgtgagacagctgactgcgctcagcgtcgaggctcaacagctaaagttacggattccgagtgccacccggtcacaatacagaaatgtgtgtcccgagagcacaaagtcgatgttccactaagagaaatccccggcaaggcacgaaatgcgctttgggaagatggtgacagtcccggtgaaacagttacgaatcgccaaggaaagaagtcgcttcgcagccggaaggttgggaatcttaacgcgggggaacaacaccccgccgcgatgtcacacgaaacgcgaaagtcacactgcaggaacgtcgctgtcagaaaagccgaatcttcgagatccttctccgggtaaagcaatgcaaaccgtgtggctccagtgcggtgtttctattgtcggaacagagatttggacgcggaaggcccgtgaaaggacgcagctcttgcacagcagtagtccagtgtcaacagcacacagcatagaacgactgtcagtaatcggcgtagtgcagatgatgatagttactgtataaatagaaccaggagaacatcatctgtatacgaaccaccgtcttcgggagaatattaggtacaagttggattgttcacttatgtcttcgttggccgggtccaaatgcgagttccgaaacggcaagcacgaatctgagaccgcagaaggcgaaagcgttgtatgaatgccttttaaaagtctccttcgtttggaaagcgttatcctaggcttgggtatcttttgctaggaaagacagctacgctgggacgaggagtgcgtgccgttccaaaaggaggaaaaccttttggttttagctggtgtgatctctcggttcacaacataaaggtgtcactcgttgtcactagcttgctagttgccattgccgtgttagtgtgtaacccgtgtagagcggccttattcttttccgccttcagccagtggaatgacctcagcagaggtcacctcgagcgaatcatccgatcccagttgcccctctttgagaccgtacaggaaaaagcaagcagaacactcacaatggtgaaatgttggcggaagtgcgcaacttcagtggagtcactgctgtaaccttccctgagaggctacacactacggaatctgaggctgctgcctgtaactgttgattcgcagaaatgcacactacccatgtacattaccgtcagtgtagaagatcagggggtcgcatgaaacagaggaatattcctcctagttctgcccatctatgcacttcagaaagtgcgaatcggcgacaactgctagaaatgtgaatggttcctaaatcttgtggggcctcagtacggatttggcgagcgctatgcatgtgctgcttgtttttgagaagcgataatcagagctattgtacctcttcctactacaggtgttgcaagcatttgctgttccattgatcgaggacggtggtgtaacatcgatgcatcgcctcccaccctcgaaattcccggatccgaatctagaacaaatcaagttcctactaactcgaggatgaactggagtgctgcagaagctgttaaacacggaaataccagtgcaccagggatataccggtgtccattgagcactctgacaatgaatggcggttcagctttaaacgacagtcaggttacatccgacgatgatagtcgcgtattcggactgaacctttccttcagcactcgtgaatgtgacgttctacgagccgcaatctgccttaaatgatggacgctacggaggtggctgctggggctagatcagcacacatgtaactcgcagctgttttctggtcaaaaattcgtgacactcacggaactagtgaggaagatttactcccgaaccaaccgattttgccaccctctttctgtatccacgctaatatcaactagacgccagcacaaagcggcgcatgttgttctcgggctacttgcgcgagtgagtagtcctcatattgaagaaagacaacagggatgcacgcctgcgtcatcagctgaattcgcacccgacattcttccgagacagcaaagatactgatgtcgggagttcacgacggttaatgagttaatagcaagctttgcgatttcgcgttgtaactgtagtgaaacattggggttggcaccgaattgaaagggggaagagtcatactgactagttgtccgtccgcaagttcatgagtttttgtgcttcacgcacatgtaaacgcagtgcactatggcagttgtgtttgatgaataggcgtttgatggacattgggaagggccaggatcaccgggtctaagttatccgcctgcaactacctcttgattgtgtgtgtgtgtgtgtaccgatggcgccctgaactcacggaagcaggtctcgaggtcgcttcctctacgcgttcagcagcagtagctttcattcatgcgtcctctcaccttttgcagaaacaatcgaccgtcagtctacacataagagatcccttattcgtgtagtggcgtttcggcacatggggtaacgcacaaaatcttgctgtgaattctacgcttggcccgtggtatgctcgacgtgttgcacagcgcggggctttcaaagccgcgagaattttagacgagtctcatgctgatttctgcttcgtcagttcattccttacgagaaaactgaagtagcatattctactatctgtttttctcgtgtaaagttgaagctttaacgtggttgatcaggaaacgagaagcgaaaacctgtttgacgtgctgttgcctcgtccgtcacgcatttgcgcaacggccctttcttgcgtcgtgattttgcggcgttttccctcatttttggttccgagagactgggcgacctctcacttttaaagcgctcgtctcactgggcaagcttcccgtaggattttggtccgtcggttcgaaacatccgtctattcaaga

SEQ ID NO: 3551 - DNA, 4052 bp, Toxoplasma gondii
  source 1..4052: mol_type = genomic DNA
tggagttccaacagagaaattggaggtcagtccagacaccgtgatagctgagaacgactgtcggtttctaaagatgtctactgaacatgcccacgtgccagttttgtcgtggtaggcagttgaaacatttttagcggtcctacaggagatttgtatgatttgaattctctaaacatggtagaagttaccataagagtttctgtaatcccagggtaccctagtccatgagggccattctaggagcaacgatgtctttgtgttccaagaaggaagtgtttccgcagccatcagcgtggggtacatacttcgctaagctgttaacagcagtcactctgcgatgtgcagtagagccgggctcttcttttttatctcccttgtggcagatgaaagagtggaagcccgtgaaggaaagtgaaaggctggctccaaacgacacctgatcggactatcaagacaagcggccagttctaggtacggcagacgtctaagttatgcttgctaatcctcatgctccgtttcaaaagcaaaatgcaatcgggcgagcttcctgttgtcgcccacgatcttgtcagcggttgttcctcagttgcagacaaaatcgaatatagccgtcagcccgttcctgacgtctcgtgatctgatgagcgagcttgcaagcaagtgcctaaagcggcggttttgtgtgtaagctcccccacagcaagcgttaggtcgagcaaattgctctttgccgccccaaatctgttatactgaatgaactaggttcctgctactggaccagcgggtgccacttgcggaatcccgggtcccgacggtcgaatgtgtactgacacttcaggtgctcaccgagttgtgtttccgactgttttctgcgctagcgacggaagttggtgaaccgcacgtcgtcattgatactatcgaggtgtttcatggctacctaaataagttgtctcgcctcgctaaagagcaaggtagtctatgctaatggtgatatcctcgcatcaaccgtcccagactgctacattccaccatcacttcagggtgtttaagcactcattcacaagcatgctgttcaaagtcggttggaccggtcttctctagagcggaggtacgccgccgctgtacgtatgccgacctcataagaaagcctgggagcaaagatccggtatgcggcgtgcacgtggaattaccgttattgccacatgacgcgggaaaattgcaacgcggcagtgaagcagaagtctccagagtcctatcggggttacactgatgccttgcgtttggggacagacagtaaagccactcttccgtgacaccagatagttccagcgaaccctacaagccaaatgacaagaaacagggatcacccccatcacctgtgggctcctctaaatacccactgatggcttagggtaatatcaagtgcaaacgcatcgctatacgttaaaaacaactcgcgcacagaacaagaggacagttctcggtgtctgctaaattccctgcatttcactgcattcatttgactaaacggaaaacgaccaaacagtcaacacacagatgatatgaaggtgcgcattacgcaacagatcacctaaaaaacgacgcagcatagtttctctgggagctgatggtttccgtcggcgatgaggtgtctctaaaacatcagtccatctcatttgggatgagtgcacagaagccggcctcgacacagcagttctttgtcggcaggggaagtcaacaggaactattatcatacatgtgttttgattcgggggtgacagaagaccgagcacaatgtccgcgcttaaaagaagcggtgctcactactcgcgtcacctctcgcattgcagctgatctgccagcgacaccctacattgtgaagtctcagccgagaacgtgttaatcccatgttttgctatccaaatcaacgaggacttcgacttcactggcctctgcagcctcgatacccctctcgtattctatctcctcccctccaccgctcccactctttctcatgtatgcaacacccgctccggcagcgctcagaagtaacaggcctccaataactcccccagcgatcgcaccagcatgtccacttccttcctctctctcctttccttgttcctcgctctcggtactgtcgctaccagaaccacctcggctctgctgactgtccggggtgcttccttccggttcctggctttcctcaagtggtgttcttctttcctgatctctccccggttctgttgagtcgctttcaggctcacgactttcaccttcatcttccctctggcgtttcgatggttctgagtccacaggatgacctcccttgccaaattcgaagggaggcttcctataatggggaggcacacgcttgcaggtgatatgggcactggcgtcgattgtcgctataaagttttccttgcatacacatagtcgacctgccgtccctgttagtcggcggcaactctgtactgcatctggcggcccacacccgttttcctcacagccgctttcctgtcttacaatacatgtcacgtttcctgtcccgtcgagagatattctgtagccttgattacagcggcaaatgtaaccactgtttgtctcgttgcaggtgccggctgcctcaggtccacaagggtttgagctgcaagctgcaggcttttccgacagctgtacaaaattagccatgggtacacctgagggcatcatgcacgtgacctggtcattttcaacgcccagaacgtagcctggttcgcacctgcaatcatatccagatggtgtgtttatgcacgtaccagctgcggtgccaccgcatggattcccagagcagttgtctgcaatctctccattcccaggaagaaaggcaaaaaacggggagccgttcttcagccacagtaacgattcggccgccacaacggccgcagcacagcaccggaagagcctcatagcagagacgcgcggcaggaagcttactggaatgtgctcatccaatcgaaaaaaaacacatcatatatcaaagcacagtcgatgtcatcacgatcccaaacgcccacagatgtcgaatctcaccctcctcttgcagcgaagtacacaactcaaaaaaatacgagaccgacgacaacagagtacacttcgtgctcccacgaaggtcgtggtggagctacagtcctcttcagatacgccgtcgcatcactgagcatcgacacacctctgcctgttgcaggatcggatcgactgccgcgtcgctgacacacactagcgcgttactcctctcgccgtcacacagagaattgttgtatggagctacggaacgaccatgcaggctcgaatctagcgacacctggactgtgcttcttgttgcagcgttttgggttgcccagtaatcctcctttaggtggttaccggaagaggtccgtgacggaagattgggcattgtgcgcagcatggcgggaaagcttcggtaacatcagtggcaatgcttttgccttgatgacgcggaaggaaacatctaaagcagacgaaacccgtttaatggtagcggagcttgcggtgcgcgttttcgtggcggaatactgcatcgtgccggtggcagttcaacaggagcgtctggtggcggaactggaaagtcggcaaatctcaaaagaaccattcttaaaaaaaagccgtaaggcatcaaagtctaataggactcggagaaagccggcaaaaccagacggcgtcgtgccatctggcaggcattttaaacggaaacaaaggatgcttacaggactctgatggtggttaaagaccacagtggagtcactgacgaatcacgcagcgtgtattcacgtgatgaggaaagatttgtcagaggctcaacttgtgcgctaccgaatggttgtccagtagtgttttctatggaaaacaatgaatgcctctcatgtcgcgcgatgtacgtacaccggaagtgggcaagtagttttggatcggctgcgaaagatcattggtgaatccgccctacagcttcgtgagacagtccgagtggttatgtgctgtgtcgtttcacaaaa

SEQ ID NO: 3552 - DNA, 2290 bp, Toxoplasma gondii
  source 1..2290: mol_type = genomic DNA
acattctgttccgcctgaaggagtgaatgacagccgagcaacaattgtgttgatgtacaaggaggcgaatgacatctcgtttaaactcctcgcttccttttcttctcgtttccttagtctggcacttcacaatttgtacctcgacggctggggggcgccagaaccccgttatcagagcatcagcaaaaagttcagagaaggtgctcgaaaggctttacaagaaatgaaggaaaaatgagaaactgtacagagcaacgcgagctcaccgggtggtgggcgtcgagcgagtgtcagctcatatataaattctcgagtcttgtgttccttaattcttttcatcacctgaatttcacacctgtgagcacggcagtcagacgctctcgaactcgcctagttgcaagtcatttcacgctacagccacgcggatgactctaaacgtttccatttttttcgtcacaagctggtgactcctctattttccatatatgagcattcttgtcccaagaggcaggtgcttcgtgcgtggccgttcttcgtgcaaaactacacgcctgcgtcggttagtttacaaaagtcagtctcgccggctccactatttctacggtcagaattccagagaactgcctgagtctacagcctgtgaatgatgtggcgggtcttgcttttacatacgcaaagagctaaatcgaggtttactcccaagcgcgcctctcgcgttttcttcacgggtgagtgggacggcgcatgacgaaatgactataactcctactagcagcatacacacaactgcggaaacccctggtacaaacaaatctgcacgtacccttgtgaagcagaaagacacgcaatgtaatactgtacagaacactccatatgattctgtcatacatgctctttgttgcggcccgccaacgaccctagtctagcaggctgtaagtaggtacgatagtcaatttcgggcggatcctgtgcgtcccgatactgaaaacgtgattcttactctcggctcgtttgtatgacggagcgaggaagatgtcgaggtacactacggaaggctttgcttcgaagaagcaagccagagaaccccggattttagtgaggatcgggcacgactcgtcgcagcactacaccgtgacaacacacctacactttccatccgtacaggaaacacacacaagcacattcgcaaaccagagacctcttcaaccttcagtccgaaacgagaaaaatgcacaaaaacgccagacgcatatttggtagatgcaccacggacgtccaagagctgcgaccatcaccataataggaacaacccttgcaggcagctggtctttttcttgggagcttaaggagcggattaacgctctggcaatgtggaatcgtggtgaaacggtggtctcctgtagatgatgtgtgattcgttaacactgagaattttttcactctcaactcaaccatcgtgtcttcgatatcgaggcgcaaagcgggcctcgcgtgtctcctggggtcagctaatcacaattcagcgcaacacatcgacacacttctcacttcttggtggctttctcctttcacgctccacggactggatggtataacttcaagaacctcagcctggatgtggcggggccattcagtgtgtttcatgcaaaaagccactcatggttttcattttctataggatccgcaatgcgcccgagactgacaacgctgctgcggtgactgccattcgcgcctcacagccgacacctgtctgcaggatcttctgtaaggaagtttcgaacgtcgagtcatttgcaaatcggaagaaagcgcacgctgtgaataaaaaattctgatgattggtaggctttttctgtgggtgatttcctagaacgagcaccacctggtgagcgctgttaggggttgcccactttcggacagggagcagcttcttcttaatcgtttctaaataacgttacagtatactgctactgaaggaacgcggatcgacttcgtgctgacagcaatgccgagtctcggcaaaagtcagtattcaacggattctcgggaagcgcggcggtaccgacgcacacactgttttcctagggcttttacattttgcctccgttttattaatatggacaaaagggcgccgccaacccagcttcacactttaaaaatatccagaaggacttgagcgtgttttgaattcaagtatacgcaacagacggggaaaaagctctgcgggtgtttgcagtgtctggcttctcacccctcttcttgtgccactcttttgtactggaaaccgaaa

SEQ ID NO: 3553 - DNA, 4470 bp, Toxoplasma gondii
  source 1..4470: mol_type = genomic DNA
acagtacgtctatggtcgcagtgtgtcgcctacagtgctgtggcaagggtctcgtacgtagcgtttcacctccgtggtttgagagaatcctttcgacgcaaagtgccgtgatatggtggggagtgaggtccgacaacagaaggcagaaagccagatgagaaaccggggtgaaaatgacggtaataacaacagccagcactgccacttatcactgtgttgatatcaagaggctgcatgcacggaccggtgtgtgactattgtactgacgccgatgggcaacaaatgatgccatccacgtttatggtaaagaaaatgtgtttccgttcggaggatcacgactagaaaaaagaacgccagaagcgttgccagatctgcaggggggggatcatttgccgtcggggttgcaagaatgaaaagcttgaatctgcaattttgagtgtaaatttcttgccatgcctatctgtggaagccacttgcggattctgtaaacatatacataacggctctttgctgcgcgccagagttgagcttccttccctgagattggctcttttgctaaaaaagaaggtagtccacagtcttccgttcatcgcatgcagacggaaaattagcaagcggtcctcattgccacctacgagggagtcaggaatgtcttatccctgcaatcactgaagcttaggagaggctatcttaccatcgaagaagtgacagaagtcgctctgtccgtcaacatagataaagcaaccctttccttctatgagagaaaacggtctgatctgttctttatacggctttttttgcttccaccgttcttcccaaaagcaaagtgagctcgagctatatcggcatcatgcttttcaacgtaatattcacaagcgtgaatctccaggatgctcacagtctgttaatgatattcgaggaactgagaacctgcagcgactacgagtagattttcgtcccccacctcgacggcagaacaggcctgaatcctcgacgaaaacatcgtcaactcgtggcactccagggaaacaattctggaagatcattgacacaggcttgcttttgatttctgttcaagtcaacgaatgctgtattttttgttgcgtatgttgacaaggccatgatttcctttgactgcatgccactacagtgattcaacggtgaacacaaggtgtgaactgtgttaagcaattttcggcattagcaaatctagctcgtgattcacagttgtcttcgatctatgagcatgaaaactgcgttctctggcgtagcatgtctacaagcgatcaaacctggtggtttctctcgcacgcggtggggcccgcaaaaacggtgttgtgcttgtttcttgaagaaattgtctagtagcctcttcgactgatttcctcgccaattcgacctctgtatactacatttgtccgaaaagttcaacttgggacagaaccggtgacatctaaactttatttcagcctgtgaggaactgacgaaatccccacattccctttttgaggttgccgatatgacgcagagggacgaaataagtctctcgatgtaaactccatgtgtatgacgtaccttgtttgatgccgacgacattactgagcttcagcacggcagcagtttcctcaacacttctacccagttcttggatccgttttttctactctcgcgctgcgattttgacttaccaaagcagtatcagcagtcgcctcctgagcctgctttgcagtttcgctggcctcatgacctgtgatcttcgggtccaaactctccgcattccgtttgtgaacaaactcgtttctgtgtcattctcagggggaagcagcgaacgctgcaagtaggcaagaatgcgttcgttttcccgaggaaaacgcaagcgaatctgccacgtttgctccccctcgagccgaagaataacacgatacagaaaaatgacactcgtggaaacttctgctctcaatctcggtcgagagagccgctccgaaggcgggtatagtggtgacgagcatccgcccagttcaggcgaccatcgcgatttgtacgaggtacgtgcgcctgcgttcctttctgagtttcacagatcttgtccgagtctctgccctttacagcggaggtcctcttcacgtccttctcgtgtgacaagaagcttggcagcaccgagatacactgatagggtaccatttccttctttgccggaaaggctgcgacaaaccggcgccccgagtctgacacacacacgcaccttcacttgacaacaagggctcgtcgtgcaattgtggttatttgtagtctacctaaaagtgccaagatatataatagaatgaggcggccctcgaaattcgatcatccatctctcgcgctgtttgctaccgtcctggtttcctctacgggtgtaacccggtcctagaaaacgatacttcgccataagcgagcctgggctcagcaatttctacgcaagatgcttggtcccttgaaaaccaacgcgctcctccctcaaatgtgtgtcctcatgtttgacaaagggagaaagcgatccggagtatcgcggtcgagccacatggaacgccttggacgatgagttctgtctgggtctcgagagcgttcgctctccaggcattggaagtgacctccaggagcaagtggacgctgctttaagagagagcacgacactcgttcctttcatgtctacggccgcaacatcctctcaggacatcccttttccatcaagaccggtctttaatcagcaagcctcacatgcgtccactgttgcgtctgccctcgagagcgatgttcccccctggtcggtggtgccgtgagtgtgcatgtgtgcaacttccaatcagagccgtcgttattctagtttaccacgtctagcggtagagtcaccagaaaaaatacagctcgcggccagataaataactcccagtcaggtctccacggaggactaccacagaagccactgccatgtgttcacggcgaaaaatagcctggagacgaaagagtagaaaacaaacggtagctcaactgaacggaggggtcgcggtgtcagcaacggtgagcctagtgagttaaaaactccgtggtgcagtcgaatcccagcagagctcgttcggatgtcaattggggtgtcgctctacggaatttcctcaacacagttcttccacctgtggaaaagcgatgtcgtttcgcatacaattggcagtacgcagaagaaatatagccccccttcgtgcgctcccgtcactgctgaaccattaagacccgtccagtcttgcagtgccgacgctcaccggaacagtatacacaacagagtttacgaggcacacagcagtgcggtgtcaaatagactgtgacctaaatgcgtattgtttctgctcagacaccgcaacagacaaaccgcacccacaaacttcgtcagcggtatcgatgtgctaccacagttcacagtaagaaacttggcggcgtgcagtcagcccgctaatagttcaggattaccaaacccagaacatcgcgaggggaagtgtaataacctgaatgtcacaggaacttgacatccgtgttagtgaacatgctggctcctgagaaagagatttgcctcgatgttgctgagcgtgaaactctgtggcacttcctccacaaagaaaacagtggcagtgcagactggtttccatgcggaacatgtctcagttgctcagagtgttcgccatttgctttttgatgggccgtcagagcgaccttctgcccaccacagaacaactggcatatcaagaggatggcagtgtgttcgcgtgttgtcgctgtcacttgccagaaaagaatcttcgatctagagaacgagaatacgacgctacgtctcgagagggcagctgatgcacgcaggcaagttccctcggtataggatgacaccatcgtatcaggaccttctttgaatggaaggcaccgggactgtattcttgttgagtccaggtttcggtgtaccctgcattactagagtatcagagtctctcatcgccacctgaatgtagggtgcctagtcggactattactgttccacgttctctgaagaaccacgagaaaaacgtgaaagagacgcttggaatgaactctcccttcgagcacccgttgaaatggcccgagacagatgcagtcgactttgggaccgtcgaacacttcgctgcgctggcatattcttacggcagtgaaaaaacctttcatacgacactggtaaaaccaccataggaaaggctgttactccatatgaaacaagccaccagctgtgtttctgccgctgtccaggttccaggagcaacttcgggagcaggccgcgggccatgacgaggagttgatgaagtttcaagaagaaaaacaatctttggaggcaacgaaaagtttcttcaactccgtgaagcgccaattgaggtccgtgtttctggaagtcctcgttgactttgaacgtgtggagggaaaaca

SEQ ID NO: 3554 - DNA, 3940 bp, Toxoplasma gondii
  source 1..3940: mol_type = genomic DNA
tcatgggagccgcagaagtcgacggacttgcatgaatctagtttttgtcgaggttgttgctgttcatccctcatccttgtgtgcggaactggatagacgagcatacaatgtgcgtagggtactgcgttgttgtcgtgcatgcatgatgctgacggggtctttgttgggtcatggccagaggttgcgatgtgacaaaccgctgtttgaggtggtcctggttgcgtcggagtgagcgcagtaggcgccccagttcagcaacatgtcgtgctgtgggagaccgatgagagaatccagagatcctacgcttgtgccgcaggtgaagatagctcctcaacatcggcccttaccgctgttcgtcttgctctgctgaggggactgcagccaacaataccagcaggaccacagatcggaattagcacacctcctggcggcagatcactcggcagcccgcatagctcccgcagttctgagagctcaagcaggtctgagagctccacgaccgccacttcgtcagacgatcagggttcgggagggcgcgaggagaggacgctagcgggcgcgacggctgtccctgcatctgctagtcccccgggtgcgcggccgcaaacatcgcaaccaatgaaggaaatgcttttgggtgccacttcgccggcggtagagctcccgcttggcggtgcaacaccgttaggcctttctggtggctcgtcactgggaacgccgtcgctaggacatcctccaagaggtccttcgtttccttctagcctgtcgctatttttgcgcggaaggcgaattcccttcagatgcccacgacctgaggcgtcggaacaacccgagttcccgggagattgtaatgactgactggccaataagacggaggacacgcatgctacacagagcactatattactcaacgcggggacacctagtgacacgaatcaaggcgtcccgcggacacggtcccgacgcactgcctgtggttttcgtcattactggaagatttattcgtagtccttgttagtcggagacgcttcttgaacactggtgggcagcttgctcgctcgatacagtcgatgcgatgctgatggcgttccacactatatttattttgcccttttcccgctgatgtttcctggcagaactgaagagcgcgtcagagtgggggcatccaaggaaagccatacatgcgcatggtttgaaggaaattttgaaggtggcggtagttgaagtggaggcggcaagtcgctgactacgagggggggagacactgcacttggtggggacctgcgagcaacgtgattctgcgttatcacgcataccacgaccccatgtgagagcatttcccgtcttgatctacacctactctgaatgtgcaaacacaccaaacatcgcttgagaaatcctcactcgctggtgtgcgtcccgagcttccttgtgttccgcattgtgagcacacacggcagacgctgaatcgacgccgcgctgtccttctgacgcgacacaggcgtgtacgtcttttcggggactttcacaagtgcaaaggtgtcgggtccggatggacgacctgactggcggtggcaggcactccgaatgagcagcgaagaataagccttatttgctgatgatagatccattagaagaatgtctactcaaatgcccccacatctgctgttgcggttacttctcccgtggcatatatcgttaggtagctgaactgacagcagtcggtgctccttcacatatcgtttcgtcgactgctttgtttagcctcttcaggcgttcaaactttgatcagcttgtttcttcttgtattcatggataggtaggtgggctgttgctttaagctagtcatcgcactcaccttgttatgcttcatacctcaaatgaatgcattcctttctcgaaaatgcacgacgaaaaacggagtcgggaagggcttacattgaacaggtcttgtttgtaaaaagaccaaagcgcgaaccctgcaatcaatcccgaatacaccaggtgcgttgatgcgattgtcggacaaaaaacacaacgtaccagttgtcagcgagaggccaccagtgcagacagaagtctccaccgtactgactcagcagagtacacagcttctgtgaaagtacttgcgctctgtttgatgttcttctgaacgttagcttgagacattccgtcccctttatgattatgaacccaggcccaggcgaggtgccagtttccgattaactgctcgaaagccctatcagtatcttgccagtatcgtgccttgatccaacactcttttccggtgggcttcgcgtcgcgaaggcgccgaatgtatatattcggttccaaaagacaagtagcctgctacagcacagcttgacgaaccccactccccttccgatgacgagttttcgtcgctggttgagcaaaagcgagcggaacctttgaacaaattgttcagacatgcgctgcaagtaagctgctggtggtctgctgaccgatccagaacgagcgggacagtgttgagatacaggtattggagaacgaaaggaagagctgacgcctagggcgtcgacagtatctcgggcactctctggaagtcgtaatgctggtcattcatcctgtagggcgaaacggtcgctgacgttaccacaaagatgcagtgatgcacgggtgttgcacatcttctcgcaggtgtggcaggcaacttctgcgtcctcgggcacgcaattctcaacagttcttttctacacattcacttttctctaatcggagaccgctccaatggccttttgagttcgtctctcgcactgtttcccccaaaacacgcaatcgcctcccgcagatgagaggcgtctccaacagccccctaaggtcaccctcccttcttactcaaatcagaaggccatcggaacacaccggaggaaacaacataatgggaaaaagaaccatgggaagaaccccccttcgctttccctccctgttagacagcctctagccgtcttcgtttgtggatgcgagtggggccttcccaaaagccaagccaccgttgcaaacaaacttgtacgtgatcgagaccacacgctacttgctgttctcccggtcaccgccttctggtggtgccacggcgagcagcgagctcttcgcgagaatctgcatgctcgtgtattaggcgcgttgattcaattgctcctcgcgagctgcagctgccgaggcttacgtgaccgggcagacggcagcggtaaggtgattcggtttctgccgcgaaaatgtaatggatgcagaaaggaagcgcattacgttatccgctctccttcctctctgcaagagcaactgggatgtaattttttggctggaaatgatctcgcatccttttcaggtctgcgcgctcacgtgtctttttccccaactgggggttcagctgaaacacccgctgcctgtgcttcaccattggcactgacgaaaatttcgtttcggtgcacaggtttctttttctgtgcagtttctatgttccctatctctgtactgtgtcgtttcgtcggttcctcaactattggcgtgtccgctgtccgggcatgccccgtgccggtctaccacactttcccgtctttttttacgttcacctgctggtccattgcctgttcttccgtattagttttttcatgtgctttcccgttcgcacgtttctctccagtttccccttgggatttacttgtctctcggaggtccgaacgcttgaaactgccagtggcagcccccccgcgtatgcttcgggacccgctcgcctaaacacggcatgtccagtgtccgccgtgacaaaatctgtcaggtgaattgtgtcacaggcgtcgaattggttactcgttgtcagcaagtgcactgcctccctgctgaaccttgtctttgctgtgttctcctacgtgttaccccctttctgatttttccgctcaaacaa

SEQ ID NO: 3555 - DNA, 1364 bp, Toxoplasma gondii
  source 1..1364: mol_type = genomic DNA
ctgtcccttgtggcttttctgtgtcgagtgtcgacgcatgcagaaggcccttgggagactctgctcgcgcgccacagaagggtgttgcggagaggtcgaagagaagcagttgactagagcaggccacgtagagaagccggcaggattcagggtggaatttgacggctccgagattcgaggtcgagtcctccgaggcgcctgctgacaggaacagcggatgccggatgcatgcaacggctttctcttcgcgcatgtcccacagacgaacggtcccgtcgtcgctggcgctggcgaggagcgacgaagaccaaggcgtgaaggaccaaggcacgtcaccctcgaattctgcactcggaggccacaggctttcttgcgtgagcggcaaggcctcagaaaactgaccagcgtcgcagggacatgccggtgtcgagtgaggtgtagagacagaggaaggcgagggcggggatcctgaaccagcggacggcgtgtcgactgctttaagggcacctggacctggagctgcatcgaagggggcatctgtccgtttttcacaactcgctcgacgccggcaggaagacacattcccttcgaacccacacctgtattctgcggcttctccctcgtcttcgctgctgagatactgtcgcctgcgaggccagcggcagtgggaattgcggagagagaacgtagagcagaagaggtcaaggcctacaacggagtcttcgtggcccttcaggacccgacaagcgacggagggagagcttgcaccctcgtgcaaaggagacgcggcaggacctcgaacgtgactcatcttgatcgcagccggattttctgccgaagaagtctggatagcgggaaagaaagcctgcgaacgatgttctctgtgtatggcaagcactacgttgacatccaagggtcaccgagcgtgcaagtggctggtgtaacagactcgcagcgttcccagctacttttggagaggtgactgagaagcaaagcagtgggatggacgcaagcgcacgcgcagcgtcgaggaactccagatttcattgaaaacagaagaaaggggctgagattgacaggggaagtggcctttcccacgaaacgggcggcttttttgtaactccgcaaagcagcatgcctcatcggccgcacgcacatgtgtctgcgcccgatgtacccgcgcgccgatgacaagaatcctggtcggaattcacgaaaatctttgaggatgaagttctgttctagattggagtggacgcgggccttgaatctgatctttggtgcggcttggaagaaaatccacggcatatcatgataccggtgtctcggaaaactgcagacgcggccgtcgattgacgcacaca

SEQ ID NO: 3556 - DNA, 1707 bp, Toxoplasma gondii
  source 1..1707: mol_type = genomic DNA
tatatgtatatatcgcccaccaaacgacagattcagtcttgaaatatacatgcagaagcatatagctgcatgtgtacgcacgtatgtggaatcgcattatatatatatatatatatatatatatatatatacgtgcctatgagagtagcgatacatatatacatatactttagctctatgcggagagacattttgaattcaatgcagacattacaacgaatccttgtcgctctcttcaagtggcaaagaatctgacaaaggtcgaatccttccagcattttgacgaaacagtgacacgtttcaccaacatttatgtacatgcatgaaatgcatatttcctccatctcgtgcgtcaaaatcatatatgcacagtcatactttttctggtgtaagctatctcctttatgtacgagtattatatctgcttcgtttgttacacatattaatagcaaagcatggacacgtctctgaccgcactaatcatcgttgcttgtttccgcttaactctcttccagaacaaacggagaattcgaaatgttatcggattcctgtcgcagtggtgtcttcgccgctcgccctcagtgtgcgcaacaggtctgtccgtgtgtgtaagcataatatttgtgcgcatgaaacattcgtgtgagaccacaacgcgcgcacgtttgctccgttcgtgctcatacccaatccctcagaagactttgctgagaaagatctctctgtcttcgaaagaatgaagataaactcgagaaacggtaacaagctggtcacacgaatttgaagctgcatgctccctcctgcgacttagacctcaggtagcacaccaagctgagacgtgcaagcgaatatggcagtgcttgaaggcagcaagaaacgcgtaactatgaatatctcccctgcagaagtgatctcgtgaggatccacaaccagaaatgccgagttttattgctagcgcaaaataattacagaacaagcgcgtagttaaatgcgacgctgggtgatcggagttggctctctgtccactttgacgaggaagaaagcaataagacacgccgagaaatcaggaggataaagattattgtcttcaatgctgatatccggacttctgtatttcccgctccaacgctgttttccccttttccatggttgacagacgattgcacagaccttcaagtattcgtttcttcgctgtgaacctgcgacatggtttcactgaaaacagaagagcggttccagatccaaagcaggggcattcattttctttccaaagaccgcgtcaacgaagaataagcaccctctgcgagagaggggcaaggcaccaagagacgaaaacagcgtgtcgtggtacagacaccccgccacaggtcgtgacaaccgtgagtcgtcggtcgggtgctgtttttttgctcttggccttttgcgcctgcggcgttttttgaggcctataggaaaagaaaagtgtgacatctaattctttctgctattgtttctgcgtagtgttttcgtgttcgttcctttttcctttggctttcgatgcgtcttcacacatcagtggaaatccaggaacacaacacacggtgtagctctctttcccattctcgtttttccctcaagtgtgtgccattgtccgttttggcgttcgtcaagtgagaagaacagggagccggcgaccgccctcgtgcctggccatagcgactacagaca

SEQ ID NO: 3557 - DNA, 2024 bp, Toxoplasma gondii
  source 1..2024: mol_type = genomic DNA
ttaaatcaaagtttcagacgtggcacgctacagtttgcggttttctaaaggcagtttttctgggccttctgggtgcaagcaagatccactcttgaatcgctcgacactctctcggctttccttcagcaccagaacttaactaactgtttcaccttcttgtctggtagtacactgtgaactggcgtgctcctggtggaggttggtgactaatccgagctgaaaagtgaaccacgatgggtttgagcaacagggtttcttttcttggatgcttcctacggtgtatcggcacaagccgacacctcgcctgcagccgaatgcactcttcctgtagcatcatgacatgcaaatcgttatcaggactacttatgtccatcttgtgaggaggacctcgaagtcccagaagcctgggggtcaagggtttttataaccgttttctggagagtacagactgagagtcggacacctgattagatcttgggtactgctgtgtgagcacggtttcgagaacatcactctatagagtacaacaaatgcgaatcctcaaactaaaaaaaaaggcaaaacagaccaccaggaaaggaacttcctagtagtctcacccagcaattcccttcacacacaaacagccgagcacaaacgcaccctcagtggtggtttcttggagaaacctgcacagccactgtttgcacagagcatcgttcaattcagacacttttctgaaatttcacgcactcttgttcaccaggtgtctcctacgctgagaacggtgcctcaagacaatgatgccgctaacatccgtagatggacgcaaaaacacgagcggcctcgtcttcatcttagtgatgaacaactgaaatataaaatggaataggaatgtgccgctcaaggaacggattcatcgaaagatactgcgtggaagcagcggtccccccgactttccttttatccgccagctacgtcttctctgtgtagcagtttccgctggtaactgtgcagccttgagcatgataattccgagaaaaactggcagaccatggaggcacgaaaattttgaacatcgtcggctttacccggaagtgttcatggatgaattcatctggtttaagggtctgctcacttcaggggggttgctccaaatggctgtatgcgtacagagatgacataagtgctaacaaaccatcggtttttgatggaattacttttaacgccgaaccttctcgagtcctcagtttaagtttgtgccgttacattcaggagcacaccgttatattcgatgatcttaagcgtacaacgagcggggcgacacacgttgaacgttcacaaaacgctgaaggccgtagcccctcgccgttttcgcggcttttcggaagacgctgaagttcttctctaaccctttccattcgaattaactgtatcgaaagcacgatttgctgcgttccgaggtggcgtcgtttactactggtggttcacgccatcttacaactcttgtatgagggcaaccgttgtcgcgcactcgagcaaaccaaaaggtacgaaggcgaaagttctggagattgcctctaggaattgtcatcgaacaacagcagtgtgcattccgaaggacgaggcactcgtataccggctttagtgcgtgcagcacgcaatgaggttcacagcaaggcgacgctgaaaaaagtatttgactcgcgtctcgatggcgttcacacacaccgcgttcccgtgcgtaggcggcttgtcgctagtcttcggcatgcgccgcgattcactgaatgcccgtttttgcactcgttgcgccgaaagaatacaagtttggtattatgtgtcgaatctccaagcttgtgtaaggcttatgcgtgccgtggttgtacaaggaatccgatacaaggagtgaaaaatctgtgaggcacacagcagctcgtggttgcacgcggcttatgactcgtgactgattttgcctcgaacctgcggtgttgccgttgcttttgctttggttctcgaaaggacatctgtacgcgagttcacaa

SEQ ID NO: 3558 - DNA, 1454 bp, Toxoplasma gondii
  source 1..1454: mol_type = genomic DNA
gattggaacagtttcttctggcttactgtctgttgtttcgttccagagtgttgaactaaatctgtcaataacgcggaaggaaaagaacgctctgcaggcggatatccgatttgtgctggaacgcttgtgttgtagaaaaccgcaagtcgatttccatggagagcactctgtccgccgtatcagcagtgtgatcttggcgaaaagaagcacccttctggtttccttcgaagaaatgtggatttctaatgttccaccagctacagatgaagtttccgggggattacttttcgtatttacctttcttcattggtggtgcgaaatttcaggctaccggccgcattgctagcgtgtagcgactcacctcttgacaggtgtttgactatttgcttgaacttgtatcacaaagagttcaccacccgagcgctaaagacaagaactgtgtttcacggtaaaattatccacttgctttactgcagcaaagtaaaacgaaacactccgtcctctgcgtgaagtcgctacacacttcacttgatatgtcgccgatataattgtcgtagcatccctcatgctttcatctatcctgtgatgacgcccgatgtcaagcttgcgcgtaatgcggaattttcccgataaccaagttcagagaacttctagcgcagttctcttttgactgctgtgcaccgccaccacctgaagggttcggttcccgtcgtacatgagctggccagctgaattttagggaggatttcagaggcatgctcacttcttgttctctgaccatccaatcaagagaaaacgttcaacagttatctgtcgtgtagtctgacgcttgtcgcctcttatgctggcattgacggtcgaccgctatccacccggcacggcgactctactcttgtctgagcagctgccgcacaaaaagtcggagaaactgtctccccttcgctttctgtttgtgcagcccatggttgtcagtgaagcatttttgtttgtaacgtagcgggcaaagtccgatctaagttttttttggttggtgtggcccccagttgcacggcatcgaacagggggcctccgatgctagagccgactaacacaaggagggaacgcccttttcgaaaaattctcatgtttaactttggagaagaaggcgctttctaacggaaacgcggcttcaccttgaaaaggggaaggcgctttctaacgtttgtttactttgagagggacacctgaggctttcccttgcatttctacgacaccctttactgattaaaaccgggccaccagcagtagcgaatgtgcagagagagtcagctgaagtaaataattcaaactgaagcgctgaaactgtgtccccctctatgcagaccgccattcatcattaatttactggcctccttcaactgtttgaaaccggacagcaaaacgttcccctccggaggtggactcacacagctcga

SEQ ID NO: 3559 - DNA, 2798 bp, Toxoplasma gondii
  source 1..2798: mol_type = genomic DNA
ggtgacttccgaaccggatatttcagacatcgatctgctagaggatcgggacgaagttgtgatcatgtgcacggacggggtgtgggagtttatgactccagatgaagtggttgatatagtcagccgctatagcatatatcaggtatgttctgaatttgagatgtcggtgcgtgatctttggcctaccgtgaaccacgttcgccttctccaggaagctgtgttaatacgcagccgtcaccctgtgtgacgcccgtgcttgtcctgtggctgcaggccgacgaagctgcccaagaacttagtcgtgaagcgtggaagcgctggttagagcaggacggtcattctgttgatgacataaccgtccagatcatccaccttttccctcctgctgaagaaaagcatccgcgatggagctgaaacgtggggtcgaatgacaggggagttagcgaacgcacttttatttatttctgtcgtccacgtagaagttccttgattactaggggacaagtgtgatttcgtccaatttcccgtgtccagtgttaccaagaaacatgacgcatgaaacagcttctttctttaatcttgggcgcccttctcgaaattgaacttccacacaacaggagatacgacatagtccccacatatatcgggtgtggacttggcgataaactctccatctagggacagtctagctgtaacatggaattttctttgcatagcaggagagccccactttttcgcagtatagggggagacgttcgtcacggggctgcggtgtaggcccgtaggtccccgaagaaacgctttcgtgaacgactgagtgctctcagacgtgacttgaagagttaactgctgtaaagaagtcgtagctcccgtaacaagaagtgaaagctgtagacttattgtcgtcactttcataaaactgaaacgaacgtaaatgaactgcaatgcgatactacgagccagccgttgtggagtgctggcgctgcggcacaggtgaaaggaaactcctgtttcactgtggagctacgtctacggaaaccgttatgcttgaatgtatgagcatgcggtagcttttttgcgattcaagagaggcagtaagttagatgtgaatactgcggtgaagcgtttgacgggccgccggtcagtccgcctttcggagtcagatccgtgagtgtcgttggatttgcttcgccttcgaaacctgaaggctttctatgaatttccaagctgcgatgctgcagcgagtttaaccccactgccttagagaggtcgcgaaaatagctgtagcctgaagctgcggaggtgccttactcgcatgtactaccaaacggcaaaacgtaccacgagccagcaaatggtcgattagagatgcagttaccaacctctggatcacttatattcgaggaaacacaaacaccaagaatcacggaattgctcatgtttccttgaagaggggggtgtcccagttgaattccgtttcatcttgctaaaaaaagttatcttccgtgtccattccactgggggctgaacagcccgtgcccccgggcacttcacgtctcggccaggggtgtcgcgcgaccagcactttgtcctgtcgaaacttgccagtggtgtctctttgtttttcttgacgttcctcacagactgtagggagtattgtttccttttgcgtaattcatctcatctgtttgtgtgaggtaatccactgaccgctgcagctagcccatttaccgtctcacttggaacccaccggtccaaggcaccacacgggccacggcggtcggcccgcactcgtcaacttgaaatgggaaacacggcgacatctgggtggtgaggtccgtcgacgttgcgcctcgtctgacaatttgtgtcactaaaatttgcgggcttcttccctacgcctcatcaacttctctattttctcattacgatgtggtggcctcactatttttgcctgggttcctttccagtttgagggcgatatactgcgcggggactctgcttctcttgatagctttaacgcgcgatttgcgtaggcgtctgggacgtcgaagattaaaagcgatacttaataagttgtacctcgattggtgcagcagtggcgtgtcagtccgattttggtgtccgaactgagtgagtcggcatccggttggtcagatatcgaagcagtcgtcggggtaaaatcccctcgctgaccgcgcacgtctggttgcacgcttttttgtcaccgtgtgcccgtcttcaggttgatgaagtcttcctaagattggaaagcgttcacatgggaactggcgcctcgaaagttccatatcttttatagaaacgtggggtcgcgaaagcaggggtatccgaaatttgtagtcagccccctgtgatcctgaatgtcttcggttgcaacaggtgtacgtggataacatgatatgaggcttgtgaatcatgaagtgtcatctgtaggtgcttcaacccattgctgtgattgtattcaatgcggcatggtttttgggaaccctgacgcgacgccgccttacggacaccaggcctccctaaacaaaatagcattacggggctttcgtcctcgacattagcagcaccgccaagagcgctttggtaccgaaacaatcgaatcggcaggatttaagctctttcgtgtgaatggatctcctcgtgagctgccctgaaaatacgtgagtgacttcattacgtgggtggcagcggccagacccggtttccgcttcgaacggcggtcaaaaaacaaaaaaatcaactcgaaagctgctacacactcagggttctgggta

SEQ ID NO: 3560 - DNA, 2791 bp, Toxoplasma gondii
  source 1..2791: mol_type = genomic DNA
tcttctttggccaacactctccctgctaatctgcttttgaaattgaaggaaatacgaactttcgttgacgagctcctgtctctctgtgacagagagaggcggccagacgcgaacatgcttgcgccacagtcgaggccttcaccgaagcctcgagagaggatgtgaaggcgagacttttaaatccgtttttgccgcgacagagtcctgcagagtttctcgcgacttctgtaaaaaaagtaaatatcgcgcccggacacgagatacgtttttcgttctctttgaaaaatgcacactgcagaagcgccgcagaaacatgacggggcaagtgctacttctcgaagcagttgttgaacgcgagcaaaggcacaagatgcgtctgaagtctttctactcacgagagagaggtagaagaggactgcaacgtcctcgcaactcagagacacaaaattgtatgatgaattcagattcacacttcgcggatgtaacgcatggctcacccacaggagacaactcacaggcacagtagcgcgagccacgaagaagctggatattgcaaccgatttggactctggtggaaaacagagttgaacgcaaagaagcgtttctatttgtttttgaaagagcctcttggatttctacaccgacttctgtgtgtgagagcgacttcgcaagcgtcaggcaaccgcgtcctgacctgtatctagaggtcattccaaaagaaacaaaggcggaacaaagacacagcaagcgaaggagacccgaggagaatgcacagagaagcaccaaaaacgaggaagaacaaacacaacgagggagcagaaatacgcggagagaaactgaaagaacgtgtctgatctctgtgtcagagcaaatgtatgtttcgcactctacatatactctcgcttacagtgatccagataaatagagaaaggtagaactattcagaaacgtatcggcatgtttatatcggtatctttcttcacgtataaggatacacactgaactgtattgatatagttgtataggcgtagatatagagagatattggcagatagatagatgatagataaaaacatctaaaaaagtcatacatggatatttgtacaagtgatacatataaatatgtatatgtgaatacgtatagatatgcgcataaaggtatgtgacatacatagatgcatacgtagggttgtggcgtttccaggtttgtgagtgtttttttagacagtctctgcgaccgcgtccgcaatggtttgcatggttagcaactgaaagaaaggaatgcaccattctctcatggagagacaaagaagttgatctctgcggtctgaatgccgaattgtcggagcttcgttgtacccagggtgtgagtcctgacacagcttctgtgtgtgccgacgtctctgacccctgcgtgtctgtcgctgtgggcaagaacgtcgcaattctgagtgaatctcctgagaactcttccgcttttgactttcaaatctgtagaaacgcaaagttccatcattgccgtagtgaatttgcgagagaaaacacaaaggcgagagggttttcgcctccggctgcagccccgcgtctgagaccgttcgactagccggcatgtgtgtatacagcacacagtgcaactttcgcatttctcgcaaaggcgggagagcaagctcggcagtttttccagcgactctttctctccactttccctgccctcaccagaaggaggatacacgaaaaaaaagcgacagaaaagaagtccttccctagtactggcgttctacagaccctgcttttgcgtagccgcgacactcgacttttcgggtgtacagacaacaccgggcgcttctcgcatggcgtcaggcgcgtcccccggtctggttttcggggtcacttcttcatttccttttctttcacggatcccgcttttttctctgcgttgctcttcgttccttcgcttgtctggcgcatgcctcgcatgcggcttctcttcgggggctcgctacgcgggtcgtcaaaggcgcgcagccttcgcgttttcttcgacttcttgcgcgtcttctgctgcgccacggctcgttcgttctctcactctcgtgctctcgcgctctcgggctccgttcagatggagacaggttgcaattcagtcgccgaatcgactagccgaaaatgagaaccgcttcacccggcaccgctgcggtggcacttgggcgtcgtctgggcttctggttggcggaaagcgaccccgaccgggggcaggtgtcttggttcctcacgcgagatttgcagaacgacgcttgatgctgcctcttcctggagaccaccgagatcaccgtccgcaggtttcagcggcgcgtttcgcgttcatatccgccacccgcaccagcagagagggggcttgaccgctggggggagcggactgggagcgaccgaggaaagacagaaatcccttctcagatgcttatcgctgacacacgtccacttctgggcgattcttgcgaacccgctcatcggctgcatgcgtcagtcgaccgcaagggtggcgaacactgaccttttcaggaaatcgctattttgcgaagtgcagagaaagacgcacggcggtctcgcagccctgctgcttcgggcagatcagtggttctttcaggccttcaccgtcttctcactgtctgtttctcgcctctcctgagtcggctttccaaagacactccctggcggcttctcgacatcgcctttaccctcacaagtcgggacccaccgtcccctgtgcggccggtcgcgcgtctcaccacga

SEQ ID NO: 3561 - DNA, 2936 bp, Toxoplasma gondii
  source 1..2936: mol_type = genomic DNA
gggacttatccatgtaatcaccagccgcatcgtaatacaacttgatcaagtccaccttgacattttgtcccgtcctaagtcgcgttaaaagtaattcttgtcaaaaaccgtgtctcttcgatacccaaagaactgcagttcccttatatatatatatatatatatacgtatatataacctatcaccctgcgtgcaatacggatgttagatgactgaagtctgtatttcgattgccatgactctgtgtgtcgctggaggtagtttcgtttgactatttcttgaaaatgcttcgttcccttctacacgtctgtggctggtgtgggatgcgcttctgtgctttggaacttctgcggttgccggcattggctacccgaaagtcatcttaaatgccgacttgcaagacccctagttcgtgtcagaggacatcgcctactgttcacactttgttccacgtggcgtccgtgtcagcatctcagctgacgcagaagtcgtcccagacgtccgcagcgtcggaagagtggcttccttcgcggttttcggagttttcctttgcaccgcgcaagcgtcgcagaaacctgcggctctgcaagcgtatctaggtgccgccagtgtcctctatgaatcccgagcttcgggacagaagaaatgctcggttctgcgacgtcgctgagcctccggtgcagccttgtgcaacctttcgcaggcgcgtacgttgtttcctctcgagtttatttattcgcggaaggcagagacgcctgcacgagtccacagaattcctcgaaatttgcgcaagtttcgttctggccgcgattcaaaagatgggcagcccctgcttcgcttaggttcagacccagacgggctgcgaatccctgcagttcgccggcggtcaattttccgtctctgtccgtgtcgacgtactggaaaacttcacgaagaacttcgggaagcggcttcatgagctggttgtcgacaaaacagagaaacgtcgggaagtcgaccggcgaggcggcacctttccccggatctgccgccgcacccggaccacgcaactcgacgagaagcgctttcacttgatcgggttccagaggaaacccaacgcggtctttcatgaaagccatcacgtctgcctcactcaacttcccatctccgtccgcatcgattctggtgaaaatcgtttctagctccgcggcgtgcacacgcagccgcggcggaaccttatcgagtgctgagggtttcgcgccagcagaagcgctgccccgaggcggcattgtgcaaataaggggaaaacacgtaaggcagaaaggactcccgctaaaaacagcgcagagaagggatctttcggttgcccgcgggaaagcaggaaattgaggtggaacgcagagctcactacgggattttcggccaacactacgctaaacggaaacgcgggtggagaccatacagaagcgacagtttccgccacagaagcagaaggaaggacgagacgaagaaaatgccagaggactttcgatgaggagaaacaaaagccaggaataagcatagagttccacgtgagttgtctaaaccacgcacagatactgccgacttctgtgtaacagggacagacgccgtcagcttggaactggtagacctgcgtgacaaaagaaagttttcgttctaggaagaaagtcacggcgaaaagaagaatcacagtcgcgacacattcgcgtttagggtttacatgtcttggtcgtcgtggtgcgagcgagaggaacaaggcacgccgagtgtggagagacaaggaagttctttatgaaatctttgagcgttttccctttggtaaactctgtatatatcttgtgtatacatctttcattgagatggaaagcaccccagtcgatcgccgactcgttttccaagttctctctttctcacgagaaaagagactccgttttcgatgctaaaatcgtgccgctcagctagctgctcccccgtgagtcctcgctggtggaaacgcgagaacatgaggaggtgtgagaacgcaagagaggcgctgtgttcgacgacgggggtatcatatctcgtggcccacgtctgagtccagatttcacgttgtagcttccttaagtcgaaacaaagcaagactttcaactctcactcccttaaaactcggcgatcatcagccgaacaaccaggttacggacaggtagagtcagcagtcgctgctgccggaggtacaggcgacgcgttttgccaattctgcgacaggctcaacattctgggcaagcaaggcggccgtctctgtgaaggagtccgccatctgattctcaaacgaagtcaagatctacagtaaatttttctgagacttctgcgtcgaccacagtccagtgacaaaagccaacggagcagcccgacggctgcataggctgcggcgtctccttcaatgcgcgttgtggtgttttccagtgctctggggcgagaaaacgaaagcaaagactgcagccgatttcgttagagtgtcttgaatcgctgtgcctttttgagagttctgtggtggactatttcaacttctctcgggtattctgtgtctcctgcgtgacagttgcattcctgactctggatgggggggagtcggtaactccagaggaaaagtgccgcagtcccaccgctttttgtctttgttcggcggttcgaagtgggctttcatgtgaatataacgtgggctttctcttggtcagaagagcagtggaaaacctctactaaatgcctgcacctgccgacccgaggcgagctaggttgagtggtgcatttcaacgttccttcccggctggtttcgcgtattgaaaactctggagacaaagtaacagtcctgggcgcactgttgtacgtttaattagcgtccgttaagactttctcaaaaacgcggggattcccgtcatccatctctgccggcacta

SEQ ID NO: 3562 - DNA, 1706 bp, Toxoplasma gondii
  source 1..1706: mol_type = genomic DNA
ttatatgaatacctacggagtggaggaagcataccacatatacactgatacatgcatttatatatatgtatgtatatatgtatgtatatatgtatatatatgtatatatatgtatatatatgtatgcgcatatgtataaagaggcagggcagtgttttgtgtgtactttggatggttgttttttgtggacttcgttgtgtcggagagttggctcacctgtgcagccacccttccttgaagaattctggagcttgagaagctctcgcttgtgggctgatgtactcgcgagtcggcacagaggtctgcacaccgacgctgcgcctcagaggctgagaacctctctcctgttcagagaaggcgtgagaggcgggagaaaaggaggaagcgaacgcggcagagacgcgcggagcggcggtccccgacatcttgaagagacgggagaagcacagagagaaagaaagaccgagagaggaacagagacagacagaacagacggagacagcgacagaacagacggagacagcgacagaacagacggagacagcgacacaaacggaaagaagtcgagatggaggcacacagacagaaagggaaagaggcagaaaggaaaaggaagagcggcagctatggagacaggacgagaaacagaggaaaaggaagggggagcgaagacccagaagacagagtaacaccgagtgtttcaagctgaaagatgagagcaaaaggatcgacgacagcgtttctccccgttcttctcctgtcttgtctcctttttctccgttccctcttttcctgtcgccgagaggatctttccccgttctcgatctaggcgattcgcttttttcctccgtcctcttttctacgttcttccgtcgagcttcacgacgcgaacgctcctcgctgggccgccgtaattgcctgtcgcttgaaacgccggcctgtcgccatggcaggcgacgcacagacagggagcagaagtctctgcccggtctggaaaatggaggctgttgtcttcctccaggaactgaagagacagaagaaagagaaagaatagacaaaggcgatgaaagcactctgcttggccgcgacgccgtcgcatgcagagagccgggagacggtgatgtcctctgcatgcacgacggagagagccggtgcgcagtcgagtctcggagatcgacagaagcgaggaaacaagtggaccaaagaaaaagggagaaggaaggggagaagatccaggaggagacggaagaaacagaagagccgcttttcaccatcgacgcgcctctcagagactacctctgagtgacgagaaaacgcgagaagagagaggcggggaagaaagcaggacaaagtcgcccggagcgccggagacgaaggaaagagttgaaacgcggaaggcaaaagtgtgtcaaatggtcttgcatttctcactatctcaaatgccttgaagttgggtccactgccgggggaaagatgacaatcacttggtcgcacataccttctcgctcttcctcgtcagtgtctcttcgattctgtctctgcccccatctcacgttcctctctcctcttcgtctcctgtcctgtcgcgccttcgctgacgcaccttcgtcgtctctgtcttcttcctctgcttgttcttcctctgctcgctcttcctctgcttgttcttcctctgctcgtgaggtctacgcttcaagaactcacca

SEQ ID NO: 3563 - DNA, 2003 bp, Toxoplasma gondii
  source 1..2003: mol_type = genomic DNA
caaaaccagactttccactccagtgtggctgcgactgctacgctgatcctcctttctcctcgcgcttgcgccgcttctcacttctccccttgtctctcgccccgctctggacgccagcgcgaagagctccgccaccgggagagacgcgagtctctgcagtacctccgtcggctctcgttgcagctcgtcatccttgcacgctgcgctgcatgtgctaggcaactcgccctgcgtcgcagcggttgcgggagaggaggtcctctctgactcgccggggcctacgctgtctgagctgcaggcgggagcagagaaacgcctatggacagcgtagagaacagcgagacgaggcacccggcgaggcggcgaggcgaggagtggagaggaagccaagagagaacgaggcgaagcgacagccgattgaggagacgaagaaaggagaaaaggctgaaaagaagaagaacaagaagaagaagaagaaggcgcttgggaacgtggagaggagaaagaagacagaaacctcgaccgagaggaggaggggaagaaagagaaaaacgacggcgaggtagaaagaagacccgacggggggaacgttggccgcgagaaaatcggagaagttacagatactacaatggttgacagcgatgtctcgcgagactgcagctcgtaagggtggagaaaactggaagacaacgtgcaagcctcacgcagggaagcagcaggagccccggccctcatggtctgttgagtgtacgtacaccagaacgactccagcggccagttgggggcctcccttctgtctcttttcagcttgcattgattcacttttctccctctctctttctctccctctgtgcctcagcttagacctcctgtgttctccgctgccttcgctgtctctctcatccgagtccaggggcgttcttcttacgtgtggacttcatctactctcaaccttcctttacttttttcgcgcgagatgtttttttcgcgtcggcttccctctgacagactctcgctctctctctccgaccctgtcagacattgaggccctctcctcggcgtctccggacgcgaggcttttacttcctatcggaggcgagccgacacacaagtcaaaggaagctgtgaaaaaagtcgggggcatcaaggaaaggaaacgccccgagttgtttgacactttcgcgggctatttctgcgcgatgcgcgtgcatgcaccttgctttgcatgcatgcaaagaagcaccggctgaccgaggacacagaaacctgtagacactttgcccgcggagtgctccgacattcttcttcgcagttccattcaaagtggcacctcttgtcctcttttatttttcttccggacagtgctgcaagggagtttttttccctcgagagtgacaactcctttctcctgtcgcgcgtgccgggagttgaactggccattggctccttcggcgctccaagaagcagaaccgtcttcatctgtgatttcgcgagttcgttgagtcgtttctttcgttgattcatcgttttcttccacgctgtcttcgccgtcttctctgtctcgcgttgacggctctccccgctgctccgtaggtctgtcgctgcctcagctgttgtccggaagtgagagcttcgtttttccgcgtcttttggttttgtctcacttcgccttctctccggttttcttgacgtctcgttatccttttgtctccacatttttcccctcttgctatctgtttcttgcttccgcctgcttcgtctcctctcacctctgatactcacggcgccctccctttctactttcttgctcccgggcgttcctctcttgcctctgttcgtacctctctgtctgtccactccgtccctcccgtttgctctgattttctgtcgtccgtctgtcttcagtctctcccggtctgctgtctcgtggaagattcccttctcccttttcgaggttttctttcctcccctcaggggcttcttctccccgcttcggctcagca

SEQ ID NO: 3564 - DNA, 4416 bp, Toxoplasma gondii
  source 1..4416: mol_type = genomic DNA
acaatgtcgagcagcctcaacaaagtatcttcggagatgctccgaatatattctcgcacacgatagtctactactggggcaggaacctgatatcctgtgagcgtcactcctcataatgaaggactgtgggcggaaaagccatcagttgtcactgctcgcctcataatgagaaagatgcgacagaaaacctgtgccaatgcaaacccgccctcagaaaatcgtacaggagtgctatatgattagaacgcggagttttagcttctgtttttctaatgcccagttcgtgtataaaaataccgcgttcaggcagccttttcggatagaaaggtgccagaaaacaaggacaacgtgtagcactcggaggaacatctctcaaagataaaacggatcgttcttcgtcaacgatcaacgatcgacagaaaaagaaagtagttgtacagtagcactgccacatacggaagtggaaaggccgaaaattttcctgctgctgtttcccaagctataacgtcacaaagacagaggccgcagcaaagagacggaggccaacgaatagaatacagaatactcttacgagatgctccacagggtcagcagcaccaaacatagttgcagctctgaggcgctaaaagtcgcttcccctcactcgtcactgtggcttcacgttagtagccccttacgatcactgtgaagctgaaggggaaaaacctggaaagcaagttaatcctcttaagaccttatgtatcgcggttacccgtggttttttctagctcttttagtttttccctctcagatgctattcctttctgagcgtcaacttctctgtcgtttagcacggtagttgctgccggaaaaaagtatctgcggaaaaatgctttggccaactgcgaattcctcctactggacgattcaatccattgcttcgcatcagcatgagtccccggaacttgaagttctgaagccatcttccacatttgaccatgaggccctttttcgggatttctcattccgatggtttccttgtacttcttatacacgcttccgtgcttcttttgccactgaacctcctcctcttcgacatgtttcatttcatcttcaattgcagcgacaacatcacgaaacgggtctcgtaggctaccagcaactgaagattgtcctgaaccgtcagataaacgtgacgacagctggtcatcagagagcgctgccctccacgaggatgggtctttcatcgcgggttgcatttgctgctgtgacggctgtagttcatcagagatcgctactgccaacgaggatgaggccctcacttcgggtcgcatttgctgttgagtgtcgcccgagggaggaagcgacccctctaatggctgacgcttcttgcgtttgttctttcccagagacccaaatgcgtttttgatattattcaacttcttgatcctgcttttgcgctttcgtgagggagtttcatcgacagattcatccggaacgtgactccccagctccgtgatctgtgctcgtttttgttcagttcggtgttcaatgtcgcttgcacgatccaggtatgcctgatcaagggtaatctcgttctcaagctgcttcttcacttcgtctgtagcccgctgactggcggaaacctctcgcagcaccgatgctgttttcacgccgattgcaactaacccaataattacagcggctcctgcaacgtaacgtagcagctgcttcagcttctgtgtacgagcatctttgtttcctgccaagatgcctttcgaaaatgagagtctagaagatagatggacttctccactaactctaccgggactaggcaaaatgtcgtcctcatgtactccaatgtattcaggggtagttacagatccagtgtcgattccaccggcatatgctgcccaatcgtcggtacccatcgtcgaacgtaccggataacagaaatgggaaatcgttactctgggagaggcggggtgtatcttggagccgcacgatttatcatccggtcgttcatactacccagttggttttaccccgcagacgacagcaccgaaatccgctttaggttttcatgttgatcggaggcgattgccgtctcggatcagagttctacggtgaatgcgcgcagcgcagaaacagaaacaggccgtcagtggcagactagactcttcacagtgtacttgcgagactgcatcacgaagatgaattacacaaacaatggactaagcagtcaacaatcggtcagcgacgaagcactggaggtaaaacttttcgcaaactgagccatttttagtgcctcttcctcgagcatactgcccgccgcgtctcttatctctgtagtgccgtgtagaaggcccgtcggactatacgatgccttccatatagccgctggatccgcatgcgacgaaggctgacgtgttgtcctgtctgccctcaatttagcatttgcagattgtggcattcgcggttaagcacgtcgctcctcaaccgctgctctgtggggcatacattaatatccaaacgactatggaagtgcttctgtagttgaattaggggtccactgcgcgcgtccatttaagcgttgtgctcattctttctcttgcaagctcccgcagagctcgagacgttcactgttaggcagtaagaagtgtctcgctgtgtgattttttcagacaacgggacctcggctagctacgccctataacgctccctgcagtgctactgaacacaccagccgccaggaaagtgtatggcaggctggtgacggagcaagtacatgggatagagaacaaaaaatattgtcgggtttgcagttgaatccatcgtgcacaagcaaccatcatattctcgccaattccgtatttcggcatagagttatcaatttttatcgctgtttcgggttgccacatgctcgacggcgtgcagtggagcagaggtttcgccttcgcccagcgatattgtctactatttgttggtttcttcggactgttctcctcttctgctatcgaatcctgtcccaggcctgacgatgcccccgatgtcagaagttttaaacaggaagagtatccgaatcgtgtggccccgaaaaaacttcggtacagactacagggcttgagcgtggcgcagccggtgacattacggatacccgctgaggcattcggcattggattcgtttagctgggcgcgcaaggacagagtcgccttcgtgaaaacagattttttctttgcattaccgcagagactagtgtgtgcacgtgacttgggagcgtcgctgtaatactgcatttgtgggcagtagagtgctaggcagcatcccggaagttttcagacgtgtgctaccctcctcggatttttccctcacagaactgcgcttatatcgccaacacggtaaatgttctcttagggctggtctaacacagtacacgagcgttgcacaggccaaaacatacaactcagccctcggcggcggagcacaatttgggtagcggtgcgcttagggagtagctgcagctatccgagcagtctctttgaatacacagtgcattcgcttactcctccttgctgattttcacatgaacatgcaaatgtaacataaaagagtaggctgagttggagcagagggattacgaggagcagttgccggctggtgctatgagaagtcataccgttacagcaacgatggctgaacgtcccttgccgtctttctgtgagactcaacaatgctattgccgaggatggttggcggcagtcacaaacttcctaacattcgctgacaagtatttcttttctattcggtgggaaatgcgccatgcaggctttgacttctgactaagtggccagtacagtgtgttggctgtgcgtgctctcgcacgattgtactgcgagacgccagaagtgttctaaactgatactcgcagattggccggcgcgcgtgcagaatttcttccggtggcacctggcctgccgtgctaaaatcgttcaggtactggccgaggtagctaaccgacatgaaaaatccccccccaaaacagtagaacacaacctttttcctgcaaaatttcgagatgcatcggtaacagatacatccttccactgcatgtacagcaccgctcagcatgcgcactcttttttgtcgtcgttaggactacctctattccctcctaattgctggtgttgtgtccacaaataacggcgtgttcattgttgacatcaagcagtatttcgaccgtatgattcagctggtgaggcggtctttgtcgtcagttgcccgtgtttctgcgtcttaagcctccctgtttttccggacagagtccccgttgccagtgcgttccccgcacgtttccgtgcgcaaaatttgtgtgtgtctacggccaaacaactgcattagcttttgaggaaagctcacaagagaaaaagctgagaaaa

SEQ ID NO: 3565 - DNA, 2023 bp, Toxoplasma gondii
  source 1..2023: mol_type = genomic DNA
tttccactttttatacgcggaatttcacttttcatctcctaaatgaggtcgtaggctccggaatcagaaaaacacgctgttgaaaaaacagcttcacatgttgtatcgtaagaggttttttttccacttttcaggtttagggactattgttatgaatcgcggcgactaggatcgcagatggaaacacgagatgtagactacgttccatcattgtaggcgtgctagtagggagtctgttccaatatttgctgactgtcccttcttttccacatgtttctacgttcggttccgaacaatcagcgacaccgtgaccgctgccacgccgttctactcagcgaactttattggagccgttgcctgaagaacccgttttcataaagcaaaaatgcgtgcaagaaacaaccgtccatgtacgaggctacttcgccaacgaacagagaggaaggaatgtcacacaaacatttcgggtacagggtactcttgagaatacggtttttctgtaaacgccttcatgtacggaaagagaagctgcaatagcagtatcatggaagcggcagtattacatgggccttaatcgaaaattctggcttaagggtatgcgatacacccgatgtccagccttaggctcttattgttctgaccataccactgcttctcagcgggcggggccaaaacccatggcaatggactttgagatcaagtttcctctgtgtttctggaagccgtagggcatctgcttttgctaaacgaaggcagccgtagatagacggaaggtgtctcaatgaatgcggatcgggtgtgatctgttgaagtcacttggaggtacacagtctatcgccgctgttggatttgtgtttttccatcacacttgagacttcgacgtccctctggtacggctactagccatggtaaaccacacagaaagacatctcctgaaagccgcaactgcgtgaatgactcatgctccttacgagaaaatgtcttcgaaggtccaaaagccaccaaggattttccatgcatttctgttcgcggccgcctggtatgaacagccttgctagcggggccacgatcccatcgaatagtggaccaccgtcaaacccctgaaatagaactcgaaactcgtaccccctcgccggaaaagaaatgaagagctttggtgttgctctcgttgcaagcagccattgtttagaaaaggggctctgcctggggaaactggtcttgaccagttgtagtctgagcttttaacatgcatgcagccagcatcgatggaggcgcagctgcagaagacatgcacacgtcggatgagaaagaagcatctgcctacagaaaaggaattacgttggatttgactcgctttcggtcagcgtttctgctgctgctcttcgctttagattcagaagttccgccttcccgctgtaacaaaagcgttgttcttgctgaggtcttctttctcgccgcatcgcctgcgacggtggagcatcagcagatccatccacgcaaagttgcgttgagtatgaaggttccgtcttttcctttcgttcccgagcttggctttctcgcaccgactccactgtttcccactgccggtgtgcctgtgtcccttcctctccaaagttttttcggagctttcattacgcatcgttacaagggagctagtggaatttttttggtttgtgtctgcctctgggagtgacccccctgagagcaaggcagtctttcacgtgctacaggcgccgtcgattccaaagcctgcttgacattcactgagacgctgaaggctgtccctttttgaccagtagcagggggaatgacagtcagaacagggcggttgcccgaccgcctgggccgcggaaggcatgccgaaacagtctactgatattccgttcttgccagttaccacgcgcagcgagcggttagcagtaacaaccgtcctggagcctttagacagcgctacttctgcgccggataggcgccccggaaatccccgagtcgcgacatccccatctccgtccctgtctaagta

SEQ ID NO: 3566 - DNA, 3151 bp, Toxoplasma gondii
  source 1..3151: mol_type = genomic DNA
gaaggccgagaagacggcaggctgctttttccggtcgtttctccagacgttttgccggctgcgtcgtccctgtctcttgaagcctctgtgctcggcggacctgcttcatgtccctcctctttctttcgtgaatcgagccgaggaaacaaacaccggcaattgacaaagtagacaatctgctcggcatctccaaccagctccgcggatctacgcagcagtcgaagaagctcttgcgcattgcggtcttcttcgtctccgttttctcccctctgttctccttccttttcctccttttcttccttttcttccttttcttccttttcttccttgtcctccctttcccccgtctcttcgtctgctcgttctcgttctttcgtcgctgacaggcggagcaggcggtggtctccgaagagcccctctgccgcgttgttgaagactcttttgaaaaacgttttttcttctctcagcagctgtctagcggcgtcgagtgctggctcttcgtcgtcccttgatgtcggagggagctccgcgtcttctgagctccggagagccgcaaaaaagtgaagcaggcgatccaagtggtctcctcctagctccagcagatgcagcgcgacgtatcgcgtcgacgccgagaagagcagagacccggaagaagaaggcgaaggagaaatcgaagagggagacggggaggaaacagtgaatggaactgaaaactcggagcagaagaacaggaagtcctccaaagtgaagagaacgagagcacgcgcgacgtcgctgtccaagaaaggctgttcatctcgacaaacagacaacaaagcagaggcgggaggctcgagcgaagaggaagataaaggcggcgaagatgaagaagacggagaagaagaactgaagggatcaggttgagtgcagttgttctgcgatggttttctctcctcaggaagcacatcgctgcgtcggctgtcttcgttcgcggtctcttgtttccttcgcggctgtcctttttcttggaagtcctgttctctcaggaaaatgagacgcgcgttcgaaaaggaagcttgaaggaaggggaggaaagacgtgagctggaggaagcgagcgccgagacggtctcggcaaaacgcatgcagaaaagtgctcttccctgcattttggtcgcccacaatcaacaaactcaccatcgctgtctccccgcagtggtccaccaaatgcgaagacctcgctgatctctcgctccactcccctctctcttcttctccatcttctccttcttcttctctctgttctccttcttcttgttctccggcgtctgcctccacctgtgtgcctttcctgcagctcttgcctctcgctgtcctctccagatgtctgtggtgcgaggaagagacagtcgttcgaagaggactgtaaaagagcgacccctggggcaggcggcgacaggagaggtcgaaggcagaaggaaggaaaacagagtcgtcgatttcttcgtgccgccggtccaagtgtctgtacaccgcgcgctgctctaggccgaaggctgtttctcgaatctccaatccttcctcagctgtctctgcgtctccatcgcgcatttcgcgtcttttctctcctcttttccacatcccctcttcgtcctcgcttccgtccaaacacatagtgtatatatatatatatatttatttatttatgtatgtaaatgtatacacatatacatatatacatatgtataattatggataaatgtggaaaattatggataaatacatataaatatggataaatctggataaattgtgcataacgatgcaggcaacaaaagcatgtatggcgttatgtctgtctgtcgattcactacgtatctgttgacaccgtcttgtgtaggtcattttgtcgattgaccgatacacctccgcacaagtgcgcattttcacatagaaagtatccacaagtctccatagtgtgtatcctgttttgactgtatatgcatgtatgtctttctacgacccagaaagagcaggttgaggagagacaggagcttgtcgtgtgagaggtacggccatggcaagcaagcagaaggcagaaaagacggaggacagaacgtctcagaagaaagagagctgaatgcgcggtgaacggaagaacagaggaagactgtatctttctgaaacacaggactttttccacttttctcgcatctgcgcgagggcgcgcgaggccgcgcgagggcggcggacacaagcgcgcatgccttgtcgagaaaaaacgaacccgatacgaatgcagctctttttggagaaaagatttactttctctttctgctgctcttctagcgagaagcagcaatgcgatgagggggagacgagacatgtcggaggtcgacggaagaaaattggcgaaagcgatttcttcttcgacggtgtcggactgctttccctcctcatctctggaggaccacaaactgacgagtgggggatttagtaggaacttgtgaatttttctcccttttaaaacaaaactctctcctttttcttcataaggtttaaaacaaacctctcgcctttttcttcggaagaaaacaggcgagcgaggagaaacactgctgcggctttaacgtcgtggtcgtctcttcgttcttcttttcgtctgtgctcgccttcgttttccctcgttctttgcttctcgcttttcgtctccttgctccctcagttcctcttgtttcgctgcttcctcctttctgcttcgcattttatcctcgttgcaccccttcgcctctcctggagtgcagcggaaagctgtctctctctgtaaagccttcaatcctctttgacaaagtttcgttttctgcagtttcctcggctttgtactcgcagaagtctttctttcgtctcttttcttgcttggcctgcctcgcctgctgtcttgtggagaaaacgcagtcgtccttccacgaggtcttgctctcttctcccctctgtggtctccttcgttcttcttctctgctgcgtcttcttcttcttctccttttcctctcctcgtgtctgtctctgttctcggactgacggcagaagaacctcgaagaaaggcgcgagcgcttttcgcgcaagtcttctgcaacttgacgttgaacattcacagagatcccccgaaagcagga

SEQ ID NO: 3567 - DNA, 1965 bp, Toxoplasma gondii
  source 1..1965: mol_type = genomic DNA
ggccgcaagtgtaaaattctagtacattaggcatgtatcagcgatgcacgtctacacaatcgtatatatatatatatatatttgtgtgaatgtgtatatatatatgtgcgtatttatgtacaacaattatgcacgtttacgtttagacaaggtgtcgaaacgcagcagcttgacacgttggggttttcggcaaagcaagtagtttccattgtttactacatcgatcggaggcgatggaaggctctttttcagtagcttgacgaagtgtgctacagaaccaatgagagagaagttgctactttcgagcccccgcacacacgaagtgcacgaacgttcggaggctggcatcaacccaggaactgtttggattttttgaaatctgagttgaatttaactcgtctctttcgaacacatgccggactagcgagcaaaaggtactgctgtacgacctctaaaggttggaaggaagttcatctggtttcatcggataccttgaaaggatggaaacaaagcaaacgtggggaaagaacagaggaaaggaaaaaaggtaactggggcacaaatcctaacaacgctgacacagaacttctatagaatgatctacagttcggcaccagggtcgcggtccgtcacggcgattcagcagcccccgcaacaaaacactgataggaaattttttaagtcagaaaaagacaagaacgtggaacacagatctctaaagaggctacgaccacgaacagcttcattgaaactccgcgtacgagtgagaatgcaagtgcaccgaagcgggggttgtggcaagcaaagaaagacaagcgaatggtcaaagacgcagacgaaaacctaccattgtacgcgtgccaccttatgtgaggttgcacaaggtaagtctctaaaacgctgaacccatgaaccatgctcccctcgattacaatagagtcgggtgttcagaacggatctggcgcatgggcaaatcgggaagccggattgctttctgtgaatcacccttctgcgcagtctcgaaagaccaggcgtaacgctgcttctgttttccacagcaattcacgaaagaatgcgtccgctttgagaccagacacatcctccacaaaggaacacccggcatgtctcctccgtcccaaagcttttttatgctccccgctctctcttctcgacagaatcgacgtggtcaatggtggagacggagccaccggtcaaagtgtgagacgatccccgaatgttggtactgtgaagtgttgccacccattgtgtacaggaacagaagcgctacatccactagagaagctaccttcttcaaggtaacaccaaacttacgcatttgtgtggacagcttaacgctacaaggagcgccagtgcagacaaagtgaggagtctatgaacagtggcaggacgtgtggagcgtttcttccaggagaaatccggctctcctgaacagtgcacgaacaagatctgttttatctaagcttgttgtgtgtgggcacctaagcaactcttggtccacattaacactgactgcagtgacatgtgcaacctcaattgaagttcttgctgggccacgttccgcttctctctctggagagtcttgctttctgttaaccccggagggtcgaaagggtgcaccgctcttcccgggagtgcaagaggaaggcgacacttgaggaaggcctgagcaagctcagaaacctaacctccccaaacaaaaattgatgtgacataattgggtccagttggacccatatcagttgtcacactgataagaacagatactacacttgatcatagccaaaaggccgagaaggtatgaccaacccttgttggcggagtcacccaccccgagttcgaatggagcggcgcatgggtgtggcagagacaaaacggcgtccagcttttgtgtgctgccacgcgacaagatgcaccgctctcctccgttcgaaccccacctcaaga

SEQ ID NO: 3568 - DNA, 2092 bp, Toxoplasma gondii
  source 1..2092: mol_type = genomic DNA
atgaatgccggtacgatattggaatccggcacttttacctgtttttagcagtccagtggagaggtgatatacagcaatcataaataactcggttgcctgtaacttaaaactggagtcatattcagtatcctaagtactacagtgtctctgtttattcgatttgagttgtagcaatgtgaacacatgagattatcgaatgtaatggtatgctactaaatgtatggggtcaagctgtaaacaaaggcctctttaacttaaactgacatcccaagcaggtataaaccgtctaaagattgctatttcacaagcaggtgatatgcatctgtcatggtagattaacaactctcttacaccttactaccagactagttctgtggatatacaacaccaacaatgttaacgagtacagtttccgggcaaacatgaatacggataggacaccgaaatccaacagcacgtgcatgaggatactatcacagagaggcagccaacagcccactgaggagctgcaccggaaatttcgaaggtttcggccattagagtttttggcggtttctttccaccgaccatcctcgaccacgttccatgctcatggtcgatgttcatttgcagagtatacacctaatgctcatgagcgtctttccacatagatcttgtgattggatcagcggagaaaatagaaagacgcgcagccaccgctgaacagtagaggagctccgtggtgtcaagctaaagacgttcagtctgcgcagcgtgttgttagcctgacagtcgtggtcggtcacagcgtaaaaacgaagcactctacgaggagcactggtgacagcgcgtgtctatctctgttgaatcccttatgaatgtattatgaacattcgaggcatactacaacccaagagcatttgctcattgtcttgccaaagaataacttaacaagacagatgcgttcttcaattcactgaatcacttgcatgcacctgcgtaccctgtggcttcctgcggtgtgtccgcggctacatgccgtgcgcatactgaagcatcagattgagagttatgttaaaaaaacattctattctcagtcccatcaccttccgatggcacctgaatctctcaaccagccttgcgcagtgcagatgtgcatagcttttcgtcgtgtgtgaatgcccggcaccccgttgtaagtgaaggcccctgacgagcctttgaacttacgcgggagtgttctttccggactgccaacacccccaggtatcgctatacgagaatggaattcgcgcatctgaacgtcttcctgagatacagaactgcgctcctcaaattggatagacatagacatcatcatagcaccttcctgacaaggccagtctcggatgaaagaaccgaggcgaggcgacacaccgtttttcctgtgttcggcaacttcaagaggaaccgaggaacatgtcacagcgaacgctttgagcattccttctgtgacgatatcggctcacggtgtcagcagcacatgagcgccgcggcttgagaatcgcagcgttcacgcgtggctgctttctctcagctcccagcctagtaaacctgacaagtgccaggtggtatttcgttgcaattacagttgacttttccgcttttaccttaattgaagcaaagtgtgacatgagtcgtcctttatttaggggttgtgcggttctccagggagtcaaaaacattgcctgaggatgttcttggccgtcggcggtgtacttcgctctttttgagcgcattttcggagtctctcgtgcggacagccgcgacgctttccaagtgagaaactggcgatttcttgaatcacaataaaccaacttgccgaaagccttctatttctctctctttctgtttccgtaccacgttccattcgaccttcgtttgccgttttaggtcgcgaggtctttctgtcttgcacggtcgccgcccgcctagctcggcgtccgcgccgtctcctgccggttgtccgagcggcggtctgcacacctttgttcctgggatttctgtgcagccgtttccgccgatgactttcctacgttcccagcgaactttcttccgccgtttatcatttcaa

SEQ ID NO: 3569 - DNA, 1820 bp, Toxoplasma gondii
  source 1..1820: mol_type = genomic DNA
gaccttttgaacgccagctgtcgaaacgcgaccttcactttccctgtctcctctccgacgtttttcttttttccccgcgaacaaggaggggaagttgcttttcgacacaaagatatcctctatcctcgaatgagaagcggccttcgacaaagagacgacgtcggagatttcgcgtgagatctgatcgcgaagacctgcacacgcagtggcccgttgcgccgcttcaccgaaaaaacttcgcaggcgaatctcctgagagttccgcgacgcaaattccagatttgctccggtgcagcttcgaaaacttgtccgcttctttagttcccaaacactaagtgaaaagaaacgaaaatttgcgaaaatatcaaaggcgcgtcagctgcgtctgttcattcggacccgtcctctgattttcttacaccggcctcagtccaccgcgagacttgtcgattttgaggtgaacaaccacaaaaagacattccttgagatcactcatatatatatttatatttatatatttatttatataattatacatttatgtatatggacttctgcatgtggcttctacatacatatacttgttgtttacacgtgtgtataggatatacattagagaaaagtatagcatatacatgagaaattgaagtcaataatttatttgtatctttttatggagatgtaggattctgtcttcttggagtggtcggctcacacctaactaccattacctctttctctctctctacatgtttatatatatatatatatatatatatgtctatctatgtcgactcgtttagatgccttcacaaatgttgcatattgaacatcaccggaaatgtttacatcttcagaaacgagtaagtataggcacatgcggtgcacagccaatatggagggcaatgtctgtaccttttacactcttgtggcgaggccatgatgcgagaggaagaacggctttctctgcttctcttttgtgcagttttctcaggacttctttgcctccttcgcacacccgtctgctggggaaaatcggaatttcaccgttgaagtgctttcagagactaaggtggttgtttttcagaatctgcatccctttttcgcacggaagttttctcgccagcgctgcatgcatgcgaaaagggaactcgctggatgagcaaggtaggggcgcccgtttgtagccagaagaagaccgatttgcctctgatctttccaacttttacgccgagtcctcgacttgtcttgtttgatttccctcgctcctgtctctctgccgcagagccttttcggtgggggaacggcgtttctcttccttttgcggacgcgcgtcatccggcagttcggagaacagaggatttctcgcgtttttcctgcctttgcttcgtctccccctccactgttctcttctccccagcgcggcacttgttctccagacgtctgtctctgtcgtttgccggattgtttctctgttgttttacctcggcgttcccgcccggccctctccgcgcgctgccttttcgtcgtctcgaaaactgtaaacttccgcgcggcgggggtcggcacagattcgccatccctttttgccgtcccctctctggccgtcgtcttcctcttgcgttcttccctcttctcgcctcttcttcactctccgctctacgtcgcaggactcctctttccttcctcgttcctctcccccgtctcccgctggccgcgccgccttctccctgcctctccctgttcttctccgtccgtttccggtctccgattcgttgtttcttcgcgttcgtccttgcttgccgcccgtctctccgaga

SEQ ID NO: 3570 - DNA, 2077 bp, Toxoplasma gondii
  source 1..2077: mol_type = genomic DNA
cggtgtttttcttctacagaaagttccagaaacgtacaagagaaccgaaggagatacgtcgcttggacacacgaggtaaacggcagatttacccaccacgggatctttctctcgagcggctgcgctttctggcgaggagacaaacatgcgtgctgttcgccactgcttcacacgcaaaactgacgttgacctgccgcagcgctggaaataaaccaagttagctgcaccaccccttccacaaaaatgtgtccacagtaatacatcgtgacattcataagcgtacatacacatatacatatatatatatatacatacatacatatcatggcgaatgaggatgtgcacatgcgacccttgatgtaagttgagagacttttatctgaggtggaacgattcgtctcgtgcaacttaagacattttgtgttccagaacttacgcacgcattgcttccctttcccatcttcttgggcgcgttgcaggagaatcgaaaaagttaccgccctgacgtattcctgtcgtgtagcgcacagcatgcacgcattaacaacgcttgcagtagatgctgaaaagccgagagaaaaggcttggtgtcgaaatttggaacagccgcgttcgacaagcgtaaccaaggagttcacacacaagaaacaggctgtaataagtgtggctgaatctctgaccgggtcagagaaacagggcggaggccgacgaaagtcgcgcttctcgcgggctggggcaaggcagaaatggagagaaacagcattcacgctagactagatggagttccacgcaaaatgaggagaggaggaaggacgaaaaaaacaaaagatgccgctgtgaatgggaagatgaaatcgagttgcagcacaacgcgagggcgatgccaaggggatcctggggcacccgctcctgtcaagttgcctctcccgcttaacctgaactccaccaagtgtggagacgacaaacggatctcggctcggttgcaagcggtgtgtgtctgcgaatcttgttgcaaaaagatccgagagaaaacagaaaacgtcttttccggccgcggcttttattcggagaggctgccgacgctgcatgcacagtggggtcgcccacttttctccgtgctctggttcgcagagaggctggtgagcgaaagaagagaggcgcggaaaaaggcggaggaaaagtggaattgagagccgaacaggccagcgattgtgtgcttggaggagaggttgatgatggctagcaaatggttcgtctttctggttggagagcgaaggaccgagagaaacggagatcgatcttgcatgaagacctgcatgcgttacacaggggaggcgtttgcgccacgctgaagaaaatcctacgccgtttctgtgggtgggagaagcggcgacgcttttgcgagaaagtgaaagacagaggagcagagagatccgacagaaaggaaaaaggcagcctggaaaaacacggttttctgccctgtcttgtttctctttttcttctctcacttgagaaagtggaacgaagcttcctgttttcttaaaagccttggccacccggtctcgccacgcacttcgccgtttgaaacagtctaaggaacttggttctgaagtcggttcctcttctcctttcccagcctttttcagactgagattgcactccatcgtcgcctctttcttcgacactctgcgtagaaacatttcctctctttccgcctcctgctgtctgcatgttctcttccgttttctatgctgcaaagaggcgcggagagcgaaggccccagtagcttgcctgcggtttcttgtccaccccccattcccttttcttattagaaaactgcgtggtttttcagggcgcctgacgctcttctcggcgccaggcccggttcccctcacagtgtctccatccaacgagtgcaacgaagagaacccccattcgctttctctctgttctctctctctgtcgcactggccttcactttccttccccgttatctccgcgagctcgacgcatcgccaagcggctctcctctccctctcctctgtcttcaattcactcttcatcttccctgccacta

SEQ ID NO: 3571 - DNA, 4705 bp, Toxoplasma gondii
  source 1..4705: mol_type = genomic DNA
cacgatacaccgaagagaacacatcacaaatcgcttgaagtcagtcttgttctgagatctactctactgcgatgtggaacactgcaaatacccatgctcttatgagcaagcctcagcgggacaccgagaattttgtgctctcctaaaatcgggacttttttcgtcgtttacataaatctagtcgcacttttcgagtgcccagagaggttctgaagtcagtgtccctggagacaccataccgctacagattccaaattccacagaagcccctaaatcgtcaatttcgcagtccacttacagccttgttttggaagttctgcatcagcaaattgttctgttgagcaagagcggtgacgcccaaaccggcaagacctgcaaaagagttcacacggaacagcaccggcactgtgagaaaccttctgttgtgtccacaacggacgcttggtatctacgcacggcgcgaacaagcatcggacacttagcgtgctcgtacgaacgaacgacggagacagtcgttgaacaacgacactcaagacctcagtcagtgacgcacgaacagtcggcctgatggcttacctgtcccagccaagccaggtattgttggcgtcgctccttcctccgcgccaacatcccatcctgtccgcttcttccgctttctctgaacacgcaagacacacaacagtcacgctggtcgtgactttagggttcagtcgcgcctcgcctgaaggtatgtttacgcatttacgccagtacataagctggttgtgttgccttttggaagaaagcttaagtgctccggatgtccttcaggcgtgacagactcccgcacgacgaccgaacagcgccagtccatcgcacccgccgtcgccctgaagcccgcagtccccgcttcgaaatctggatttctgcacaaaatccatcttggcatcgttgacgagatgactgtcaaactcgcgctgatgtggcaggagagaaatactctcgaattccccgccaatgcaccacgggcagcggccgatggggactgacgggcaacggaagccggtactcccgtggagctgatcggaggtaaaactgacctcttcgcgggtgtcatcccgtcgagggcttctactcctgctacgagacctgcgatctggcattttgaaaaatctccaatgaagatcgggggaactgatgtgaaccgaccgctggaagttcgcgatactgacgtgatcgggtgggttgtccggaaagggtaccgcgagtcacagcgtttcgggtgtacagacactggattcagtggctgccgtcacgcgtcggaatacccaaacaacagtgtttctcaatggtgcgccagacgtgctgtgaatccaatttctgcggttcctgtcgcgaaaccaccgcagacactgttgaagcaagtgcaagcagagatgagaaagagacgccgacttcgaggatgtcgacgggaaacaaattcgacaaaaaccggacttgacagacgaggctgcagagaatcgaagaagactgcaacaacagtcgcaggcgagacgcggtaaatggctgaacaatccagtatgaatgttttgcccggagaaaagcaatcgcactatgtggtgggtgacacccgcagggaaaagtaccacgaccgagcggcgcgacgcccatgcgcacacaatctgtaaaaatgcgagtagatgacataaagtgggcaaagtaaccagcttctgtggagttggtacgcaagtcttccacagttcgtgccgttccagttcctgaaattccaacaggctaccaaactcgtgggcgagcacctttaggcggatcttcccgtggggcgccggagggttgcgcagtgggggaagcctgctcttcgtttcgagagagggaaacatctgggtgaagctgtggaatcaaccgtgcacagtcttggtaaatttacggcttggagtagaatatgcgtcgcagtgtggcggccctcaagatgaggagaggaaaagcacggattctacttatctcaccgccgtagcttcattcggactgttaaaaacggtggttgcaccccaggaacccttgttgttttggacgggttttagccatgatatacactcgaaggtcgcgaaagccgacagtgcgaatctttgttacaacctcgcggatgtccatgtgccagtccgagcagcgaggtctggaccacgttccattaggatgggggtcgtttgtgagacacgttagatcaagggcgttaacttgagctcagctgccgcgtttgaggacagaccatggcttcctgtttgctcatcacagtcgtgtatgaagagcgttaggaactccggcctgaaggtatttccacgaagaagttgttccagtccagttctagcgactcactcctacaggaaagcggctcggaacacgcagtaagcagggtggagcagacagcgagattttcgggcttcctattccactttccgctaattcgttgcaacggaagggctctagggaaaacggactgtacttggatatgaaagactctctcgatatagatcgcggggcagagctgcttgtaacggaaacacccggtgcaggcactcagattaaaacgctcgactagcgcccgtgaatggcttacgtccaacgttttgccgaggaacgagcccacgtgagcaaggggcgacgacgaaagatgcacaaatgcaatcttttttgttttgccccggtgggagagggctctcgatataaaggccggtggcgaatgatgcagtggcaccgttccgtcggcacaagcactgagaaccagatgattttgttgggttgtgttcaaggaatcgctgacaccagtgatctgttccgcctcgatgcgtatcaaaacggaaagttaacagtcacagcgtttcattaaaatgcttcgaaggaacgccgatacgttagtggaaacgatctttacaaagctgcaccccaccgaaatcgtcccgtcatagaatatgcacatggtccagtacagactagactacggcatctgctgggtagttaaagttattatttttgccaggaagaccacaaagctgggaatccatcaagtgagaaagcaggcagcacggacaatggagcccgttaggtgagttcatacgaatgaggctgcacctgttcgaaagctgtgtacggtgtgttgtatgcgacgctttttgttcaccgctgtgtggcagatgcctgagggcgaatgcaggaagattccgcacgctgataaggcgtctatttagggttcttgagattcccttttgcgtggcaagcttaactgctagacggttttcccctccgcgtaggtaagatcaaacgttaggttcccgatcttcagaaggttaaaagggttggatgtcaatgtcctaccgccgtacgcagacggcattaagaacatgaagatcttcgctagaccaagctaggctcactgtctccgttaactgtgagaacgaaacgcagtggggcagccaataaacaaagtcatacattgtatgagacttcgtgcgttacccctgcggatcgctggatcaaccccgcgtatcgggcgtcggacaaccgaaggagctcacactctgtatgtcgagattccatctttttctgtctcttccactaattcgcggaggtgtcgcaaatgcagaggttacgttgtgtccagacaaaccctctggaggtgccgggctgctccattcccaagagcgactgttctgttcgcgcgacgagtttgctggacctcttgtgtggccttcgagctggatccgcatgttatcagtgactgcctaacctccaaagaaccctctcaccgtacatttctcactctagacgcccgtctgttggcagctcggcattcgcggtaaccgtcgcagttctgtgaacggaccagaaaagaacatcgcaagaactcgagaaggcactcgcgcccccgagacgaactggtcgcgcaggtagggatgtgcggcaccgttttggcccgtcagtcccgcagcgggagtttttcaagttcaatgcggaatagaggaaaccctgtatttcatgaacgacaagtgcttctgtgaaacacatgcgggaccgttattttcactaaaaaagtgtgaatgcgcgcagaagcgaactgttggcattcctgccagctgctgaagggcccgcggcacacagtccgagttttgaccggagagtctggttcagggggctgcgcgtgcgcatcttcacttgcgtgtaagtctttttcgtttccgatcttttcggtctacaatttctctgttcttccgtttgtccagcgcgatttcccggtgtatctccaagcggctttcacgttataggcgcagtgtcgcgctgggacgccgcaaatcactggggcgtcgtatcgctgtcccggcacatcgcgaaaacgctctgaacttgtttgcgaactttcccttttccagtacccctgccctcttcttcgtttctgcgccactcatgtggctcgggcatacgtctgttctctggcgtctgggtcgccgtcgcgcccatcccgaagtccagcgtcgtttcctcgctctgtaggaacttgctccggaaattcgatgctgggcagagccgtctagtgagttctctgccttttagagtgtctctgctgcgcgtgatcttgcgtcttttcttgcccgccactattttttcttccccggattcgtggagggcggggggggggacagggaagagcgttccgcga

SEQ ID NO: 3572 - DNA, 1105 bp, Toxoplasma gondii
  source 1..1105: mol_type = genomic DNA
ctgccggcggatggattgctttgatatcttagaggaaccatctgaggtttgtttggttcattagaatcttttgacctgccggatattctgtcattccgttggcagtgaactgtggaaatatctttgacgaagtcgcgagaatgctgattctactgcgatcggcgtagggatccctaaggatgtgtaatgctgtcagtgtgttaactgttactagtgtgactcacgtcccaggtgcacgggccgctgatcctcgcaagcgagactgttgtggttgagcgtcttctggagtcactggagacgggttggtcagtcccatgcctgaaaggagtcaggttgtaaagtgatgactcgcaacattctggaactcctagaggcgggtgcttctcttcttgcagtggttggtcagtaccgctagaagagaaatctctcacagtctgtagctgaactgccgattgttaggttgttcttcacagggcacgtaacgtgcgttcaacaaagaggcgttgcccgtacagagcgcatcagcgataattcgagcgttaccgtgatgcagagagtggcttttacttgtgtgtagaagacaagcacgatgcggacgaagctgctgaattcggcgggaggcttgcctctctaatgcgagaattacacatctcctgtgcttttcggaaaagacaacacaaatctgaagtctagcagcgagcggatcgggtaaatggctcacttcacagaattgtgcattcagatggtctcatcccttttccacaagagttcgctatacgcattcgggcgaagcctcaaagtgtttctcgtaggacgccgtcgtagagagaccgtcttctccaagaagaaccctgtgtcctttcgatgtggatttacccaatgccggaggaaatgcggctctggaagagctgcacgagttccaaatcacaaatggcggtcctgcacacgtcgcttctggaaatcagtttcctcgtattctcgcaccttccgggggtgatgggtccaagcactgacactcagtcgaccgaggccatcgatccctgttagagatgacgggcatctgtgctgcaaaggaaatccgtttctccaggaaaaacaccattaa

SEQ ID NO: 3573 - DNA, 2206 bp, Toxoplasma gondii
  source 1..2206: mol_type = genomic DNA
caaagcttacctctttggtgaggagcgcgagaagcgcaagactctcgaaggagatccaacgcctctttccagcaggcgcacccgccccagtcgacgcggacagcgcaggcagcgagaaggagaatccgaatgtatgtcctcctgcgacgactgcggtcgacgaggcggcggctaggcgcagaagatcctgttgccgcttcaagtgcagcatcttgaggtagcgaagcaggacagacgcgacaaagaagacgaagaaggtgaggagcaggagaaagaagaaagatggaggacagacgaaggggacgagaaagacgagaagcgaagacgaagacgaccccgtcgtcaacgcagcgcccgccgcctctgccgcctgggcagctgccgagacagcagccgccggcaagctctccatccccgcctgcggaaaaacagagggggagacccagaagaggggaaggaaagagacagatcccccgcagaagacaggggaagagaacacggaaggggcacacactgaagaaagccgagacagccaggatggaagcctgaatcatgggcacaagctaaagccccgaaccatccagttgtctcttcagaaaaaggggaaagagaaaagcgctacctctctgaaaagaagaaggagatgcactatctcagcgcgaaaaagagaagagagagcctctccgaaaaaaagagaaaagaaagatgcaccaccaactcccccgaggaaaaatcaccgtccctctaagaggcagaagagcgtcctcggcgtctgccaggctggcacacatgagaccgggcgacgcaaacctggcagcgaggtgtatgtacacccgaaggggacggaaccattgtcgacgcgggggcgagagaggagaccgcagacgagagcccagggcgccgggaagaaacgaggaacagagacgcagagcagaagtgtgaaaagggagttggagaagaaagaggaacggggagacagagaaccacctggaggcaaaaggagacgtgacgaggaaagaggaacggagaagccgcagagaaggaaagaaacaccgcaaaagaggaaagaaccgccgcagagaaggaaagaaccgccgcagagaaggaaagaaaagccgcagagaaggaaagaaacgccgcagagggactgctctccgttgacgtccgcaaaaagaagagcctggcgatgggagcagcttgcagttccgctcggcaagacagcgtttagcaggtggaaaaagaaaaatccacgaggaaacagagacgcgagaaaagccggcggtgttcgggcacgctgaaggaattctgtcagagaaaggcgatttacgagacaaggacgagtccaaaaagcagacgcagttcgttcatgttctcctcgcgagtgacaccgaaaacagggaaaagggcatttgcgttttctacgaatgggtgactccaggctgtttctcttcctctcacacctgcatgtcgaaaagaaaaccttgcatgtattgttccgtgcactctgtgacggagtcggtagaaactcgactggcgaaaataacaacggaaagggagtctcttttctcgcttcccgtttctcttccttcgtttcgcctgttcagcgccctttttctctcgcagagacgcacgctctgaggtgtacagacaccgagcgcatctcgccacgcgccgaaaaagcagtcgtcttttttgtcgcgcttcgggaggaaagacgctgggggagaaggcggatttcgctccgacgcatgactgtctttgtctcggtggtgcggttccttctccgtgaaacttctcttcttctgtctggcggcgagagagaggcgttgtttctcttcagggccgcagaggcggctcgccttcgcagcggatggtcctctcgcagttttcccccttcgtccgtcacacttgcatgcacgaacttccatttgaaagaaaacgccgcgaaggcgagctccacgcagaaaaaaccatcaagagcagtggcgaccgcctttcgcgagacgaacgcggcgtcctggacttccgtcctctctctctgcgaaagcggaagcaggaagaaagacactcgaagaagttgtctcccctgccgaggcgacctcgctctcgcccacacgcgcgcaggggtgtacagacgcctgctgggagggcctcccactggaacctgaagaagaaggcctcgaacctcctcgcctgcacaccacca

SEQ ID NO: 3574 - DNA, 426 bp, Toxoplasma gondii
  source 1..426: mol_type = genomic DNA
agaaggcacagaagacaagaaagacagagatggtaaagagcagaaggaggcgagaaggacaaacgcgcgagaaggcaatgacaagagggaggagacaaatccaataggatcgaaagaacagagggacgagggggagaggacgaaccagcagaggcaagggaacagaatgagaagggagagaggaaggaagcctcgagagagaaagaaggaagacagagagaagtgacccgacaacagaagtcggcgaggtcgatcctgccaaggcggcgcggaggcgaccttgaagaccttcatcttgctgcgaactctagagaagaaacagaaacaacgctccgcgacgcgagagaaacagagaggggagagaacagagaagaaggaaggaaaaaggtggagggtgacgtcagagggaaaatgaatgtagacaca

SEQ ID NO: 3575 - DNA, 1762 bp, Toxoplasma gondii
  source 1..1762: mol_type = genomic DNA
ctacactcttttgtccggcacttctcatctcgaatatcctggtagaagtcgaaagaaagaatgattttgtcgaatggctcgacactcggagtgcggcctgctccttcgacaacacggaggcgctgcaagtaatttgcattatgcagcaccttccccgatttgctgtgggcataccgcgtttggcgatcaaaaggttgtggcctgtggtgaaaagtcttttttaaagatctttcagagcccggtgccggacacccaagttcgccgtctgtcgcagcagccgttgtgttgccgtcgacactgcttacagccgaaattgtttcgatacccatctttgacaaaatcaggtgtacgtacagctgagacgagactctcgaactaggcaagtaggcggctgaaaagtctcggcgctacatgatatgagacacctccgctacaaggcgccctttcatgcacgtaagatagtatctgactagtctccacatactaaagctgccagaataagcgggtgactggcgacatctttcttgacagttcagccaaggtgtcacgtcaattaatttcgcgtcacaggccttgtaacggacaggggagagtagacgaccaaagaagcaaacgaacaaggtaagtacgacggcagaaataaaggcagtcactgcggggttgttatgtcttttggcggaagacccctaactggaggagcacagttgacagagggtatctggaacggcgactagagacgcaaagtcgattgacaagcaaagcaagtggggtctacgatagactccctccaggaaacgccgctcgagagtatgctaagcactgttgcgtttctttctattcaaaccaatatctcagtcgaagtcgagttgcagaacatgtgacgaagcagcgccagatgaggaaaccggggtcacggtctgctgcgtcgtttctctcacgaaatggcgcaaaggaagaggagcgtagtgtaagaaaacggcattattagacgcgaacaaaagtgatgactcaaatgtgctacagactgactcaaacgaaggcgagaccagatgagctgatctggaaaaattcacaccctaacatcattgaatatattggatctcgagttgaagcgagcctgcatgcgctcctccgtagtgccgtttatgcagaaccgaggacccacaggtatttatgcaagtcatattgtctctttaggaatgatatacggagttcttctctgtcacagcacgtaaaaaatgaggcagaatatctcaaccagtggcctgtttgcaatttctgctgcgacgactggcacatgcgtttgcatgcacccacagagaatcgacgtacagaggacccggccgaacccgtccttgcgtttggcgctgaaaatccccgtgctgctcctttcctcaaaaggacacgaaagaactttttttcacaggccagtcagttgcacttgcgctttcctgtgtcttctgtccacgatggcgggtttttttgacgtgtgagtttccgcggtgcagaccgatgtcggccggtagctgctgcatgtgcagaagtttctaggtttccttctggaagttgagggcactttcaacctctatacctcgctttgtcgtggagcacactacgcattggttcttgaatgccttggaagatgtgtgctgcatttctgtggggtcataccaagaccgaatatccaagtcgtatatcaacgctttcgttgaaaggcgggaataagcagacacccgaatgaatcacgtataatgagaagaaa

SEQ ID NO: 3576 - DNA, 1880 bp, Toxoplasma gondii
  source 1..1880: mol_type = genomic DNA
gtcttcaatgagaagggtggtacgaaggaggctgatgagatgatcgacttcccagccttgtcttccttccggcttaaatacggctgtgagtctgtccggcatctcgtctgcttcgttgccctgtcctccacttcgaggcagtcctcgttcctcgcttcttttttccttatcacccttttcatctggtttctctccctccttttcgtccctacgagcagtatcttcctcttcctccgcgcctccgccgccttctctcccatctgtgtcaaccactattcgttctccccccgagtgcgctctttctggggaacggagcgtccttctgcaagagaggcagtcgtattttctggtggacgtctgctggtgtgtaggcgcggggaagtattcagatgatgccttcgatgcggcgaccagagagacctctcccccgctgaattctttctcattctccccattttgcacaaacgttttcccctccacgtatctaccgagtcgcttctcgcgctcagacttttctggatcagcgaggaaaggcgcgcgccggtacaaggcggggctcttgggctctctgtggctgccgagcggaagactgccaggcagcggtgtcgcgacctcagggaaataaaacagttctgggagattccatcggtacgcaaagcgcagacagtacaaacccagcgtacatacagggactcctagagcatcttggagctgctcttggacgcggcgggtcctcgcagtcgggcgtaggagtttttcttggtcttgccagcaggatttgaccctgtccagtctggatgtttcatttctgttttccgcatcttggccttccacaccatgctcctgttcagcgtgttccctttcaacttgagagttgagtcttgcctctccgggacccgcttcactccctccgtttccgctgcctgctgttttttctcctgcctcgcggtcctggacaggtggtttctggcctgcatgcatagggctgtctgtttttggcgagcgggttgcaagctaaaggtggaagccgccgaagaaacgaccaaccagcagacagtgaggaagtcgcctttctcgcgcgcttcacggggcttctggccagacacttcatagctccggaggacagggcgttgagtggcagtgcgggtaaaacgcatgaaggacaaagaatttgcgaggcgcccacttgtctcatattcttcgtgaatttccctggtcgaactgtcgcattttgactcgagggatgggccggagtacagagctcggacaactcgagcatgcgcgctctgattcgaatcgcggagaaatcgcagaaaacgcaaactcaaattcccctgaggcgcttcgcttgttcgctgcttcttcaaaatgtggagaaaaaccgcggtgggcggcaacacactcgcacgtcgctggcgaaaaatctgctggcgtcgtccgttgccctggagctcagacgagcgctcttggcaccggtgaaaacgcagtgtccgtttgaagcgggaaccggagagaagaaacgaggaaaaatccagaaaacgaccgatggcaaatggaaaaaagagtccggtgaaacggacaggaaggaacggcggcctgttctggagggtgtgtcttgcggtaaccccattcatggcattacgcagctgccggagcgcgcggcccccccatctcatattctgcttcccgttggtaacctcgctctcctacggacgggtccacatctgaaagcttgccgtcgtgtgctcaatgtgttgcttcgacaagtgtgaagacagccgaagatgacggtaaaagaattcagtcctctcgcgagcttgaccgagaatggtccctctcgcgcccaccatgcccggaagtcgccgggcagccaggccaga

SEQ ID NO: 3577 - DNA, 2900 bp, Toxoplasma gondii
  source 1..2900: mol_type = genomic DNA
acagttgactgaaggagtgacttcacctcgcagtttttcactgaacctcgaattcgaagcctacagaacgccatgcagggactggggcggtcctctttgggtcggcagtgctgtctctcgagacgggcaggccgcgccactcgcaagggcggcttcgatccacactgaagacgcgcttcgatccacactgaagacgcgcttcgatccacactgaagacgcgcttcgatccacactgaagacgggctcgcgacgcagacggcaaacgagaagcagttacctcgaagagagcctggcctctgaactgcggggtcgcaggaaccagacgagcagccgagaggaacggcgacacttacagaatggaggtttgcttctttgcggggacggccgcagccttcttcatggtgatggcggggcggagaggagacaagcgacgcgaagaagaagaggaagaagaagaaggggattcgcagagccgcacagcgggtgcagattgggaggaggtgtggaggggagcggggaagggcgagaggaggaaggacggacgtcgaggagccagaagagcgctggacggcaaggaggcaggcgtcgacgcgaagggaacagcgcgagaagaaacgcggccgacgagaggattcgctgggacttcgaaagcaggaacggggagtgcagcagccgggagagggggagaagtcaacaggacaacgacggacgagaagaggaagaaatagagccggcggcggattgacgccgtcgttcttcttcggcgacgcagttgtttctcggaaggctgcaagaaagtccgaaagaggccgggcaagccgtaggcgacccggagactgtcgtggagactggagagacgagagggaggaagtgaggcagctcgaagaaagggagctgtcgaggttaagacgacgccaatccaagcagcaaggaagaacgcgagcagagagggcaccaaagacagtggacaggcgagaaaaagaaagaagagaaggcagagaccgtcagggagaagaagagaggaagaagagctgtttccggtcatcagctctcgcgatggcttgcgtcgaagatgctctgcaagacatgcacgccgtttgacgagcagcgacaccggcgaccttcgctctttgattgtgtgtagaggatttccctcgactcgcgtttcttctctttcctctactgggtcgcttgctttgcttctctctccccccccgctgagagaacatgctggacacagtgtgtggtgtgtgcggtcgcagagctgcccgcgaggaggtcagcctctccgttttcctcttgatcgcctgcagctctcgcttcggagttgtctcgctttcgcgcgaacctgcaggaacttcagccgacaaagtacgcaagagagaaggcgcagcggctgctgttgtttcctcctcagagcgagcagcgcttgtcttcatcagcgcccccctgtgttcgcggcgttcctctgcaaaactccacacacaccacccgccgaaggagagtgctagcgcgcgcaggcgcggatgctagaaggcgaagcgagagggagatgaaaaaaagcctcacaagcaagccggcacacagcggcagtgccggaagaagacgagaggaagaaacgaagagaaacttggagaaaaaggaggcagaagacagtgaaaacgcgagacgcgacggctgtcgcggccaaaagtttttccaccctccctcctgttcttgtatatatgccgacagagcgctggcagcgctgcagacctgctgccttctcttctttctcaggtaaattcgccgtcgtcgtctttgcatctgagaggcatgtgcctgttttttgttcagagcgtcaatctgctgctcccgagtgccgcgaaagctgagaacaggacaaagcgaagcggagtgaggtcgcttctctctgcggcagattctttcaacggagaggcaagctttttccgcggcggttgcggctcggccgctctcgacatcgcgaggaggcagcgacgccagcatcacgtttcagctcttttcagaagatagttctgccttccctttcccttgttcgtcggagaaggaggacgcagagagagaggcgagatggagaacgggcgtctggcgaacctatttctgagttgtgtggctgcggtcaatagaagaatttgtgacggcgaagacgcgagcgttgtgcctctcgtcaactgaaaactcgaaacgggggaaaaggctctccggaaactcgggtcgtcttcggttctcttgacgtcttcttttcatcttgcggggacgacggggattttctccgtctctcttttcgtttgtttcacctgtctctctcgctctcgtacgagcctctcgccctctcgcaacagcgtgcagccttttcaagcgttttccttcttttcttccccccatcgatgctaaatgaccttcccccatctgaaaatacatatatatattatatgtaggtttaggtgaatatctttttgtgtacgtcgcctggtcagggagaggagtgaagagaggtttctgcctctgtctctctgttctgtgaggctgcgtccctctttcctctttgcttctctaaaggtgtgtctgagctctctcctctcgctgccccagagggtgtatcccttctgcgcctttctccctgaacctacagtctgtttgtcgcgctccttccttcgtcgcaagtgggcggtccgcgcgctttgctcgccggtgcgacttcatcgttttcagacggaaggacgccagtgtcgatcgacgaaggaaagcgggagctccagcttctctgtgccgcttcacttcgccgttccctccggtgccctttcttcttctgcgcttttctttcgcgcgcgtccgccacccgcggctcctcccgcctgccttcttcgcgcagtgagga

SEQ ID NO: 3578 - DNA, 2003 bp, Toxoplasma gondii
  source 1..2003: mol_type = genomic DNA
gtgaacggaggcagtgtgtttagctgggaagctagcgttcaacaactctgccggtgtacgaagtcagacgcacagatagaaataagttcctttccgatgtagggagcccagagaacggaataccgttgaggaacgcttccaaggaaagccggagagatttgtgacgcagagtctgttcaaccaaaagagggagtgcggtgtgcgaatgagaagaaatctgttttcgctaggtcgtgcagaccagagacaggacatgcgtccgcggcgtcgaacactctgcgggcattgctgcgcgcattgcgtccaagcccctgaagctacgttctagtgattactctaaaactgttttcgctgatccataagaagagcgttatacatttgctgagacttgccggaggttgatcgaagcacaagcgaaattccgacgaagcgacagagctcaaggtcgtttctgtcttcccgcttgaccacacgagacacgccggtctgcgccgggtgtacatacactcggatgtgctgcgtgcgccccagatggctcagaagcgcttcctcacgcgttcgctgctgcctgggttcgcaatgcttctttttcactttataaagggtgaaaagaaatatatctctagtagtccaactgagatgccattcgctgtgaaagtcgcgaaaagagaggtcacgcgctatctatcggagtcgtacatgtgataagaaagacagatcagatggaaacaaggtagacggtgaagtggacgtggaaaatccgctgacttctgctggtgttagtcccgagaaacagatgttgtgcttgaaatgaacagtcaagcacccactacttgtgctgcgagggtgcgtcatgaccgtgtgtcctcggatattcgatacataccacggctctttcacgtcattcattgattgctgctgcacagttgtcagagatctgcatgtaaactgcatcacaggaccttgcggaagtccttgtcagcgtcgagacgcacgagcgaaaggcggttgttatgtatgtggggaatcactcttcggtgtgtcgtgagttgtcctcccagcgtttctctgtacggagcacctaggatgtcgagtactttttcagtcatgagatacaatccggttctgggtgattggagacgctttacatcctaggatactgaattgatgttgagttagagagatgcaacgactcaggatgttcgtgtctgcagtctatcaccacccccatcgccgcttaaaacagcagacagctttggagttagctttccgccgacgtgaagcttgcaccacatcggcagaggatttcagtggtagacagtcaggacacgcgtcaagagcgtttctctgtatctcgtaacagaatatatatcgggttgcatgcagagtcgagcgtcagaggcactccagcatcgcttgtttcttcgaacttccgcttttctgcctcctccgttctctgtcgagtgtcgaaacgaaagggagaagtcgaatcccctttgaaaacccattaacagaattacgctgttatcgccggcctcgccaggtccccatgtcgcatgcagttggcgtttccggggctggtgtgcgtgtgcttccgaacggcagagtcgagagaagaggtggacctcggaatttgattttttcagacggaatcctggaacggaagaactgtttttcttgacgctggatgtttcagggctcagggaggaagtcgacgaggcagaaatcgtgctttcatcatgaactgtgagttaccgcggaagcgtgacccgggaacgagcgacgaaccagcgtcgccgctttgacgctgcgaatcctgagaagctcgagagaagcaagctgctcaggcagaggcaagaagacgcaaagaaaaaggagctcatctgagaggtgtcttccggggcctttctttcgtcagcttctttttctcgacccccgcccacctgcacagacgcgttcttccgtgaataaggtcaactctgcgcgttctcgcctcctcagca

SEQ ID NO: 3579 - DNA, 1936 bp, Toxoplasma gondii
  source 1..1936: mol_type = genomic DNA
tttttctttggatgtacagtggctaccattgtgacaaagacggtatctccgcgacggcgcctcccgttgttgcctactcgctattgtgatgtaaaactggcttgtgtatccacacactttaagggatctgctttctttaacgaaatgtaacagcactgccgaagtagcggattcctcagccaatccagaacagtaggacgttgtatgttttcaaatgcagatatatatatgtatatgattaaaaatgagtgtcaacagaaagtagacacatttatacttgggagatatgttttcgtactgttttctgcatccaagtagcgcgtatgacaaagaaaacgcctatacactattgttggatttctcacgttttccctgcgaagctgtaaagtctggatctgattgattacggaaccgccggcaggaagatgtaacgttcttgaggattaaagaaattcgagccgaatttttctgacggagaacgcggatgagacgagcgatgtagaatgacaccatgtagaggcgcggtcgtgcggatcctcaacaatcaaccaactgaagagaaggacctgtcgcacagcgcgaaaagacagcgtccgactcaatgcaaaccgcagtgggagagaagcacttgaggccaacaccatatgcgttgactgaggaagactggttagagtgagcattgcaataatgtagtgggagataggaaagaagctgactccgaatgcttgctcacctggtacacagacaggcgagcaaatagtcgtgtgccatatggcacagacgacaactagtcaatcgctttcttttagcaggtgaaacaggcgagagtttattgtgtacccaacatttaacgggtaagaggtcatgacggcgactttgcgatctgagatgactgaattggtcgtcaggagagtctagagggaagctcggcggttaatctggcaagtatttgctgcacgccttgatctcagaattcccgttctacagagacagtcgaagggtctccatcttttctctccagatgccgttgaatccgaggtgtgtaacgcatgtagttctagcaacatccaaagcgggcggaagacatctccggaaaaggcacggccgagttgcaagaaagttatccttttcacagctaaaattgagactgaaggcgtctggcctatcatctgaataaaaaactgctgtgtttgaccctttgtacagtggaagaattctctgacaaaactcaacacgcggccgtccaggtttccgttgcatgcgcgcgtgaacactattactgattgtgtttgtcttcagtttctgtttctcgtctttcctttctcgccgtttgcgtcttctgtgcattccgggcttgactcccgctgcgctccaagctttttcgcgttgtctttttcctcaagctgtcctacggttgctcgggtgaccctccaaaatcgacgtggccgccggcgacggcacgaccccactgcatcttttcatccactcgaacttaggaatgatcaaccgtcgcgcagaaactgttttcttgtcctgttttcgacactgacgcaggagctgtcgactcacttcagaccacctgcgccagtgttatgccgagagtgtttgtcgcgcagtttccaggaataccgctggaagagatctcgctgtcttgaccgacacgaaacactcgcctggtgcctcatcttttccaagtcctgaggaccctcaaaaaacgtttcattctctggtttttcgctcctgtcaagcctttaatctcgtccctgtcgcgcgtcattccgctacagagtcgcctgcctgcggatagtcgccctccttctctggttgttttccatccccgtaacgaatccttcacctgcatacctttacgtagagttttcacgggtggtctctccaagagaatcagtctgccgcggtccctcttacttgctcctta

SEQ ID NO: 3580 - DNA, 2411 bp, Toxoplasma gondii
  source 1..2411: mol_type = genomic DNA
cacaagttgtccaggctcatcgtgcgaatgaggcggaactcgagttcctcagccaacccagcgaggagctgcgaggaggagacgcggagaagaagcgcagagtggaggagagacaagacggcctcggtctgcagactgtgacggtcggagaagcactgcgccaggaggacggaaagctggggtgtctccgcatgcaggcgtggaggcgcgggcgagggatgcctgggatcgcctgagggtgcggggagagaggagagactctttcgaagagaaagacgacgcagaagcgccactgcctctgctccggaagaaggggaagaaacgtaggaatgggcagcagacgatgaagcagacgcagaggagcgaccggagaaagaagaggcagaaaacgatgcaaatgacgacaaggcgagaggcattgcacgaggtgaccagtggcgaggggggagagcggtagctgtcgacgagacgaccggaggcagggaaggacagagacaggagagagcgaaaaacgaatcgcgcgaaggcgaagaggcccagtggcggcgaacgcaaggacgagacacggggggaccctcttgtttcctatgcgaggcaaggcgagagcaggaaaaaagccgtcgagctccactcacaaaaggagaacaggctttcggagacgaagcgaaagacacaccagaagaagccgcagacacagcgaactctgcagagtcgcccggcaaactgaccaggcgaggagaaaacgcgtcgggcagagaaagcgaaaaagctagggaagctggagaagacaaggaaggagcacgagcgaaaaaagaggaagcaagagcggaggaacagagagacgacctcgagagagagaccggagacactgttcgccgcgtgaggcagcgcgagaaggatccccgaagagggtggaaggaggggaggcccctcgcgcggcgagctgccattggacttggtttccgtgtgcctcgaaaaaaaaggaagtttgcatagcgtgaagagacctcactgaacgttcttgtggaacttcgcgtgcgtcgaaagaagaaatgaaaaacgccggattccaggactcgacgacgtcgacggtgttctctactgcagtggcaccgcggtgcggaggctacgtcaacatctttgcgcgccttttgaaggacgttcctttgctgttaaggaattccttctgctgtggcagcgcaaagcaaaagttcctcgtttcgctcatttcacaggaaagggaaggacgctttgcacgtgcggccagcctttgcgttttgcggctgcgttgccgacatggcgcccagtcacgagcaacgaattccccaactgtctcccagaaaagttcaagctgggctgtacaggaagacgcaaggtcgcgaaatgaagcggacgcatggagtcagtgaaaatggcgagaaaaacgaaggaaattcaccggcgtcgacaccggcacctttgtgcccggcgcgccagtgtgcaactgtagcagcaggtacacagccggcgcgagtcggtgcatccgtcaagcgaaacggcgcggcatcacccgacagaaacgcggatttcctggagacaaacgcgcaacaaacgccctaggccagcagccaagagtttgcggtgtctcttcggaagaagatgcgcggaaaaacagcgaagcttcgtcgaggcgagcgcggcttcgctgtctgggcgactcgcatgcgccgaacttgcatgcatgcgctcgaacgcgacacggcggcgggtctgagtcaaactgggaactgtgtcaagggccagatgattgtctgtttttttcctctgagtctccacgtttgcttcggccgttgtctctagaagtagagctcaggggaaagactcgaaaggtccagctccgcgagtcgtctttgccggtcccttccctttctgccgtcgagtgttttctgccccacacgcggcgccaagtgggagagtcattgccgcgaagagttgcgtttttttttctctgggtttctcgtcgtctgctgcctcttcttcttgagttgcgtgtgtctttctcacctcgcaaaacgcgctctgctacgcgcaacgactccgtttctcccgcgaggggctctcgtcctagacgcgctcggcagctgctgaacgacccgcagggcgtcgtctgtctttttttgactcctttttcgtttttcccctcgacgcagttcgctctcttgtttctctctcgcgcactgcggagcctgcgtcttcttcacaggctctgtgtccgagtcgaacgcgtctcagtttgcagggaggtcgacttctctctccgcgcctcctctgcgagtctcttctgctcacgcctgttctcgacttcctgctgtcctcctctcctttttctccgcttcgctctctccttgaacagttctccgccttcgccccca

SEQ ID NO: 3581 - DNA, 3125 bp, Toxoplasma gondii
  source 1..3125: mol_type = genomic DNA
aatagagttcgagtatcgccgagcatgaatgttttcgtctaccagatccatgttctggtgtacctaggcgtttggggggagagcttcgagtatgctaagatcctttgacttcgctgctttgttcttgttcacggtgtcttggcagttcaggccacttgccgtccgtgagttccaccgtacgtttatctgggtgtctttcttcagcacggcgaaggtgaactacgggtgcttccctgcttgaatgcgagcgaggaggcgacagcggcggtgtttgccattgcgagggagcaaatgacggactggctaaaactgatggtgccgctggaaggggaaaaaaacccttgagcagaatgggccgacagagtgcagaaacactcgttcaggatgtgagttggtagtctttcttttacaaatactttgtagaaaaagcttgtaaataggcctgtctgagaggtgcaagacggggctcgacccccaccaacaactgatctgtaggtggacactacttccgctcttatgtacatttgactgtgtttctcacgaactaacgcgacaaaagtcgaacagatagatgacaccgatggtttattaagggttttcatcgtgcaaattcgcaggcatttgcacaccgctgcagaaataactgaagagtccgagcttacgcagctgggataaaccagtgacgagcacaattcctcgcaaaaggcctgtggtcgaacactggaacatggccgtgaccggatcgttttcacaacggctctcagcgcgtttctcagttttgggtcaacgttttcttgggcatcaccggcaaatcgcatgctgagtcgatcgactctcattttcctggtggcagcggcaaatccagtcagtagacaggcgtgtttgcaatagccgtgtttttttcgggcagtctgaagcgtgaagtttttctttggactttcgagtcagaagttcttgatttccacggacattttgtatctcagacggcgcgttcgtgctcacgggcagtcctgatgtgaacggcagtgtctgttgatctgggaacttgtgttcgtgccaggcgtgctccgctgtcaagaggtgctgcattgttgtctccctctaggggttcattgacttcatttagaatgagactgagaattccctagcgtttccgttttgtatccgtttcatggcatgcactgacgagacgtgctcgagcatcttgtggtttctcgttcactcacttgcacgatttgaattaactttctaaatcctttcggtcttcacatgcgatgccgatggggtggttttcgtgcaaaccgttttgcaaactttcggaggttggctccccgactacccaactcggttttaacgtcgcgacgaacagcagatgccccttgtgcagacacagtggcaatgcaaaacccgaatgttgcctagccttcgcatcgcaggcatgagtgctgcactggtcacagccagctctcaatttgatccttggctttttgatctgctaagtggcattgaaggaattatggagccggtctgagagactcacaagtctgtcctcttcacgcgagctgacgatcagccacgccagttctcgttacgacggtgaagcagatgcattgggtactgtattgtgtgtttgttttagttggttccagaggggccagtatttcttagaacgtaaattgaaagaatgaaatctattggaggccccctatggccagacagctgcacgtcttgggcaagttgaaggacagagaaattatttctcccgaaagcctagctgcatttgctacatgactgacaacgtcatttgtaccatttccacagacgatacgaatctgcctccgtccgtgttttttgctaaatattactcgctattgacttgcgagtaaacgcgggcttttcctcgaccgctttaggttggggggaaggtacgagtgaaagttggcgaggcgtcagatgttacataaacgtcatcctgctgaatgtacaggattcaaaatccaggctacggttgtcacgtgttttttctctcaaatttgatgcaccggttttcgaaagacgactcagttgcctttaacctattctcagagcaaacatatccaagcgaaggtggctttaacgaacagtcgcactgcgtgtcaccaggagccgaggccgaatcgtgaaatccccaacattagtctcgtctgccattgtatacgcgagaggggacgcgaaacattcctgtggcttgtgccgtcgcctgccatagacactaaagtggccgtcatttctctgcaactgtgcctgtgcctccatgacgttcgcctgccccagaaaaacaacaggggcacaagcggcagaatccaaagagttctgtgttcttgcggcaagaggttatgctcccgcctgcggatcgaaacgacggggtagcagatagattggtccttcctacgtaaatgcctcaattgtctagcgccacatctgtctctttcgaatgaaacgacggcgcattcagtaagtacgcgtttcagacgtctacaaacttagccttcgcatcgctcggcggcagaaaataaatggtgaagaagagctttcggatgatgtgtaggctagcggatgcctgttgactggaacaccaaatcgtttctgtatttctgcaaacgggggaagagagttggggaaccccccgttgttccggtatcgcacaagtggtagggccgcataccaccggcaaaaaaggagcattgctccgatgtttttttgcgtctacttgctcttggattccctctgagtaagtcgtcattaagaagtaaaggacgccacgttttgaagaggaaatggccggtcggcctgcacacgcatggtttctgcgagcgcggacaatattttcagtgctctggccccgaggaagcgcggtgtcttgaggaagacaagctccgcgcggcggccttgctcggaggccgtggtagagccggagacggattcttcggggtacggtcccaaacactagatctttttttgcggcgttgatgtggagcagtttcgctttctattcccctttatcttaaagggtttccgtttcgtcttaccttttcggtgtctgcgcccgttcgtaccagctagccactgccacgccctcgtcaaaa

SEQ ID NO: 3582 - DNA, 3395 bp, Toxoplasma gondii
  source 1..3395: mol_type = genomic DNA
caaactcgcgaggctcagcagagaagcggaaaggagacaggacttgagacgaagtcgcaggagggggagacgaaggagcagtggagagaggtgcgagaggacgggtgtcggaagactttcctgagatgtctgtctgaagaacttctccgtttccttgtgtctctccgtccttcctgatcagcgcgagaggactgggctgcgcggacggcgcatgaggacttgcatcagctccttggcttggcaacgtcggccacgagagaaagagaacgagacagaagaagcaccagcagaatgagcaggaagagaagaaagcgggagagacagaggagaatgaagagacagacccccgtcgtcgacggagacgtcgtcgctcctcatctggtcgactggcggagaagacgcaggagctctcttccattggtgtcggccgcgagtgcaaacggggaaactcagttcgacagaattcatgtggagaaaggccgagcagttccagtgtgcttcctctcgttcagtgtcgctctagtcccgggctgtccgccatctccccctgcctctcagacttttcgagtccgccttaaacgagaaagtccgcaaatcacgtgaacgtctgaaaaaaggtttttctaaaaaccagcaggcagatgcaaatacgcagacggaactgtacaaagctgcatgcggatacacatatggaaagaatcgctttgagcatagtcggaatgacaagctttgagggtctagaacctgctgaaaccctgtattgaagtgacacagacgatccgggcttcctcggatcctccttggcgttacggtgtgtatgctctcgaggctggtgacttctttttcgtggaaaggtgcagagggtacctagttgaacacggcagaaggacagtcttgaagagtgagggaaaagagggggagttcgtgaggaacgagtaagactcgcaacaggacttcgccgtttgccgaagacacgccgctggtgtttctggagaaccgagggaatgtcaggacgcgcgaaggggtctagacaaagcgcagacgctgcaaaaatgtggtggaaaatcttttcagcgaaaacccagtcgggtcgcttccctcatcggaagactcgccccctctgcccgccgaaggagcgccggagacggtcaagtgacaacgactccagagacggaacaggaatcgcatagctcgcaaaggacacgagcctcagagttcagttcgtctgagacaacggacactccagtgcacactgacacccatcgatttctttttttaacgaaaaagcgactagacgctgccaccacaaagcaagcaaacgcagataaaaaaacagggaagcctcacacgaagcgggaatcctcacgatgtgcgcttattgtctgagccgacggcgagagcggattgttggggtttttcgcggaggaagtcgcagccttggccaaagcgacactgctaaaaggttgcaaagagcctgacacgcgttgttcgaaaaaaacgttcttccctggtgtcgattcttgttctagtctcgacttcgcgatggtcttttctcacggcattcgtaagcacacacactggcgagccgtctcagccggggggttctccggggaatttttactggcaaaaaagccttacccacgtttaaacacacttcctcgagtcatttcgcgtcgcggattccgacaaatacggggaagccgtctttcttgcactttctccgacgttctcggggtagctaacgaccgaaggcggtgtttcagtaccgtgtcaacgcaaggacaagatcctgaacaccgggcagagaaaactcttctctgctatctgaatcttccaatccgttcagagaaaatgaaattacccattggccagtttgcccaaaaagaatctccggcgggcgttcctacaccgtgtttcggtaaattcccactataccccgttaggtcacctccagttcttgtggcgagcttggcagccctggggctggcaaggaaaagcgaaagtgccagtctgaactatgaagagaaaaggaagcgaatcactgagttcgtttctcttagagaaacgggttttcatcgctgtttcacctgacacccgcctcgtcaagttgactctcgcgcagaagtatgcttcccagagggtacatccgtatataagccgatcacgtggtttgcaaggcctcacgaagactcatgccgagacgctgaaaaggggagacgaaggtcttcctcgcatgttgcacttcacgaaaacgacctgacatgttgcttcgttgtctttcctaactcctcggcggcgctagagtcccgccgaaaggctcctgcgcagtcatcatatggacaaccgtacacatacgccgaatgtgtctgtatgtctacgcgcaggagacacgttgaagacacacatttatgcctggtgttcctcttactgtgtttgtagaagtctgtttcgtagagctctatgggccgaaaacagcgcgcgaagccccgctagctgccttcaagtggacagagcgggaagaactctttcttacgtgtacacacagctcgtgagctggctcgctatatcgccgggagcacgtgaaccccctgtctcttcatattctttgttttctctgaaaacaatctcggtgttttcctcgctttctcccgtgttctgtgcaaattgaaggactgcgaaggactttgtcaaaaggcaggcaacgaagaaccgacgggtgacgagcgaaaacatcagtccgccatttttcattccctaattggcgcgttttcaaaaacactcagacgcctaggtcaggctcaagcaccacgacgctggtcaccgagttccgcgaggccgcgtgcatgcatgcgttttgagcagcttaagttgacaaagcgttccctttttcctcgaacttgtcacagtagttccgaccttctggatttttttcaaggaaaagagagcggttgttttctgtttttcgagtatcttctttttccgtttcccccgtccgtccactgaacagcttcccggaagcaactgcctgtcggctccggttggcatgcagcgcgcattcggtaaaggaacgtttgaccctctccgttcgtctcccactgaacatttcctcaacaagaaatacggtttctcccctgttcgtgtctgaagcttttccgtacccgcatcgcgttcagggtgcctccagctttccccctccttcccccttttttccgtggttggtgagagcggcccgcattgccagtgtttttcgtcctctgctctcggtctttcttgcgtgctctcgcctctctggatcttcacccttctcttgcaagcgtctgcaaatctcttgcgcgttccggagttcttccgtccgcattctgcgttttcgcgtcctctgcggtgcggaacggcaa

SEQ ID NO: 3583 - DNA, 2316 bp, Toxoplasma gondii
  source 1..2316: mol_type = genomic DNA
cgacttgaatgtcactttggcgcctcgagagttcttgccttaccgtcatggggtggaggaagtagctggctgcgacgagagccggcgtagcgacgatctcttcgacgccgtctcgcggctgctggtgcgattcctcgctccccttcgcgagtgtcttgcctcgttcgctcggtcctttctcccgcgtcacgtctgtcgagttctcccagtccttctgtctccaactgaccgcccatgttcgggcctctgctgcggcgacagcgagggcggtcgcggcaaccaagtcgatgaaaatcaagacaaggtagtaccgccactgacagctgctggtgttgcaactctcgtccgcgccgcggcctgcgccggtcagccacttcaaactgaggaagaccagcggctgctgtctgtacaccccgcccgtgtacggcgagaaggagagcgcgtgcagcgtgagcgcctcgcggaaggacgagaaggaggcggaggcgggggaaaccagtggctccgtggactctgaaagagtcaatcccacagagtaaagaaacagacggagtgcgactccgacggcgagaagcacaagaagttgccaagaaaagatggagccttcttttcgctgacatgcgcgggtccaggtcggcaggtccgcctcagagcgcgcagacggcgggggtggaaccggcgcggggagagtcgcgtccaaactggagtctgtttccttcgcttctggacattcagcaggcgaagcctccacagctgggcggtggcgtcgccgaagactctccactgtcatggttggagccggaacaaaacgaggaaagggtgacgatctcaagagactccttggacgcgaagggcgcgcagacactgtgcaataaaggcgctccggaagcagtccgagtgagggaagttccagaaactgggaagaaaaacacagcgtgagtgtacaccagccaactctgtgctggaatcaatgcgcaagagagcgacccgcggccgtaccaccccgggagagtcgccgaccgacgtcagagcgtctcttgaaaaggaatggagttcgtcgatagaaatggggagggtgagctttactgttacaagatttctaaaaaaactggaaggacggtctacttcgataggggggccagcaggcagctggttttctcgtgtcttccgtcgcaaggtctgtcgcgcatgtgtgagcatgtgcgtagagaggcagagaaagccactctcggcacttgaaggtcccgcgtttgcttccttcactttaaaacgcgattgaagagataagaacagctctctgaaacttcctatagacacttcctctccgggaaaacggggttctccttccgagactccgtgtcgagttttttcgcatgcgcatgtgtgcagcgacagctgctgctgcaggttgactagacatgctggaaacagcagttttctgtaccttcacgtggctgtaccaaagccttttttccagcaagaactcttcgccaggagctgtttgcttgcgtgatttttctcccctgtagctcgactggtttttccgtaatgcactcttttgtctgtgacagacctcctggctggcagcggtaccacctctcccaccccccgtgtctgaggtcggtgtcctgatggttggacatgtggagtctgggaaaagcggaaaagttttgcgcaacactgtgtttgattctttacaaagattgctttcgagagagcgccgctggattttcgccccttccatccggcaggaacctgcaaatacgccaagatatgtcccggcgtccgccagttcctcccaaccgaacgcagtctcttgtcactctccttcatcgccgactgttcctctcccgcgttacttcctgagaggtgtcgactcgtgtaactgcacattagcagccgctgaaacccgccgctacgtagcaaaaaaaagtattcatatgcaggcatgtattcggtgtgtgtgcgcatgcattttttctcgaatgcatcgctgtatcgcggtttctttgcgaagttcaagagtccttcctggctccgatggaaaggctcgagtgtcaagctcgaggtttgacattcaagattcgtcagatcgccgcaggtcgcgtctgcgtcgttcagcgttcctgctggtcgcagctgcacagtttgtcggaggttgtggcacagtagatgcgaggggagtctggtgtcggccgaatcgtctgtgacctgaatgtttcattctagtcttttgcgcgtgatcatagacctaaatacctcgtgtgagtcgtgcaatctgtgccgaatacagaaaaacgtcctttcgagaaggaa

SEQ ID NO: 3584 - DNA, 1994 bp, Toxoplasma gondii
  source 1..1994: mol_type = genomic DNA
cagtactatcaagcgtcttcttcgaaataatgctgctgtaagaggttggcgtatgtgctgcttgcccctgttttgtgttgtcttccgaggctagaggtgtgtccaagttgcgcacacatttgcccgcgtttccaatgcagacagtcctcttggtgatcttctgtgactgttttgatatgaggccaactgtcggtgccagcccttctggtacacggttaccagtttacccttcagcagtgcgtggatcttcagaaagacagaatccgtttgtagaaagcttggttgctgacgcgatgaattgacgcatggatctgactgtgattttcctagcctcatgcggtggcttttcactatagacacgaactcttcaaatcatatcacaggcgcatttctgtgagcagtctacgctagacactggtcactgacaacagactattcaccggctgctcaacgatgtgctcgtgtgccgcagagtttactttctagtcgtgaggggtttcgtggcggttcctgctagaagacaagggaaccagatttgcatgctacggcaacctcgttacatcaggctctatccctcgattttagctgccgtaaggaaaggagtgtcgttggatgcatatacacccgagcatctatttcagttgcatcggatacgtctctcaaggatctgaaagaccggttcgcacgtacggcgacgtttccttctaatccggaaacaactaggcacacagaatacccccttccatcctcagtttggagggcgaccaaggaaaaagagcgtgactttgtggcacagaccatttcacctctgtggaacacctttttcaacagtcgtcgaaggcgacgtcctcgtccgtgtcgggttcccgtccccttgcggagttgtcctgccgtgtgctgcgttccagcttccacaccaatgcattacttgcaaatcttaaccacagcgtgcttcatacatctgttgcagtgagaggagcatgttttttgtgtatcaatttgtctacatcggggcaacagcgacgtgttccgcattcgaacgccacacgcttattccgtgtagtcagagccgattgaatccatgacggtggtagatgtcttctcctcagtgttagagcacgagtggaacagccttcgtcgttgacctcaaggtcgcctgatgcggatgtgaaagggttcacttcaatccgacaaagcagtccaaagggtgtccgcctcaaacaagtagttcggttgtgtcgggggttctgacagtgttattgtttccgattgaacgccgtcatcaactgaccatgagcagacaccccttttacgaccttgtcctcctccgcacgcagtccagttaatcctacttctctttgtgctcttctcaatccgaataattcccttgctcttcatcccaattcgaaatgcgctcacttgcttctttgcgtgaatgctggcagtcagtacccccgacccgcgacacagccccctgcagctggagcagttcgtcacagagaggactcatttttgccaggtttccttttcactttggcatttgccgttttgcacgaagattatcttcatcaaatgcctcttcccgaacttgatattggtacaagagtgagcacccacctgccagctacgcgcttgacgttaccaggggtgagagacccaggtttccttctgcgcttcggcacacatcttgaagttctgcccattgttcgggtctgcaactcgcacgagtcttggaggacacgcctctagggcaggtgggactttatgcagaagtattcacgtcaaagtcccatttcatttatgcttctttgagtcaattttgttttttctcttgattcgtgtgatggggttttgaattgtgccgaatcccttgcaagcagtgtagaaggtcatttcatggatagtcaagacaccagcctgggacccgttttcttcaggagagcagtgtctcccctatcaacaaatttccgcaagagtttccccttttccgacaa

SEQ ID NO: 3585 - DNA, 3586 bp, Toxoplasma gondii
  source 1..3586: mol_type = genomic DNA
acacctggtacgttgttcagttgattccagtgctaaaaagatttccgtctctcaaagagtattgcccctcctgtggcagcgaccttccgaggcaagcagaccgcacagcacgagcctccgttgctgggttgaaccgagggaactacgcctacaacaatcaactgctgagacaagaccatgtcacaccctcttgtgcagactttatcattttcagattggtattttaccgttttttccccgtcgcctcctccgtccccctcattcgagtctcttcagtgcccgcggggagtgaaaaggaccccccagatcggtggacttggacatcctcaaaaagaacgacgcccgagatcggcgatgccaccgccgcttcgacccattttttcaaggtcccccgccgccccccaaacgtcacgtggaaggacagagctgcaagacctcaatgatttccgcgtccggagttgcgcgacgagaacaaagcatctgagcctcaagtgagcaagacatttcttcctcacgcactccggcgattgcggtactcacggtgccatcgtagaaacggagaagcctcggcttcccgtgattgttcaccacgataaccgccttgatcatctcgggtatcttttctggtcgaaagagacaaggaaccgtggttgtttttgcgcgataactcgcgtccttcccaccagcgagacgtcgtgctttcacgcctttctctccttcctagtgaaccgcaagtagcaatggcagtgcgaaccgtacgaaggatcgaagatgagctgacagaagatgcacgcggtggacttattcctggacgcttacggaagaaatgcccttgccaccggcggcgattggcgtttggctcacgactccggagtcttccacgacctggaactggagatgtcttaccacacggaaagggatgagacaccgactctcccttcaaggcgcatgcatcgccggcgtcatgacaaggaaaacggaaccgtcaaccgtgttacggggacgaaaatgcgtgtcagcttgtacacggtgaactcgccgtacgcgaggacccccaaactcgaaagccgacacactggagtctcgacgaagatagactttgaagcgctccccaacataaatgggaagacaggtgtgtctgttgaccattgaaaagaaaaaaaacggcggggtggaggctccgaaaacgtacaatgacgagacacaagtggtcaccagacacgcatgcgcggttctagaatacacagaaagtggatgtcgacgtctgtcacgtcttcctgggactcacgagcttgtcagcgaataggttgtgtaccaagtgaaccaatcccgcgagtagatactcgcattgtcccccgatcttttgcgtgagctcgacacgccgttacgggcagttaaaaggcgcagaccagggaaaggagataaaggaggtatctgcctcgacgacggaaaaagcgacatatcattgaccactgccagaatggattaggatagaaacacacacttgtacatcattcgcactgctatctgtgctcgagccgtccatggtgacctagacccaactttcatcgggtagatacgggttgcatgcaaaggagcatcctctatccttcgctgttgcggctcaggcggaaaaactcgaattaataacttggtacacgaaacgttttcaagtcactctggaaaggggagcctctaaaccctgagaatgttttttcgtggcaatggaggctatccgcttatgtcggctcatatacgaactgctatcacgcctgcttagcttagttggtagagcatccgcctagtaagcggaaggtcgtcggttcgactccggcagtaggctttattttaagatgtactgcttttccgctggtactggtttgagatgattcgctgtatttccttcttctcggtgcagtacaggacgggaaagctgctcgacgacaaaagaaactagcgagattagtgggagtcttataggcccgctcagtgtagaggtaaacatttatccagatcgccgcggctgatgacgtctgctgttcagtgctgcgcaaagaaaagaatgctttcagcctcactccccatctccccgtacaggtgttaatgtcttctgcatttattgtacctcataacttgcgggagcacacgtccgcggcgaaggtgcctgtctcacattcgcagtaagttgtaaacccaaagacggtgccacgctattcgaaggggcgaaacagcaactaaaactgattgaattaaacgtgcctgcaagtttgtgaatcgggtgtttacgttcattggtggagcctcgcaagagacagagtctcacaaggcatctgaacgcctgcttagcttagttggtagagcatccgcctagtaagcggaaggtcgtcggttcgactccggcagtaggcttttacatatctgcgacggttttgtctttcctgctagttgcgcgggtggctcgcggtcttctttgggaggtcagcattccaggaatgcaacagacgccgagtgtttcctcggcaacgaagagcgttcggacactaacgtcgcagacgcacatggacctgtggatcagcaggcgttcggtggcctgatcagctctgatttgattctgcaaccttgacaataccggtaaggcgaccatcgatacaaagaggtcttcttctcataagccagggaccctacttcaagaagtatcctattgctgcgtaccattggggtttcgtccaagaagtctggcatcgttctgagctcctcgcatgacgtcgccacacggatacactgtttctgtgtcttggtagttgactgtatgcgtcactgaggaccatctcatcacatatgagacctttttctggcctctgcacccctgtcaaggttcacttttcccatcccaactcatcgagcttctccagaaggatatggaatcctgcagacttctaaaaaagctatggacacggtcaagttaagattcgaggaatcgatacttgatgcgtcgcatcttgggcggattatcatggcattccagagtcgattcctgcggactaccactccggtcaataccctcccttgttgggtgcggcaacgacagaagccgcctacagatctacgtcgagttgaaagagggactgctggagcttctcggtttgctaaacagccatttatcgaggattcttgcctcttctccgccaaaacatgtcactgacacaacttgccgaacctcctcctgacacaaaaaagtgactgtcccgccagacggcggatctgatcctgcatggaagtatcctgtcactgcgtggtacatgcatgaaggtccaaataaggatttgttgtggaacgaagaaaatgcctttgaagcgccacgttcagctttcttctgtcgcggatagttagattttttttcagtccaaagcttctgcatgcacgcgcagacagccaacccagtcccgacatgttcgcgggccctgcgcgtgtcttcgttctcgagcgtcgccagcaatcgacgtctgcctggggaaagctgcttgtcagaaccgtcgcacgagctcagaactttccagagggaggccgagtcggcaagagactataa

SEQ ID NO: 3586 - DNA, 2261 bp, Toxoplasma gondii
  misc_difference 2039..2084: note = n is a, c, g, or t
  source 1..2261: mol_type = genomic DNA
tgtatgtacattggaatcctcatcatgcaaaggcatatacagcgttttgtcgatgtgaagaaattcaatgacatctgtgactctgcacaacatatgtatatgtatatatgtatatatatttgtgtatatacgcatgtccgagctttacgagcagttttcttttgaaagggaacaagcagaacgttctgttggtcttgtttaaacgtttgtttcagatacaccgaaccgtaaaaagtcgagacacatgcacagaaaatcgatacgcacatgcttacaaatgtagaaacatacatgttttcacaaaacagctaaccgtctgcacatccacgtgttcgtaaaaatgcaagcgccccttgggctctacatacacttcgaatgttgcactcggctgtcagcggttcggcctctcgaatatccgaatcggacgagaccgtcgcgaagagaggcatgcatgtcttcgcaaccctgcgtgctcgtccagggtattcggaagtctccttccgcgtagatactgttccttcgattctacagaaagtctcttcaaagatacgaagtaaatttcctcgcctatggggcatctccgatctcgaagcgtctttttttgagagctggctgcagcatggaaaagaaggaacagtcgcctccaagagcttgtctctgtcccatgcatgcaccggaaaactgaaaacgaaccactgggcactccttttttcacgtccttgagacgaagttgacactcttgaagtgttgtccagaagctaagacgaagagtgcagaaactgagaaccgtgagctgcaaaactcatcatcaacctctctgcagggcagtccacctctaacctttactctttcctcccgagggcgctctctctgccactccaactctggagttcgagaaatagaactcgctttcagaagtctaaacgtagggcgcttcatacgagccattagagaactgcctactacactgtggatatgttgacagtctgaaattgcattcaaagaactgtttctgagctgctcctctacagatcttccgtcgcttcccgagattctgtcgtccgggatggcgaaagggggttgcccttccttttccctctaaactctctcgatccctgtgggtacacggaagacaaagctcatcatatttaaacgtttcaatgaatacgttgtagggcgtaatgcaatgcccacgcgtcagcgggaactttgcccggagagcattttgaagtagagaaaagaacggaaccacgcgcagcccacagactttctgttcgtgtctcacggcgcagtcttcccttggtgaccgcgagtgagttgggaacaatagtgcaaagatctggttaatatccacctactgtacctattgccttcctcacacatgtagtagcaggagcgcaaccgcggtacggggccgctagagtcactgtacacattctttctgcaatattacactcggcacctcgttcaagacttgccgagacggactgtacggaccccctgcgagttctctgaagtactgagaggaatcggtttgcgtcacggggagagagatttgaatgatggccttccgtgaaacgccctaccagaccgaatatcggggagactgaactgtatagaaagcgtgctcaaaggccaaggggctacaccagcacacatctgaaatggtagaatggtagagtagctggatagctttcccaaacgcggtgtccaaacagttttttgatcaaaatctttactgttcacgtacttcaatggcgaccttttcctgtactctaaagaggcccagttcagtcggtaaactggttacgaattcaatttcgttggcttttgtcttctcctattcaaagagaaatactgtagagactcacctagtttctcatcctgagtaacaggaattgccgtagacgacgtaccactatatatttccatctacatacacccataagtaccactgctcagtgtacaccagaaaggatagtttctttgtttctgggaatcccagctcgtggctcatgaactaagcgaagtctcacgannnnnnnnnnnnnnnnnnnnnnnnnnnnnnnnnnnnnnnnnnnnnntcttcctccgcttgtacgcgcagagcaggctctccgactagtcgaaaggtgcctgcttttctcgacttgtttctttttccgtttcgcatgctgttcttccaccagagaataattccggtgtcattcggtgccttcaacttcccacgcgcgttgcctgtcttggagctccgctttgca

SEQ ID NO: 3587 - DNA, 3522 bp, Toxoplasma gondii
  source 1..3522: mol_type = genomic DNA
acagaaaacaattcagaacaacgctttccaaatttgacagcctccgctgcttccgatgctcactgttcactccctgtttcttccccgcctttggactgtccttccggcgcttgcagtttgtccgcgcggtttcctcccgccgacgcagccggggcttctccgggagaagacaaaatgtgcgggatgaacgaagcgggagaaagggtaagtgaagaggcggaaaaggtgagtgggggagggagctttaccccaggggaggcttcagcggaagagctggaagaagcgacagaagatgaggctcagaaagtgtcttcgacgcagtggcctgcacccgccgccgcctgtgaaaagggagaagcgcccgcgagcaagccgcgcagcggtaaaccgagcggaaagccaatcgatccacagaaactcggtaaaggcgcccagaggcttgcagcggctgctccaggcgttgcacttgggcgcgcctgtcggcctaacgcagaaaacaagaaaagttcagactattcgaggagagccccgacagttcacaaggacgtagacgttgcgggagcacgtgccgtttcgcggcgtcaccccgagcgtctgtcgcccatcaaaaactcgatgaagggcccgggagctgcggcctcgcagagtggaaaccgccctggcaaggcggtggtccaaccccagagcgtcgtggaagtttctgaggatgtttctactgaaacggagaacgcggcaaggggaggctccgggaaggaagagaaacgcgcgcggtcggtgggcggggactcgggagaaactgagaaaagcaaagggaaggcggagcaggtagacgacgaacagcgacgccacgggttgcgacgaggccgatccagcgatgggcttttcgtcgggttggaaagcgataaaaaaaagctaaacacagacggcgccagtccagcggccgcccgattcgcgacttctgcgccttgcggaattgaaggtgcgcgcggaatttcgatggaatagacggggaaacggagagaagggcaagaaagtccgggaatcatggaaagaatggagcagtgaaattctgagtcgtgaactctggttttgcagccctcgggaactcagccatttcagcgggcacaaaaatccactgttcttcaacaaagtccatgtgaacagccgttagttcagctacacgacggtgtagcgtagtttgtcgaactctcaccgtcactctattctctgacgccacggtctcaacaagccgctcggtaaaggcatctgtattacatatatatatatatatatatctgtaaaaagaggcctgtcgatgtgttgactatgcacatatccttggacaaaagtctcccaggtcctggcggcagtttattactctatcttccaggaccgtgtaagtcttacacaaccctttcttggcgtcacctttttgtgcggtctgtagcccttgtgagtaaacttgtaaagacgctggaggattctcgttgacttttttcgaatcttccgatttcggaagtcgcaagagctccccgagtgagagtgctgtgtccgaaagcgtttcgaccaggaggttcctttgtcagaaacccgaagttcagcgttttctccatgtttccccggagagtctcggcctaaaaaaagcgagtcgctccccaccgctccttgtgtgtgcaatttgtcgaaacccgtgggagtaatgatacacggtgcattctatatctagatcgtacatcggtcgcaaggtatacgtgggatagcggggcaggtaacactgcaagttcgagtctgcggactgtgccaataccgggaaagttcctcttttctactacgggtttcggtcctgtggtgagggctgcgttctgagcggagcattagactacagaaataggcgtttgaaaggcgcactctccgaaaaaaacaagaacgtgcgagctggacagtgaaatcgaccaaaccacgatgtgcagtgcgattcaccgatcattcttcacaaccttgtacggagcacgcaacagttttggaccgcagataaccgcatcccacgaacctttaacagaaactgcggagtcatctaggtagaaatcgtacaaagagtaattacgtccatctgtatgtctgaaatggtagtcgtcaatttacgttagacgctaacacctcgaattgcctgcaaggagttcagactgcgtggtttccccgagtttccactgaaactggtgtatctgtatcctttggtggatgcggagtatcggtggctaaacaaaaccgaaaagtctgactcttgcagtattttctcagtcattttgtggaaatcgagtcaccgagagccggtttactcaagaacccgcctatctgtcgaggactacgcaacggtcaagcacgtgcaagatttcgactcacagcttgaagcaacaaaggacaacagcagacagcttatgtctcctaggattctacagctaccgacgatggtacgacagaattaagctttccggagagtttccacgttgaaaacctttcttcctcgtgcaacagatttactttgtagcaagcagagtcaaccgagatgcgccactggcagtacagggaaagggtgtctgtacgacgcaacagtaggaacttatcttctacccatggcttttcagcgtccaactttctcatggagaagctgaacaatcgaccaaaaagcaaaaaatcctaaggcgcctttacagacagtgaagtgacgtctggtgaccgtgggtatgattatgcctgcgattgtagcgcagggcgtaaaaatagcaaacctaatgcatggcagcgtttcctcgttgaccactcgtcaccatgatagtgcttcattgccgaatggaagcgtagggagtgaaaagatggtgtttttatgttatctttggagtgttccagaagcagccgcaaagcctcgcgccaagtacatccgcatgcagtcggtgccccgttgaacagacatctctttctctcgaatatctgcctctgttgaaggatgtatctgttgtttcttccttctcttctagattgacgctgttgaactcgcctctgcggtggcaactccaagaagtcgtagcttgaagagttttttcgtcgccgcgtttcagggtctttccttgcatgctacactagtgtaggccgcgtggtttgccatgctatcgctcttgtttcaagcggatttcctcgtctcgaaaaccttcctcgttcgggcttcgagcgcccacctagctcgagtaaaagtgcccatgcaatgccgcactgacccttttctttgccgtttgcagattcgcgccaagcggtttgttcctgtttcttttccggtcttgttgaaggggacagcgagagaaaaagacttttcagaagatgagagtatgatcagtaccctctccttcccaggagtcttcatctctgaggcctgattagtcacacttcttctctgcagtgaacagaccaccagttcgacttcggtttaggtccagaagatccttgattaccggatccctcagtccgcggcca

SEQ ID NO: 3588 - DNA, 4560 bp, Toxoplasma gondii
  source 1..4560: mol_type = genomic DNA
tcatttagagagtttcggcaatgaggatcagatgtagggctgtttcgttcttctgtgcatcccagcgccttcggaagcatccggctgtctccgcgatggcgtatcgttatatgacgacgcaggtgttcgtctcttttgaaagaggcggaacaacaggggcagctgaacgggcgctgtgggcagacacgagagggcaaaagcaccgcagcagcgagtttccaagttacttctgaaaatcgcttcacctgggcaaagacacgaaaaacaaattttccaactcaaaaggacttatagtcacgacctgaatccctcctaatcaaacaaagacacaagtggcatctgcctttgcagtgacaacctacgagtttgccccggtgcgcgttgagaggcgcgcaacacagtcgtgggtctcatccacactctaactcgctaagaaaccaggacgtagagcattctccatccagcactattcagtggtgaaacagcgatggtcgccattacctcttcggtgtggacagccgcgtggcgccgaagatgtgcagcctttcgaaagcgcgcaccgcatcctgcgacctgacacatgtacactcgcggcaaggcgagcgtctcctgagagcggatacaattcggagggttgtctgtttcgtccatttctgcagagaacgagtatgaagaagctatatcgtggacgatagcctggtgcctcgtttcgagcaagcgatgatgggtttagggcaggcgcccatcagggggtacagggggcgagggtctggcgcggaaggggatggcgaccgtcagccacggtctcaaatcagttgtgaatttgcgtcccaaacaagcttattgtcgactattcggtggttgaaaaaccgtcaacgaaggctaccgaagaggcaaaagaaaatgagaaactacactcgagaaagtttcaactataggcagattgcctagcggagcctggggtaactccttcggtagcgacctcttacgtttcgaagcgacacgggtgacggttgtcctcatataccaagcagctgaggacggtaatttcggacagccaaaatatataaacccgaagagcgaattggggcaactgccggctcatggcggtgaagatatgaggtctttacatcagctcggatcggcatcgggagattctgaggatggagccgagcccattgtgtcccggaaaaagcatttcacacagcaagagaagagaaaactgtggtgtggagcagctttccgtctgctgccttgccaggtaaacggcagaatttatggcgccagcaaactggctgatttagtcgatgccctgtgacgcatgcgcatgcgatttcaccggtgctacgtcggcgagctactggctcaatcgcttactcttcagtcgagaggcagtctttatacgaaaaaaccactatgtcacgtgactttacagaactaagctcgaggataccctgcaaatctgtctcttcttggagtctagcatgcgtcatatcaaggaaggcgcatgcttagtctctgactttcgcgaggagcctccagcttgcgggcaagaccacgccatagaagcgtggcaggtaaaagattggcgagccatgatgctagagtggcaaagaatgatgtgctcgggctggattccgtgatgctcggtttatctactcgcaatggtacaattgcaaaacatggtcaatctatgagttttatgttcgtaatgccccaaactcactcgtctcttgttgtgcacggcagccgcccaacctcgttccaactccgatgaagtcgagctctcttgtccagttctcactgttttgtccacgggcgatgcatcctctgggtgtactgtggtacatagacggcgaaggaactggcagtttaccttgttagagcctttacaaagctgggcaattggactcgttccagctcgtgatttgattcgtaaacaagcagctaaacggtctgaaccagtaatccaactcgtactttatgctcaccagaaccagcttattaatgatcctgtctcagaggtgatgggtcccagtacgatggtgctgacaatgctagcgtatgcttggtagcgttctctggttgttgtcggggcctccagaagtcacggaagcaaaaaactgtcttctctaaatagaaaactcatcccgttctttgtacgtcggttcggcatgtactccattatgaactgagaacagtaagtcagagcaacagagggaagttttggacgtcagattcatgattcactcaaatcgttgacatatactcggaaagagactgcgccctcgagcggcaatggtagataagccattcccagaaacagtgtgtttccattgtcgtgctcaaggccctaacggttgcacgaaggtgaaattatcttcgttactatgttattattcgtgcttacagtcggctggtcataaacaagcccactgcggtccacggaagtttactgagttagggagttcgcacgatgatgacaatctgacctctcatccattcgtaatgaagctgtcgcgtaacgtttgtatagagacgcacgttctgaaccacaaaacgtcgccaccattcatggcacaggtgacggtgttagcgtaacttggtttttttactcaagaaagatcttctcagcctcgaaactacgatacccgcaacgtctcgcacgcagtggtgttcgtgtcatttactctaggaggattttccagtggtatctatgagttgaccaaagcagacctacttgcacggcgtttactgaccgagttctctactacaattggtacctcgtctacacagaaaagtaacgatgcttacagtggaggtgttagatacttggttgtgtgcgcctgtgtcacctacaacagactgaatagcgtagtacttgattaaccgtgggaacacctgcagtttatctcattcttagcatatatatcgttcagaaatacctgagaagtctatgtagataagttcaggcgctggcgttattttggaaacgcttggaggccctggattctcgccggtgcgagagacagccgttgcacttcatgacacatcattcccgaggagacgcatacgaaaccctttaaagattgaaacacaggggaaggaaagtcgctgtatagccgtcatgttcacctagatacagctccagaaagtctgtctcctgatggattctatgtggcgaactaattcccctccttgggtcccaaggtgttttccaaaggatgccgtccccacgtaatgtacaacagacttccctcaaccatttgtgaagttactcagaccgactggtctcctgaaaatgcgactaatcccgagccagaacaagtgatagctgaaaatggggatatgcgtacgaggctctcggctctatgtacagtcctttttcgcatgttctgcatccgtgtcggtcagtttatgatccttcttcgatatgatgccctctaatgaagcgcgacccgtccgagggagagctgcttccgtgcttcgtgtcttccgggccgtatgaatggagtgggattccttttcatgatcactgtctagactgggagttaacatcgacaatacagtaccctgattcagtgtatgcgccgctagctaaaaaaattcgtcccttttctcgggattcgttttctgttcgttcggtgggggcaacattcccctcgaacagactggcagtcgtgagttgaccgttttaaggtcccaactccgaaagtgcacgaagaaagttttggggttcgggttactttagtagctgcacaggactatttcccgtcttccttctcatccgcgcttacaattggctgttaactgactgatcagtgtgtgcgcacttgcgcgtcacgtagcatggcgcgcgagaaaatacccgcggggttgatggaagacgaagaagaggagtgaagaggcaaggcgcaggggtcccagcaccctcaagatttgagtctgcctgaagtagccctgccagtagcctcctgagggccgtgaagtcgtgtggaaagtaccgagaaactcgcttttgcagttgcttgtcgcacaacgtcagtatccatcagttggacgaaaccgggttcgtacaccatgcagcatgtcttgtctgcagttgccaaagcaaccgggggctagagtcgtggcgaatgctaggaccagcgaaccctgctgcccggtcaccctgacgaagaagtgtgcccactcagcaacggctgattgcatgcgaaccgtgcgccgggcaacagggctgtctgcactgggtccggctccgacattccgacttctctcaaggccatccagttatcgttcctgtatgtcagaccagaaactgacagagtatctatccgcgggccggaaggccaagcggaatcaccacagtccccgttcgctgttttcgcttcctagctgatcttcgcggcccaagctcaattccagcgattgtgggaaacgacgcagcaactgattcttctgcgtttcgaagttcaaggaggattcccggtgtacggaggcagagttctcggccaagagaggtagacgcaggttgggtacttctttgcggagcggcgttga

SEQ ID NO: 3589 - DNA, 1919 bp, Toxoplasma gondii
  source 1..1919: mol_type = genomic DNA
gcaggtccaaaatgcagttttattcttcttcaacggactgattcatgcgcgaacatggactcccgaggaggagtcttcgttctgggtgaggtgaccgcaggcacccagccgagactcgagcctcagaggctttttcgcgcagagagacgcaattcttggtttctttaccggttcctcgttgagcagctggacggcaaacgtttttgctggccgtgcatgcgccgagaactcgaagcgcggcaccggaaactgtaaaaccgtaaacacccctctgggcgtttccgactctccacgcgatgtcctgcttttcgtggaaccagtagcttctgagttagaggctcagcggtttcgcaaacaggagtcccagtagaaccttgaaattcaaaacttttctcggtatcacgcagtagaaaaagttctccgcccgcagctggaagacgtgagcacggcaacctacgtcctagaccgttgctttgccctaggagtccgcgaggcggcaggctgctccggatttttcggagattcacacaaaccgaccgttttatctccgtgaatattagtacgtactgcgcgcacacactctaattcacagcgaagaactggatgcagaaggggaacaagagcggcctccctgttcttcggggactgcttttaaaggctcctttggcttcctgagaagaatgtgcagagtgagtaaacgactgtgaggggggggaacaagaaaaaggcacagcaacagagggaggagacaccatgctcccttccttccagaagccagagaaggcgacgcgacatgttctcagggactgcatgcgctccagagatccgtagagatcaagacggggaaacagattatcagagtccagtcacgacatacatgctctctcgacgcccgtggttactaggaaagaaacacaggcttttctaaccactctgtcctcaagactctcacgttcgtatttacgtcatacgtcatatatatatgtgtgtgtaagccaggtaaactaactatatatatatatatatatatatatatatatgtacatttatatatctgtacagatttatatggacgcgaaagtgcattcgggtgtcgcgtttcgctgtttctacggccctcgggacgttgcaggaaagtggagacgttgagtcagtgatttttttcggactcattccccctcggttctcgccgcgtctctgcggtccaggcgaaaactttggcgagaagtgacctctccgaaagcgcatgcgttcaggttttgaggccgtcgcggtcgccttgacggaagagccgctcctcagctctttcttcgcagatgcggtgtctcttgttttgcgttttcgagatctcgcgacgcatggcgtcagagatttcggtgtttcccgatttttctcgccgacgccagcacatgcagattctctctgcacatctgccggtcgtcaacgcaatgcatgcacagcggtgtgcaccaccggcgcgggtgcagcaaggagggtcggtttccatttgcttcactttgttgtttgccgctttcgtttcgaggggcgcgagaacctgctggtacgtccctcgagtcttcccttcgtcgcgatctgtggaggcagagccgctttctctctgcacaccacaccgagcaggctgccgcgttgtttgcttgtttgcttccgagacctctttgttttttattcttcacgcgtcttgtagtcttgcgttttttcagcttctgaactttctcatcgtcaaagccgagaatctggtaggattcacctccgacacaggcgcctctgcaggcttcttctcagaagcagtcctcgcggagacaggagtatttgtcagctgtttccggggagtccaggcgctacacgttggactcagagttcagagcttcctggttttttctccccacaaagagacacca

SEQ ID NO: 3590 - DNA, 3407 bp, Toxoplasma gondii
  source 1..3407: mol_type = genomic DNA
ttctggatgattctcctcttccgcgggctcctcaaacgcctaaacagcaaaactgcgaagagtcgagtgagcgggggcgccgcaccgtggaaacctgagtgcaggaaacgcgagtacagggtacggccacctggagagggtggcgaacggcgaggcgacagcaggcaggacgaaagcaagtgcaaaaccgggtaaaacgctctcctgaactttcttttccgttgctgctgtctcactgtgggtgcgccgcgacgcgtgcaacgaaaaaacagcgactgaatgagtgtgtagggaaggccagaaagggccaggacgctccgtcccagtgatatgaggttagacagttttgtgggtgcgtgtcgacatgcggagggaatctcggttgcagctctgtgcagaagaaaaggcatcggcgtatgtaggctggaagacacgcgtgcaagctgccgcgcatttctggaaacaaaccttgtccccgctacattcgggagcattccattctatttgatctggtgtgtccacactgatgcgactccagtcaaagaaacagagacaccgttgtaccgaaacaacacacgggggccgccttcgcctgtccctctgcagaacagcacgccttgcggaccccgttttgccggttgaaaaaagagtagattttacttgcgtattcgtggatgaacagtggacgctgggtcgcataggtgagcagagagagagaggcgaacctattttgtgcatatgcggtagtgtttgtacacgtcggtatgtacacagcacacacaagcacagggccgatcggactggcgtctgggacttttgactgaaacctgcctactttatttggagctgtctgagcgacttcgacgcgttgcgttctgtcctgggagcaacggcgagcgatggcaattggactgccaagcggctaagggaaagtaacgtgtcgtgtggtcgcgtgcgcacaagccaagcctcagttttcgaggctgttcaggctcgtaaccgcgaatatctcttgggtatgacgcccaggtgtgttctgtttcttctgcgtgcgcatttgtgtgtcggtgctctcacgtggcggcttggcaactcgagcaagggctgcatgtagagcgagtgacattcgtttcggttgcgttttgtgtgcggccaccgaagctgtcctgtgaaggcgagcgcagattcagttgtgaggctgacggcacaagagaaatcctgcatctcacatatacagtgggaaattgacgcctccgtctctaactggacttctcctcgttcggtaaatccaatttctgccttgacacattacccacactcacgatggaccgaaaaaagtcgccacgctgggtggacgtgcgccgcttctactacggtcgtgagtgggaaacgcagggcagcacggacagttctgtgctgaaagaagaaaggcaagaaacagaggtggaggaaaaaaagggaaaggcagatggaagaagagagatgcaagaagcgggtttgatacgcggaacggaacggcgggttgtcgcagcgacgcactcgatgagccaacccctatagagggggccacgcaaacagtgggctcacgtctgatcagcatttgagaatatttgttgaaacatacagggatgaaatgtcggagagcgatatgtgtcgtttgtttttgtgtggcggggggttttcgtgtgtccacacagacttcccgtcctgcacggtatcttcaagccgtttgcaggacatcaaagtaaacaatcttatgtgagcgtctgcatgtccatcaaacatgcgatctcctggtttccttgaaatctattcggaagagaaggcttgatagtgatgccgtgagtacataaactagtctcagcagtagcggttaaactatttggcagtcgagaactatccgtacatcccaggcgtaaaaagctgctggggtgctgtcggaatgaaactttccacgcctgcgttccagagtaaaagatccgtctgtatcaccactgtcggcttccacgaagacatgtgtcagggaccagcaggtctgttgcattatatcgcggggaaatggcggtttcagctgcaaagccgcttgcaagcccgcctcccgagacagctcacaaatcgctttgtgatgtaaaggtataagtgacggagtgttgcactgctctgaattcagagttccatcccggttatatctgattacctcgattccgtccccgagcaggctgtcaaccggatgagacgctgtagtcgggttattagtaggaactttgtgtgaatgctgcgtgcccatgtcgatgtggtaaagaggttgttccagggatacatcattccatttccaatactgctactcatctgcagcttttagtgcacgcgttacacctcacaaagccgtcggaggcaaggcaccatgatagagtgagagtcttcgcctccgctcaccttctgcacgcctttactggtaggtttgaagcactatgccaaagttgttccttgccaatttgatcttttttacaaatccctcgcctcctccagaagattgactagtgtccttctgcaaagctcatggtgagtgctgatccggtgcggcgttgccctgcagtgctgcatgcagtttgtgtaggataccctcagctatctgctgaatggcccgtgaaccggatcgcgcttcactctccgaagacggattttctcgagctgttcattgatgtgcgggtgtatgtttcgttttctccgtttcccctgcctttcttccggccgcttccgtctaaattccgctcacgtttgaaatattctctcttcctctcgggctggtgtgtgggtcccgtaacaaaagaggggtataccgggtgcccctgtgagtggattttcccggtcttttttcgcagtctttctcacacgcgcttgtctctttgtgtttttctttccaaccgtactttccgagtccagaatcagcagttttttttaaccagaggccggcagttctcgacgagcgcatctgagcgtggtcacttgcgtgcaaggtgtgcagctggcgaaggtgccgaagagcaagttccctatttccaggtacagctcgtcgccgccgttccttttgagtagcggttgcttccgtgatctttttccccatttctcccctcacccagggaagttactatgtaactgggcaccctcggtcctccctctctccttgtcaaacgtagcagctgacgcaacatctgctgcgcggtgtttgcagggccctaaggtactcttgaagaggagcgacagtcgccgcacgacttgcttgcgcaggagagaaggagaaagaagagacggagggcagacagcaagtatcatacgggtatgagtccgtcacaggaaaaaaactggccccccctgttcccagtcctggaacggttcgttccagagca

SEQ ID NO: 3591 - DNA, 1328 bp, Toxoplasma gondii
  source 1..1328: mol_type = genomic DNA
ttttgaccgcctcacttgacaggtacccttcaagaattcgacttggatgcgcgagcaaacgctcacagttatgccaggggcctattatgtggagggtttcacttcttcttggtgatgcggaagaagtatccctgtacgttcaaccaagtggcgaatcattacagccaccggcggctgtgtctgatatttgatttgcagaagccggctcccacattctgattctttctcggtaacagccaccttcgtcatttcagcgaccgagctcatatttgcctatcacctaacgtgacaggaaacaatgccacaacaggcttcgcataacagggtctgaagcttatttcacctctctacgatagtggcagtcgcaaatcagtgtagccgttgtactctctattgggtgcttcacctagtacacctagccatcgctttgacttcgacaaagactttaggaggcataagctcatctagaagatagggtgtggctccctatttacggaatttaatcctctcgtgaccgtttgcttatcgaaggcagggaagggttaagtgctggtagcagctccggctttgaggtcagcaacttaaatcgcctctctttggaaatgcagttatgaccgccgccaatcatcattgcgaacatgaacaagccatttactctctgcagcttagactccccacggccacgtcatgaggtctgacgtggacgacaacgctgtcctcgtggttggtaggtctcatggattaacactcgttgcccttcctgtgatagcagtgtgccgtgcttggataagttcaaccgacaggtgtaggaataacacccggaccgggtaatggtacacttcagagaatctcaatttgatactgaatcttgcacagtggcatgttagcaagagcaccattttgttcagtctcttccacctttcgttgttttgggaacttcagccctcattaacctgcgctgcacgagcagcagatctacgaagggtccggcgcttgatttcatgagctgtatccgctagatttcactgtgattcagacgcttcagtaacgacagacgtgagcctgcgaatgctgcgtaatccatcgtgcatgcagtgttttttaagaagacggcgtgcgttacatgcacggtcgtcttgcttcgcagcatgcgttagccccgcccgccccatgaaggcgtctccctgcagatcatcgccgtggcttttgtgcgggggacgggtcagaaggagcgagcgtgcgcgcgcttttctctgggttgtgagagtcccttcagacagcgttattaattccgttttccttcgctttctctccggttttcggcaaaa

SEQ ID NO: 3592 - DNA, 1671 bp, Toxoplasma gondii
  source 1..1671: mol_type = genomic DNA
gagatgcaggtgaaggcacggaagaccggaaaaagagagaagaaaacggacgagaagaaaagggagaagggagaagaggcgacgaaggagacgggggagaagaagaaggggaagaagaaatgtgtgaagaggcgggtggggtcgagaagggtgaagaacatgaagaaggcactggggattctgccgtgttttgaaagactcgcaatgcatgtggacaataacaaaacgaagaagtaacctggggcgcgaaagcactggcagaagaaaacgaagacgaaagacactgaagggtggggggagatgccccgagaaagagaagagtcttcctcttaaccggcgacgtcaggtggagaaaaagccgttcgcgtctctgcggctgggagggaggaccttgatgcactgacatgttgccctgaatgttacgttgccgtgtgtggggaggaagagagtccctcccagaaagagaaatttctgtcgcaggcgaaaatggctgagggtcccccatctcccggcttctgtgacaagaccgcggaattcgctgacgccgaaaccaaaggcgagacggcgtcatctcgcctacaaagggcggcgagacagaaaggcacctcatttctccttggcgaggctttcgaatgaagctccgatttcgaacagagtgagcgccagatctgcttttgtggcttatatggaggcgccgcacttgcaagtgcagctggttctgtccactcgagtgaaaggtggctgtgtgcgttagttctttcgtacgaaacaaaacttcaggggccgaagggcgccagcgaggcagaagaaagtgggtccgcgcatccgtggcaaaagacacagagggaatggagaagacccgacggagaaaactctggagagaaaaagcaaaaactgaggacatgcagagagaacaaaagtcgagcagaacgtaattaccacgaggaagttgggaagcaaactgtgagggagagaaggaccaagcgcacgaagaggccaagagtcggttagaggcaacgagaaaaaagagggaaggaacgaaagtctcacgaagcgacaccgcagtgactgctgaaaggagtccttcttcaaaaccagagaatcccaagaagtgatgtttctgaaagtatcgttttctacgtggagtctcgcggttttaccgatggattttgcgtgcatgcgataaacacacacacatgcaggcggtaaaatgtaaagcgtggtggctttgctctccaaccgacaacagaaaacgacatgaaggaaagtttccagaatttctccgtgcgacgcaaactcatcgatttaacgcgcgcgattcacctgcaaaagtccttcatggtttttgtctttttaccgcaactgtgtggttttccgtaggcgaccgttgcagccgcctgttgtcgcaactcttccttcagagtcacacacgccagtctttgtcgtcctgtaaacaaatgtcctttctatccgtttcgggtcctgccctctacttaggaacggagtcgctttcaagatctgtgtgtctgtcgcgatgtgtgctggagtgacgacagtctgtttctctgatgctcgttttccgccgcagacgaagttacggtttctcggtttcggtctttcttgttgcttttcgcttcactaattgatgtgtgttcagacgatccgagcgaa

SEQ ID NO: 3593 - DNA, 2321 bp, Toxoplasma gondii
  source 1..2321: mol_type = genomic DNA
aaaaaacatgtttccgtgggctgccttccgttctgtcggtcgcactgaggcttacctatgccaagttcttcctctgtgtagatccgtaagccatcggccgttcggttgatcgcgcgctggttgaggcccatgtcctcatcaaaggtcaatggtcgtcgcttcttcttctgcccagccttgctgtgcgctgtctcttttctcttttcccttttctgtccatcttgtttcttccccgcttgcatcacatctgcaaagaggtcgtcgatttcttttctagagtccttagatttcttcccttcttcagaaacgtctgccgtcttgtggtctgcaggcccttcagcagcctgtgtgtgaggagcggccaacttgtttttccgagatttctttgtcacggaggaagcagccagagaacgtggctgatccgaaggggagctggaagaggtaggagactgagggggctgtctcgcgtttgtgactccagggagacctccccgggtgtcggaccccaatttccgcttcttctttgaggcagaaggaagaaaaacagatgcgctacgagatacagtagacacagcagacgacgaatcctgtgcagaagctgtcccctgctcccgatacttccttttgactttctgtacgagactggttttctctgtgcgttccgctctaggacagagaattgcagctttcttatgtttctccttctgcgtcatcttcgtctattctttcaaacggttccccacttttctgtcgacgcccaaaccttctctggtgtgaagcaacgtaaaggacggcaaaacagtcagaaacgcgcttctgggggaaagaaatgtaacgcgtttttcggagggaacaggacggcgagtcaggtgaggcgaaacgcgactgaccaaccaaagaaggagacagagaggaacgagagacgcatgggtaaacccccaactggagacaagtcgtcgatcagaagaagctcctacgcgcgaacaggaagaaaaaacggcgatagaaacaggagaaaaggcgagcaggtggcgaagcgagaatcatgggcacttcggagggaagggagagagaggaaaggaagaggagaaagacgagaaagacaacagttgagcgtacgggtcgcgggctcaagagcgagatgctcggctggctggggacggggcctgcagcggttcgctggagcaaaggaatgacacggatttttgcggatcggcagagaatatgcggaaacataatactgcctcgctttttcagtgacggggacttgctttcctttctcttccgtcaatgaagctacaaacaacgagcccgcttcttccgccttttcgcgtacttctggagacccgagcgcacgcatgcgatggggatcgacatctcgtcgctctcttcttcccccccacctcaagtcctttctttctttgtttctcttttgcctcgagtttgcaagacaaagatagccaagacgaacgaggacgcatcagtcagctctgctcttccctccggagtctgtattcagtccttttcgtctgccacctcttaggccgtccaactctcacagtggcgcgacagcggcagtctccagttccgtctgaacagagaaaagagacctgaaactcacttttcaattgtttttcctcgccttgtcctcccctgatgtccaccgtctctcccatatcgttctttccagtccgcgtccccacgttcaaacccccgactccatcctaccgtcctcccgtgcaggccgccggacctcagggcctcgttcgagagttgtctgaggacgcggcgctcgactttctttcactgcagttgccttctcttcctgctctcgaggctactcgcttccaccctcttcgcgttccacgctcttccagctgtccccgtaaacgtcttactagttcttcctgctcctctcattcgcgagagaagacgcagtgcaggggacaaacgaggacacagagagagaacagcgcgaaagagtccagcctggccgccatttttcctggggcgtcgctgatctggtgagtgacggcgacgggagaggagagaagggaggaggcaggtgcagtgcgagggtgaaagcttcttccctcttggtttcttcagtgtttccgtcctcacggctttccatttgcatctgtcttcttccgcctcggtgtttcgggacccgcgttttccggtgaccatcgttctgctcgccgtcgtttctgtgttcctctgctctcgacttgtgcggaactgactctcagttcaatcctgcgtgcttcaactcagttcgggtctcgtcgtctgccgtcgtttgcctggcctcgtcacca

SEQ ID NO: 3594 - DNA, 1188 bp, Toxoplasma gondii
  source 1..1188: mol_type = genomic DNA
tgtatcccgcgtattaccgcggcctcaggatgtgacgagccgacatcgaggtgccaaacctccccgtcaatatggactatctggagagatcagccagcattgcatcctattaatagagaactgcataggttttccatgagatctatttggaagaagaggctcggatttccactgtcaaatactctttgtcagctacttccaaaggaccagtcttcggccgaaactgactgctgttgcgtgcttgttttcgttttattggccctacaccggatgatggccacagaccgcatgatctatccgtacctacgccgtcctaggtagtctgttcgttgaaactcactaaggcaagcatcaagaagattcaggccctacttttgcccgcaacaaaggtatttgtgctgtcactggactctttcagtgacacgcggggggaaggctacagcccgaaagcatatgtttttgttggaaatccacacgaaaaggcaatggcgattgccgtttttacccactgaactgaagtgtttcgtgtatttgcatactctcttcttcgtgttatttagtgtagggaccatcgttgctcgtctccaacccgtcaagacggacagaaccggatagttggtctgcgaagttcccactagttcgtacgtatacgtaacccaagaaacgaggttggcatggaaaaatgcacacaccttcaactgatgccacgcagcggcgctgcacccctaaagtgtaactcatcgctgtaagtgaatggacgttcagacaactgaggtacggggaccgctccgtccctgcagcgtgcatgcaccgattccagacaaacgtatgcacactcacataccttgcggctgcgtggaaacccagtgcgtccccactggaaggtggcatctctaggcagtccttctctaataactggtcgctggtaaagagctattcacgcttgctgtacaaattgttatccatgcgcctacattccataggtttgagacacatgccttttggcagcacgttcggcgccgtcagacgcagcgcctgtgttcggttggaaaaacgtcttcccgtgaaaatcgttacttactcgaaggggctgcagcctcgagccactaagcgtgcaagtttgtctgcgtacttgaacactgatctgttgttgacagaatcatcctgtgttgagaccatccgtggaaa

SEQ ID NO: 3595 - DNA, 3016 bp, Toxoplasma gondii
  source 1..3016: mol_type = genomic DNA
ggtttcaaaggctcgaatatggctaggctttgttcaaggatatagaggcaaagcgagcgtctaagcgggtcaggcagtccagcgcattctgcggtgttaaaagcattatttcgttggcaacagagccacaggaaaggcaatatcgaatgtgttcagagaccgtctagcgcattttggatggaaccgacggtcgttcgctttcgagcacaaagtgtgggtgtctccattttccagtcatctctgcgaccgagacacccttgtagacctcgaaggtttctgttcgccggatccaagtttcagtgtgtcagcatagttaagatgatgactgcagaactcgatccaactagacgccgtgtattaatataacaaggacaatccgggttatctggaatctttggcacgacattaaaacctcgtacatgcagacgcaacaggatttactccgaaagtgcccttgctacagaagaaacccacttggtcgctgaaaactcacggaagtgaacgcgaaagcagaaaatgacacagagcttcctggttgtgttccagagagcgacaaacacggaactttcggcgaacaacgaaaatcactgcgttctccgtcacacggttcgctggacgtagcgtcctttctgagtgcatgcgctcggtgtctgagtggagaccttgacaatggagagctctttcaatcacggggtaacactcattgtcatttctcgacgacgcagggaggatgcgatacagcagtgcgtgaacgtggaaactcgtgtttgattgctgtgctgcctctctcgcgctcctaatatttctggtttgtcgcatgttcggttgtgtccgttatgaactgacgcacacagagacaagttgaagggttctgacctgagacgctggtcaggtctgcgacaccacaggagtaagccagggaagagaacaggaaactgtaagatcacccggcaaatgcggaaccagttagcgtggaaaaaggaggaattcgcggacatcacaacgacagatgccctagatcttcggaccggatacacggagtagacagattcgttgtctatgtctgtcgtatgtcagccacggattcattcagaagctcccacaaccgccacgaggacaccggtgaacaaacaacgtgcctacacgcactcaaatagctctcctcacacatcctctatttggtcctgagtctgcttcacggaaaccaagctggcaacacacgagtcaagaactcctcagagaacatggtctgttttacttgggctttcccccccgtgaagggtctacttcgtatgatacacgcgagaccaagacgcaaatggcttctcctctcattgttgtagcatcaggttttgtttaaccgtgtctatcaccttccattgctatgttatccgccgccggctgaaagttctttccgtttctgccctctctgttggcccgtcctttgtttcgcgatggtcgctctaccagacagcattttcattttcttccaccattagcgattttgagtgcagtccgtccaggtgtaggctacagaatgcctcttttggctgatatgtgcccctgctggtgacacatggtcaagaggagacgaagcttccgtctctctgctgcgatccgatgccagttcgcacatccctcgtttttaccttccgtccatacgcctgttccgcctgtcgctcttttccctttgacagtctagcaggtgagttttctcttcaagtctcgcggatttcaattcgtggggggtctccatggacagagcaaccagcagtggcgtgcactattctcgcactaggcatggtgtagcatttgggcggggtgctttaaagttttgtcgaaaaaagggagcctgcggcgatgtgcgctccagaaagtcgatagtttagtaaagacaccaaatcaagctgcaatggctgttttgattggcattgcgcttttgtgtgggataggcggaaaggggaaggcttctttgaagaaaaactcgagaactgaggtgtgctctcctcgccccatttttgtgttcgattcacaacagggtaggcgagcagttcctctttgcctcagacgttagtgattcttttcgatatacttgagcaaattctgaagtttcctttctctgggcaagcctcactgccggagacaggaaaagcacgctatatcctctcctcggcatgtgtaggcgaaggtagatcatgcttctctcacgtatagcaagcatgattttgtcgcgtatctgtgtggtggtttgactatttatttttgggctgtttagcgtaagcggcctaacgtaaagtgaggcacactccagattttttccgtgaaagcgcccgacacgtcccgcgtgcttttcacagcgacacggaaacagctttgtttgtccttagatgcttctgcggcttagtctctcacctttttcatttgttttccccgcattcccttccgcggtgtcattcccgatctgtcccgtccgcccctacggacacatctttctattcacatataagaacagccatatgtttgctaaaaaatgcggaagcatcaaggacagtcaggaagcggagcgtctctttgctgcttctagttcagctcacagagaacccccagtttccgctttctcgcgcaggttctcccgtggcggttcaaaagcgaggaagccgtctctgacagaaacgcagggttttacagatctacaggagacaggaaagcacagcctcggttccgtttgtgtgccccttggagtcgagaacgctctgatccgtgctgcgtcgggcgcgaaggctttttcgcagggtcgcgctcgtgcttttgctcaaccttggccgttctttcgctctagccgctcaagctaagcgtgtcgtttttcgtgcgttttcttcatccgtgttaatctgtccattcttgtgaccggcgttcgcgcgccctccctgcgttgctggtctttgcgtctggcgttcgtctgtgagtcctgtctctcgtgactcgccttgtctgtttcttgtttcttatcccagga

SEQ ID NO: 3596 - DNA, 2896 bp, Toxoplasma gondii
  source 1..2896: mol_type = genomic DNA
cagcaacagttcgagcaggcagcatagcctgtgtcagttccctctttgcagccagctgcaggaacccaggcgcagcacgacggcctcgcgtttttgcttgccggagaaaaatctccacagaggcgtctgtcaccggaagctgcctttaaattttgacccaaaagctcggaatggtaagaagccgccagactaggtgtatgcacgccgagcatctgaaggtgctggattgtgtacggcagggtaattcgacgcctcgcgggacaggcgatccgagaactagggaatgaaagagatgcctcttcgttcggtttcccggagtgggcgctgcagcaggagcttcggaactcttcctcatcgtgttctgaggcatttttcaacaaggaatgacttcgctcagacgcaggtgtcggccacagcgcaggtagtgccacgcagtgaccttccgtggtccccaacgtcacttcgctctcatcatatccgccccacccaccgctaaaaatgcatgccgtgatatagccaagactggacgttttccgaacgttcatttgtggctgtgtcgctgccgagacaggtgtggcacgttccgtctcaggatcgaatcgtcccacacacgtcccgtcgtctcccgacgcttcagcacattcttctgttttctttgagtgaagagggaaagacacgtttccttccttcccgcttggactatttctgccttcatgactgtattgtaggaccgagctcgaacggaatgtcgactgctgtttgcactcttcatggcgtaaaagtccggagggcgagagacgctgcgctgtgggcagaggattatcgtccgttggggctgccgccgactcgtctgttggatgtgggacttcttcctcttttacctcatcggcgaagaacggaagcacatgctgtacgccatctcccaaagaatagaaagacagaacaccggcgccggtgctgctgatccaccgcatgatcggaggcgtctcctttcagacgggaaaacgagggcatttagtcgatttcgacggtagactcggtttcctttcaagaaggaaaaatacctttaggaacaagtgaactggacgatgctgtcaagaaccgacgacacggcgcgtggacgaaaaatgggcggtcactaacagccaaagctgtctgcatctctggggcaacatgcgacatcgaaacagtcagtgaagtggtcttggcggcaagatgcgtgctagcaaggtatcgtagacgcagtgtatcagaagaggcgtgaaaactgccgaatgctctcactggggcagagtttacacggagttgtcgactttcggcagcgtggacaaacatgccggaacaggaagtgacccaaacccgacaaaattaaggcaaacctttctccagaaacaaattcgctggccagcttgtctccgtcgcaaagggtttttagacatttagagagcaacttctaaagccagaaaatgcgtacggcaaccttctaggtggcagagcactctagaaaagctggcccgtgatcgtgtgaacgcgcgttggtccttcccaaacgagccggaaagcagatccttcgagcatcccccggcacaatatggtgacctgtctctccaaaaagctgcccctctgacggagttggggtagatttgaagagcaggcacatttgtccgacgactgcctgtttctttctctcggttttccggagcatactgaagaatcgattaatattctggtgcttgagatgccagcctagcagtctctacagctgccacagcgatttgcgagaggtagggccacgaggttttcttttgtttgcgagaagcacgcgcgttctcttgagctccgcatgtagtttaaagggaggcggaagacagacgagagacaccgagacggcaagacagagaacggccggagaaagggtcactctggttttacgtcctctgatctttggcggaagaaaccagctgcgcgggtcgcctgctcccgcgacgcctgtcccagttcgagctcgaggaccagcttgagagagcggcgactctgcggtggcgcgcaagtaggcggggagctacgcaaacatgcagaaaagccgcttgtcgccgcagatatctaggcatatttggtgaatcggcatgttttgaggggggattttcgaattcatttgatgacgaacttcctcacaagccagtaaagagcggagcgggagaactccgtgcctgagcacgagccagacgacacgcgcgtgcctgcggcgaatcctgacctgcaacttctaagttggtctgagttttcaaggttcttctacggaaagaggctggatcggatgtacagatcggaacaaaacgatttccttcttttttgttttctgcctgacgtcctgaatgaagaagggcagttttctgccttctcattcccgtctctcctgcgcgcggaacgaagtgacagccgctccgtgcagcgaacacgcgaaaaacagccgtgggtgccccttaaattccgtgcatctacatgctcaggatttgttccggtgactcttttggttccgcagttgtctctcctgtttgcgggtgcgtccaagagaggtttcctgtcgttgttctctcggaattagatgccgctgcagtgtcgaatatacaccaggagacgctgcggagtttcactgcgtcatcgtcagcccatccctctctacgatcttcttttttcaaaccacatagcaacgcatcggggaagggtatacacaaagctttcttcctcagtgcccgttgagacgggcgttgttcagtcgacatcggaaaggctgccgtcgattgcaggtccccgaaagtctctcgcctcccatcagccgttccttgaggacaagaaagttgaccttcaggtttcaaacagaaaaattcatcaaaca

SEQ ID NO: 3597 - DNA, 1407 bp, Toxoplasma gondii
  source 1..1407: mol_type = genomic DNA
tcttttcgtttctccaaaaggaaaataccgtcccggctccgactctgatcgacacgtcggcgaacggcaggagaacatcatccacaacagcttacggtgtgagatgactttttccttcctttttcagcagacacctttggttagaagacaagctgctttctgtttcaagacctctggttagaagccaaactgctttctgcttcgatatctttggctggagaaaatgtttcctgtgtctcgaattgcatgtggcgaagttttcagctcacgcatgtggtcgacgacggtctcgcctgggagcacgaccgcgggtctatggaagctgtcgccgcgtcgagtgaactggatgtttgctgcaggttttccgtctccgtctttcagcaggtgttcgtgtttatggcccttcttctttttcgcagcttcccagtcggcactcgtgagctttcttggaggcagtgcgtcgtttctcaggttctccatttctttcaggcgcggtcttgcaggcgaagtggagtcgattctgccctccacgaatttttctgtcggaacgaaggtccccgccttcctcgcttcgttctcctttttcttcgctctttcttcctcggtcgcgaattcccaaggcccgccctctccgtaagtgaccgacgcgcgcggccagtagagcttcccgcccatccgtacttctttccttgaccccgatcgactttccttcttctgatcttgctcgccgccagatttcggcgacgagacagaggagctgtgtttttttctctcggcgccgcctcgacgtcgcctcgacattctgcggtcgttgccatcttgagcgcgcggcgatctggcaccacgatccaaagaatccgaacgtttccgcgacgtttcccccgaacgggtgcttccttcgacgaccgaattcggagagttgcctcccgacacacccagagagtggctagagagttcgagcgaaagcagggaagcgtctgggtgcaggactgtctcgcgatcaggaggcgacgacccgatttctgacggtgcgcgagaaccggaaggcgaaagtggacttaacagtaggggagagtcaggcgaactcatgaggacagcagactcggagtgatccggcgaaaccgcagaaacgtcggaagctgcagacacggacggcggaagcggcttgaccggcgcggcgctcccacgagaaagatttgaggcagaccggcggctcgctttggcgagggagccgcctggagagtccattttgcgtcgggagaggagacaaggcagagcaaagccgagaagaaagagagaatctggtctaaaaaggaaggatagaggcaggctggcgcggaaaagagccggtcgccgacgatcgcccgcgccccgctactatatacagccgctggccgagacgacaga

SEQ ID NO: 3598 - DNA, 1479 bp, Toxoplasma gondii
  source 1..1479: mol_type = genomic DNA
tttttcctcctgtgtcgcttctctcccatcgatacctttgagggtacgcacagccgttcctctctgcacagaagagaaaacagcaaagggagaaccagtcgaaaaacctcttgtcgcaaaagaacgcgacatgcagaagtggaggagagagagaggaaagcgtctcccctgcagaacgacgcagagttgttgaagacagagaagcttcacagacaccagcaagatgatagaagcgcatgcagctcgtggagcagaaacgacgtcgcagtgacaaagaacagtggacggggaaactgggcaaagcagctctgaaaacatgatttttcagacgagaaatgtcgggggtgaatccgtagaggagacgaaggcggatggggacgagaatctaaaggaattgtcgacaaagaagagcgagaacgacactgcgaaagcagagaaagacgacgagagccgctcgtttcggactggagaggccatcccctctgaaactttaatattaaaggggagaaaacgacttcaattgaaagtgaagatgcggcacgaagcaaagagccgccaaagaagaaacgatgcagaggccggaagaacgttgaaatgaaggagagaaggagggagcgagggggctgtttgcctcctggctgtcctggagtctctcgacgcgaaacagaagtttcgccgatgaagtacgtccgcttctctctctgctccctccagagaaaaaaatgaggaagaaagaaggaggcgagggggagaaaagcaaagaaaacgagagaagaacgccagtctcattcaggcggagaggagagcaaggagtttcgcagttaagaagggaggtctggctgagagttctctcttcgaagagcagttggagttgtctcgtctctttcctcgtctgtccgtcgacctcgagggaaaacagtttttcctcattcatgtcttcctccctcttcgcggcaccgagctgcttctccaggaggttctctcgtcttcctcctacacccgacaagcctgtccagaggacgcagagcgcagatgaacgccggagaggacttcgaaaggcagagcgagagcgacaaggtggagacagaagagcgaagagaagcgcgaaggaaagagagagcgcggaagacacactccgcctggtcgagtccccgtcgcttgaccagctttttctcgtcattgcatgcgccggcggtcggccgcagaggcgactcaggcgcgtttggccggaaaagggagagaaggacaagaaagaagagaagaaaaagaggaaaacgaggaaaacaaggaaaacgaggaaaacgagggaagagagaaaagaagaaacgcgagaaagcgtccacgctggaaacggggaacgcacttgtgtcattggcgtctctccaccctgcctttctgtgacaggagaacttgccttctttccccactgtctctacgcgcaggaaaagaaactcgccgtggaaggaagagttctctaaa

SEQ ID NO: 3599 - DNA, 4780 bp, Toxoplasma gondii
  source 1..4780: mol_type = genomic DNA
catttcagaaagcaaaggcacctgcgtctgtcgggcaagatcggtgtcagcggccgatgcctctttctccggtgtacgtacacctcgcgtgtcggggccgcgagcggcgcaggcgttctctgatgtgtctgtacactcgagtctgacaggattcgctgccttctctccacatgcacactgactccgaggagggagttctttggatccaccgacctcgactcgctcggcattctcaacagaaaggacagaacaaggactgcaagcttgtcgcgagctagaatcagtttcctgcctcaggtgcctcccctccgccgtgctttccgcatgctcttctccgttgagtctcgaccccatttcgttgagtttaggaaaagagggagcactcccagtcggtcagtaaggccctgtcttgaagacaggagagggtacgagcagcagaagaggagagagaaggttcgcgttctctgagagacagagaaggaatccttcgctcctttctcgttctctggattcctctggacacaagttccctgcttcttctacttcgctgcgctctgtcgggagactgttcgcctctctgcgtctgcgccgtgagtgcgtcgcttgcgccgatcgcgggtgtatgtacaccctgcgtgtgtatcggtggagaggcctcgaagaggaggcgtcgcctgtcgcttctgtatcgaagccggtgagtctttgttgtcctgcctaaacaccgcagaaacactcgcagctcctttcctcagctttctgaaagacaggaaactcggacttccgatttttgggtcgacaggagccgtcagaggtctccattttccgtaagacagccgacagcaggacccggtttcttcccttggcagttgattttcttttcgggactccacgctcgaaggttgggcatgctccggccctgcagtgcggtggtgaaggcggacagctaaaaaatcttacagacgcatgcagtctctatctctagcggagagagactggagtgaaaaagtccgtatgtccagagggtcagcttgaaaaaacagagcacgatgagtcaccgaaacgagacgcctgagtcgttgattcccctctgttgcttaaaatggctttttccaaaagaaaaaaggagtgctgcctcctgacaggctgtcttctcacatttacttctatcgtctggcaatccacatgttgccctgtgactcgaagtcggaaaaaaggtctcgcgccgccgtcagagagacgcgcgagacagatactccacgggaggaaaaacctggagatgcatcggctaaagaatcacagattgaaaggctttcgagaaaaaaagctcgagaagaacgcaaacgtccaaagccgtgtctttcacgatgcagacctcgcttgctctcgcgagtctagtgcctcgcgagcgagagaagcgccttttgaggaaatggagacgcagcaccccgtgcagacgcgcggaatcttcgttttccgtgtcatgaattcacgcatgccaatgtgcctttgagaaatctttttcaagtcctcggtttttctacactttgctcctcaaccgtcgctcgcgagagtgtgcatgcaacggtgtgtgtcgacggatacgccgagtgccgcgaaatcagccagtttgaggagttcgcaagttggagaaaggcgcgtttccgcttttgcttttcgagtcattctcgacagaggagcaaagcggatgtgcagcacttcgtaacacagctcgagtgcacgattcgaaggatttccttccaagaacttcgctacattccactgttcagtgtcgctgcgccgaaaagggccaacacacttgcaagttcagcagaaatgaacactccacattcaaattgcatatcgagtttcttcggaatgggcctccagttgcgagctgcagacaaccaaggtctttatgactgctgcacaccacgaccttatgggtctgcttgagacggctggaaaatgcgagtaggactgtgtgacactggtgcccagctctgtgcttttcctctctttccgtttcagcgctgcacacctagatccttctgtgtcgcgcagacagtctcaacctactgatgatgtggaagcgacagttcgtggacttgctgtgagctccttttcttacaatgccgccgttctctcggtggcgttgtgggagcgtctttcgacccttctgtcaaggttcggggtcgtttcttcagcaataaaggcgacctgtttgcagcttgtacggttcctctgaagaatgcgttatagaagacgacgttcttccgggtaaacattggtgtgaatcgaagggaatacgcagagacactctacgccttgtgttgcggactaagactccagttttacgacacacagacagcacacgaccgcggagaaggcttttcaaatgccgtctctcaaaaatgcgcactagacaacattgaaaaagtcatttcgtccagccacatgtaagggcgcgggctccgtgagtcgactgtcttgggatttcaaaaaagtccacgatatacgcgttgctttcagacgagtgactggggaaagggaagctacgacagcacttgctgccgacacgagaagccccgagcgcatgaatcgtcctggagaactgcgtggcactcggcagggctcaacacagagcgatttgccgaggcactgcgagtgcggcgcttgtcttgggttgcgttgcgtcctcccacagagttttctgcagtctgcaaacagagctggaacgttttcttacacagacgcccccgctagtagtctctctggagacacagagttctctcgaacgctcactgggacgtcgaatatggcgaaaaggtactcgagtcctcggcctcccgcgaggcaaaagcgagacgcaagctcttcctgatcaacacctcggaactcagagagattctgacgctacttcgcactttggactggaggcactgctgtcgacgcaccaaagcacagcagcctactgcacatctgctgtgttctagacgaaatgcagagattcatgtgcattcccttgtattcatatcagcgagagaagcatttagtgtaactttcgtcgaagaaatcagctgtcgtattttctgcttggtcccagtggagccagggggcaacggcttttctgagtagtcgcagacatctacaatcccccattaaaacgattctcggctttctgcgctcttgttcagttcggcctttctccttactcactcctcaccccgcctctctagagctttcttgccccgcgaagtcccgaccacggccgggtgttttcgatgtccagatactgtctgagtcgacactatacagagaggaccagcgtcttccctctgcgcgcggccatactacgcggaaacgaaagaccgtcaggcgctaaaccagcagtccaactcgtcttcacaactcaccgggaaaaggtgctttacataaacccatgaatcccttacaacaccgctaacactcttcgaagacttgtcaagccgcgcatgacgcgacgttcaaccgggaaacccccaattcgagtgaccaaagacatcccagtgtacctcgagaagtacaaaatgaggtcctacggttcccctcagaaaatgtctttctcttggcaggtccagccgcgaactcgcgccctgtcgagcaaccgccaggtccaagcgaagctgtacaggtgattccgccgcgtgcggttcgatccgaggcttagttgtcaaagagtgcgtagactcatggttgcagggaagaagcaatcaaagaatgtaaataaagaaacagtacccttaaggcgtagagcgaaacaaggagatccggtagcggaattcagggcggtcgcgcgaaaaggagcgtccgccgtctcgccttctcgcactggatcactgttttcgacctttgtttttttcctgaagagaccttcgcggcatcagctggcttcagtcatctcagtaattgctctgggctacgtcttttgttaagccaagtttttccgccgcgcacagaaacgcccggcgaaagggctgtcgcatttgcagcccccgatcggttgaacagtggggcatgcgtagctggcgacccgcacttgaggacgcggctgtttcatcaagaaatgctctccacactccgctcccgtttgacttccttgctgccttttcattgagtgacttccttgacgcttctgtacttcttcaccttccttttctgcctgcgaagtgtcggaaacgaaagcgtcgcgacgcatgacggagacgcgcacaatcgaggagaggcgcgcctcaccccgcgaaaaagagcctcttgttgcgtccttcctcgacgtcgctgcttcgtctcgtctcgttggcgagaatgtcaaacagaagttctcgaacacttcgcagtcgaatgcagtttgtgcccccgccatccacgcgtaggctgtcctgcctattctatcctttttgtggcgctctcgcggcgactccaagagaggactgctccgtcgaggccgcgcaggagaggtctttctgcgaagcctgtcgtcgcaaccgggtctggatggaattcgtttaaagcctcgtggcacagaacgtcgacgaatggcggaaagaccgaaggagtgcctcgtcgatcgataaccgccgaagaagagaaggggaagagaccccggacgcgatcgtcccggctccgggtctgagagcgcgaggaagccccgccaactcgctcccgctggcttcgccgcgactgtccgaaagaaggatcaacacagcaacatcgcatgccagttttctcgcagtcgacacga

SEQ ID NO: 3600 - DNA, 2154 bp, Toxoplasma gondii
  source 1..2154: mol_type = genomic DNA
agtatctgggatgtcaggacagacaaaaggtgcacgcctttggctggcaggtttccgcactgctgcaccatctgaacacattcaagattggggcacagttacatgatacaaaccgccagaccaggagacgggtggatgatacataacactgaacgtatcagcataaactgctggtcgtggaagcgagtagactagttttcctgtacggtgtagacgtgtgatacattctccaatggaggcgtgtactgcaagttctcgtgaccggtttttggtttacataccgcccagcgaagaatgagaaactcagcaaatgagcacggtgtggcagctcctgcgtctcgggcttcccgagggatctcgtgagggacctgccgctggacctgcacctcggaaaagcaatcgcatttcgtatcgagaagaaacttcggaacgcggcgaattttcaaggaaacagtcgacatttaagctctcccgagttctgcatccatagaatcgcagcactgatgggcgcacagcaagagtatggttcatgcagtaaactacgcggactcgcaggtgatgccgtatatacaaggtagatagaggatctaccggctccgctatcaccgtcaggcacaacatgtcgatatggtttcatcggccagctatatccgtccccgtttattgaagctttagagacaagcactcagatttacagaaaggtagaaacggtgcacaccgaattcgtaggacgtccttgagccgcgccccgagttggtaagagtagctaggagttgagggacgccatgtgccccccctgaaatgccgccgttgcatattactttgtctggcgaaacgcttccttgttaaggagctggttgcttcttggaagttgtcaggtgaggaatggtcgcttccacggctgcggagcaagtcacattactttcgaagtctctcaacgccgtggcctcttagcgagatcatacacagcacaaatctataattcgtccttgcacagatagatcgtgaagatgtcctccaagccacgcagctctacgcggctggacagataaaagcacactaatggtcctcaggaggcaaccctgccatacgagcggttccgaagcacagacttgtccaggcaggctggcagccacttaacacttccaaaagacaccgcggaacacagtggaaggacgggagccgaagtgtccaacagtgggaaaacgcggaggcaatagcatccgcctgcgcaacactgacggtaagacgactcagctgctggtgattcttgcaggagggacatgggcgtaggacatgctaagatggcacgagtttgttctcggtgtgttcatccgccgccgagcatccttcgtgggttgccgctatcgtacaagacgcgttactcagtttccacgttcgcacctgtgcttgcaccgacctcccaacaaatttcttatgctcttggactcacctgaagtccggcctctctctgaaagccctgacatcaactttatgagcactgcacagggacccagaaagacggtgtgacctgcgttaactgtcgctctgcggaacagtttttcgatctccctgcctcaccaatatactctttgatttgtggcgtgacatggctacgtgttctgccgggtaacaagcagggcggagcagcggtgcaccagagcattgcgcaaagctggccccccttcgttaacgtgattgtcagaaggcatttaggaggctttgcctggtgactggtcgtcctctgtctggacgataagtcaacaatctggtcgtctgtgtctcgacgaacccaagcgatgtcagatggttttctgacaaagactgctgcgtccttccacaacctttcctaacctctacctaacgcgagactccattcaccgcgaagttgtgactcaacacgacagctgttccagccttccacacacttgctctgtgttacaatgcgagttgttcaaaacgtaggaagtactggcgtaaggaggcccttccagatccattcagacataacgacgacagactttgaggaatgttgtctctctgagtcttcgcgtccccaagcacaccgagtttttgatggcgccgacgagaaccgggtggcaaggcggcggtcggggtgtgcccaggattggaccaggaagaggcgctggagca

SEQ ID NO: 3601 - DNA, 1824 bp, Toxoplasma gondii
  source 1..1824: mol_type = genomic DNA
cacacagacgccatctactttcaatgtagcgataggtgagtttcgcgcgtcagtttcacggaagtttcgcttctcaccgacgccacagagaaactctctggacacagcctagacagaatcgcattcgctgatacaatgtgaaggtaggaaaaggcagagaaaggctaacggcaacaagtacggactgtcaactggaaaaagcagagctggaactctttttctgagcacgcgacgctgcacagccgctgtggtcactcgagcagggtgtctctgccggagagacagagagccacaggagaggagaactgaaattttgtgtaagtcgccttttctctgtcgcttctcttacaaagacaacgcatctgcggccttttcaagctgtgtcggtcgaaaacgatctgccttcatttggtttctgtgtctgactgccagtgttctctccacaaggccctctgtctctcctgttccctacacccaagggagggaagcaactcaatttccgttgctttgcccttccggtgtacagacacccgaacggaagaagaggcaagccagcgagtctgggagttctacatgggccagactgataattggtgtcgcagggcgagagatctttgccgtcgaacgctgctggaaagccgcctcgagtccttagaggagaaacaaatgcaagagctgcgtggaaagctcagcttccctctgttgaaaaactccttaaatcgacgtggaactcacgttattttgcttcaaaagaacgtgacttcttctgcagtgtttctgccaaggcgcgtgagaagaaccacacacactcccagcgagttccgagaaacgtctctggaaaagtcaggaaaatcctcaaacggggttcggtgacgaaaccccgttgtcctcctccgatgccttgtgtgcaacggagagaaggaatgttttttcggaagtcgatgaaacttcgaaactgatgcgaaacgcccgcccagtgttcaaaacgcgtcgtgctcttctgtttgtggaatcattttggatgctgctgaaggcgctgccacgaaggcgacacctgtctcctgcccatccgtgtctctcctgcatatttctgtctctctttcctctctgcgtttcttccttgtttctttcctgtctccttttctccgtcatctgtcttgtctctcctctcgtctgtggtacgtggaacatttgcttctccgagaggagaaaaatgtaatactttgaggccccctgtcgctcgaagagccgcggactctccaatcctctgtttctctgatttccatttctcggcttccccatatttttcggttgactttcctttctctgactcttgtgaaatccgagggtgacatgcactgacacacagtgcgcgtcaacaacgcgcgcagtgacatgcagagacaggaggcgcctgcagcgaaagggggacttcgaggatcctttttccccaagcagcatttttaggccgaagctccctttaacattttcgctgtaagaaggctttgcgaacaaatccaaaataaaagaaatctccgaagcacccccgatttctttaaggctgcggcgcgcccggccggaactgtcgtgtctccgcttccgcaggcaccacttggccgcccttttgcagacgaaaatctcaccgctgtcttgtctttttcaatgttttccgtttttcacgcgcttctctttctcacttcactcggaacgaactgcaggtaaacggctgttcgacctcctggagggagaaaagcgaggaacggttgtttgtgccgcatgcactctttgaccatctgagatgtcatcatttttcgactgcaacca

SEQ ID NO: 3602 - DNA, 2238 bp, Toxoplasma gondii
  source 1..2238: mol_type = genomic DNA
ctcttcccttggagtctatacgtcgacgcagtcgtttcttcgcgttccgagcttccatgcaatttttactttggcagagagagaaaagcaactcaaaaacgagagcagagtggcaaacacgagcgaagctgtttcagagagaccatgcactgacgatggaacttccccagttcttctgcatctttttttgtatcgttgagcaaatgttcgtacacctcaaagaagaccagccttctcgtgctcgccagaaaacaaagtgcacactgcctctgaaactcggcgacgcatagaaaggccaggagagcacagtttcacgttgtgcttcagcgcagcttccaggacctttcctaggtgcattgtccggccatcgaactgtctatatttttacctcgacaccgaacagatgccaccagacaatgaaccccaagtgtggttccgcctcctctgtagaaagagatggcactattgatttgcagaggcaagtctatgcaacactggctgcattccgttcctccttgggaacactctgagacgtataagtctgcttagcctctctttacaaatctggtctcgagtttcaggcagcgaagctcagatttgcgccggcaaatgccgagcgcggcaatgtcgggtcctgtggagagtccccgcgtttcgacaactagagttcacttgcgtttgcgttttttcgtgagaactgcaatgcaggcaacccgtcaagggtgtgtgtgcacatttggaggcagctcaatttccctttgtcactctcggaaatttagggtggaaacaactcttccagtgcatctgtttagaggcggatgcctcttggccagtgcgtgagctggttcggcagagagtcctggaatgtctatatttgcctgctgtcctgggagcgcgagcctgccctagattgaggactttcatgcacagtcgcgaaagcaaaacgaagagcattgagaaacgccgcagaaccccctactttgagagcacggaagcgggtgcgtgagctccttctcctccacagacaagagcgaactccacaccgcctttttccgtttctcgctgctcggtgggggcagaagccgcctcagtgctctcgacaggcagtcttttctcagacacaccacaccccctgagattctgcgttgccgcaggctgatacggcgatctaattgcccggccagcactgcgaacatcatccttgcagaggaactgcatcgtcgacagttaagtcaagggtgaaggcgtcctggctgagtcaacgaaatcgttgattgagtctttcgctccggagaactgtagcaagcgtttagtttttccgcggctccggttgagagccgccacctcatctggggaatcatcgcctcagaggcaggagtgtgtgtctgtttgctggggatacacacactgacattccccgcgttgggcagctcctctttcgcctaaaattctcgaagagctgtatccaagggccgttgcgctcgttgtgcggcaaagagagagcctgtgaggcgccgtcatttttgccgtcgactcgcgcgcgtggaagccgccctacttttcgaccgctgacctctttttacgccgttcgctcgacggcttctttcgctatgaaagtttccttctcgttctttcttcggaaaaggaacgggccgcttcctagaaagtcccaacttctctcctttccgctctgttttcttccttcctcccgtctctcctccggcagcaaggtgcctcttctctctcgcggtgtgcgcgctcgtcgcgcgtcttgtgcttgtctcctttcgcctgggggctttgcaccctcttctcctctctaccttggactttctcgctggcgcgtttttccctctctccctaagccgtccagacgcgagttcgctcccctgtctccttccgaaggcctcgaaacgctcaaagtcgacgctctgagggagtcgtgcatcccttcaacctacctcgaccaggatgcatcttagttccacggtttacatcgctctctccattgttttcagctcagccaccgaccccattgccggcgtttctcacctcctcctcacggaagcgccctccagcctttgcgttgcctcgtggcgtctcgctcctctcgctcttcttcgcctcttctcgctcttcttcgcctcttctcgctcttctcgccttggtggagaacgcttgaggactggaggcggcccttggatttttctccacagtttctcaagagctgaggcacca

SEQ ID NO: 3603 - DNA, 1760 bp, Toxoplasma gondii
  source 1..1760: mol_type = genomic DNA
cctgactaacactctgtaagcaaggtggacagaagaaatgtcattcgtcgagtgagcgacctctgccactctcgcgaaaagagcgcgtgcaggggctcgaaatcttcgctggttcaacatctaagaagtaacttttttccgtcgctgtcaaaacacgagggagaacaacaattcatcataaatgtattgcttccatctatatctatacttataagtgtatatatatatatatatatatatgtgcatatatgtatacttataatgtcttcgagttggactgcggggttcgtttttcaaggtcttttttgcttgttcccagttttgttttttcagcggggattcacgaacactgctgttggcatgtcggcgtagaaacgtttccacggtgacgttcgtttccggaatcgtcgatgtccagttgcatctacgagcgttctctgacactgcagctgagccccctgactccctctcacgtctatccgcgtgcaaggagacagacacaccagtctgcatgcgcacataatacgtttcagcgcttccttagaacgcataaagaggtgaaggtacgagccgaagtacgagtgaaagacctaaatatccaagtgtgactcgtagaacacaacgaccgatgtggagtaagccagtgggacatccacactctgctcgatatcgagcaggacaagagtgagtgccattttttctgtcacacttgagcccgtgtgtgtgtgcaagtgattggatctacagcagaaactaacttgtcctgcagttcgatcacagagagacccactgagagccgtcgcatttccaggcccctttgtccctgcagatttcgtggaaagcacagagttcgcatgtctcgctgaacgttatcagctgacctgaaatcccgtgaattgtgactgatggctggcaggttcggtcgctggtgtcactatcctgtgcagagcacctggcattttcaacaaaactggttctgacggctgcgcgagacgcgagcgttctgctagctgtgcatgcctcgtctgcgtgtgacgttctgtcatttttttctagtcgcatcgcagggaagcctgaacctgaagtgcttgaagagggaggtatgacagcaaagaagcgaaggacataaattggaagggaaaccgcggaacgcggatgatggcctgaagtttgtccacggctggagaccgtacaagcgtttttccccggacagacaaggtgttgttccacagcggtgtgcgggagttcgcaatagagacggagtttcacctgtttagcttttaaaacggagtttgttcgatgcagaaggaatttctttcgcgcaaacgctttatcgcggccgtttccttgaatgttcgttcgtcgttttccccaaggaggcgaaaactctcgaaacctcggagcggctggttgctcggctgtccgtgcttctcgcgggtgtgagcagtcacgtccgcctcgtccggtttctcccgcttttctttccgcggattcttctgtcagttcacttcgccttccagacacgttttcgaaagactgttttctctccagttttcttccgtgcaatccgcgcattctctctcgctagcgaagcgtccagaccccctctacacctgccgcgccggcttctcgtcgcagtttcgtcgttgcgttcgcgcaccctcttcccccctttccagctctgtttcgtgggatacctttgtgcccttgtcttcttgaaactcttctttaaaccgcgccacactcccccgccgccacga

SEQ ID NO: 3604 - DNA, 2013 bp, Toxoplasma gondii
  source 1..2013: mol_type = genomic DNA
gagagtcaaggcttggctgattccaaagcagctacctgaatgatcttggtgaggcggtgaaggagttcgatgaggacggccggcgacggattctgctgagtcgtgaggacgaagtagagtccgcttctccgcagaaacgcaaaggtgatgccgttgacgcaaaacagtggcgaggcttcgccagcggcgccgagcccgccgcggttcatcatcgcgagcatgccctgggcggcggaggggatccctcgaggtgcgcatgtcgatgacttccccgagttccccgaggctccagcgccagagaactcggaggtcgcggcagaaggcacttgccagcaagtcacatgtctgtagaaaatctctgcggcgcccttgggagcgtcgttccggtagtccttcgtgatgagacagtccccccgcggggacaaaacgtagaactgagaaagcatcgggccacaatcgagcagacggggggcgagaagaaggagtggaagacgagaggtggagcagaaagagggtggacaactggagagacaacggggaagcagcagacgcgtgtcagggcagcgaagaacatgcgggagacaagcgagagacagagacgaaggcggccaggtgaaaggggccggtcgacgttagagacacaaggcgtctggggagagacactgctgacagggagagataggaaagaacggcggcctgtcagacaagaaacggagagtccgggggtgtcgagaacagtggaagaggaacgcgacgagatccacgaggacgcagaggaacggcgactcagaaaagagagaggcgcagacaccacagagaatggtaaagagactgtagtgactctaaacacgtgaaaagaaggaaatacaagtgactccgttggtcacacacacagaggtcacctcgtgaggacgaggcgcggagatattggtggtgttcggagacgaaaaaaacggaaacaaacgggagacgagacagaagcctcaccgtctgcagagaacaaaacaacttccataaaggaaaaccgacaaaatcgctcctcgaaaagtaaaacattccaaagtcgctgggacaggagagcctgcttttcaggacccctggagacacggcaaagccgcgcgcacgcaggttccgtttttcgttcgtctcctttttcgaaatgcgcgagtctacttgaaagcaattaccagctctgagcggtatcacctgtttgtgcgaagcctggcgactccaaccagcatttccctcgagcagtcattttctgggacacaccggtactttcctgcagatgtctgcagcaattgagggacttttcgcggcaggaaacgagacagagcgtccgtcgcgcggacgagaattgtcgcatagaagatgtgtggattccaatcaaagagaaaaacgagaacaaaactcgggagaaccagacgacaccgatgggagcatttggcgacgaggaagctacccgcgatcgatcgatcgagccgtgttccggtgtacatacacctgaggtccccgcgccttccccggaatgcagacaggtttctctttccctgtagagaagcaaacgtacaggagggaaaagagatttgtttcttgtctcgaaaacgtgaccatcactcctctacctcgtcttgctcagtcgcaggcgggcatgcacaacgtgtgctctcttttcgagcttctgcatctctctgtagcagtttgccgcatgcgcgcaactgctcgttgcttcctgggctttccgatcggatcctgcccttgacttcggcctgtggttctgacgtatttcggcagaaaaatcttccattcggtcttctgtttctccgtccgctcgccgttccacccttctcgccagttcgtggcttctgccgtcgtgtgactcgggcgccggagagacggacaagggcaggtgcgacagcgtctgtcaggtttcttccgttcttcttcgtggtttcctcagtgtcgtttccgccgcggtctcccgccccctccaacttgctattgtcgacgcga

SEQ ID NO: 3605 - DNA, 4505 bp, Toxoplasma gondii
  source 1..4505: mol_type = genomic DNA
tgtacatacacccggcgctccttccgttctcgcctaaaacgaattccctcggacgcgcttttcccccgttttttttcgtgcgtggtccttcttcccgcgctctctgtgtttctcccctgcacccctgcatgcttctttctcgctctccctttgtccttcgtctttctccgtcggtccatctttttcgccgcacctccgagcttcactctgaggttcttgcgcacgactttgttcaggcgaatctttccttcgtcgaggtcctggtcggccaggacgacgcagacggtgtcatgccgcatctttcccttcagaaggacggtgtctcctcggaagatctgcagctcctccatcttcgctgggttcagcgccacgacgctgttgtcgtcgttgatcgcctcctcgacgatcagccgattcggagaccgcttcttctgactctcctcctttttctccgccggaacggattgcggtctgcgaatgccgccggccatcttgtcttcgcagtcgaaagaagcagcgcgtctacgcaggccgagcgttgaagagcaggtcgcaaaaaagtcactggggagagaggcggcagcggagggggagaggcgggggcgcacagcgaaactctctcggctggtgagtcgtcgccaggtgtgaccagcagtacggagcaaggttagcggatggaagcagagagctccgaggatcccgcgggcgaagaaaagaggaaatcgcggggaacggtgtgaagaaaaaaggagagcgcggctgcaggagacaggggtcgtcgagagggaggcgcgaaaagagcgagaagtccgcagaggcaggacgcgcgaccgaggagaatgcaacggaaatgacgaggcgaacgccgcgtgcagaggagcgacaaggcagaaaaaaggcgagggaaacggaaacggtctctccagtgcaagaaaagaaaaaactggcaacgttttctgcagacaccgggaactgcagttcttgcgcgcacgctgcgccggtgtctcgacaccccaaaaaccgcgagcggagttctcaacgcgtccggcgcctcggcgcttgttcagacatttctcggcaagactgagaaccgcgatttcaacacagaaactctctggagacgcagaagaagcttccgacgcgccaagcctgcagctgcacttttcctgaaaaccgagtcgcggcgtccacggacaacaaacgcgcggtctctggggggtggtgttgcagtgtgcgcgagcgccgagcaagcgccgagcaagcgcgccggcgcctcttctcttccctcgtggacagccgcgctgcagatgtccggcttcggtggcaagtccttcttggctccagacgaaaaacgccagccctccagcgatctttcagttgcacttcagcctcatttcagttgcactccaggcgaggaggcatggcgaagagacggacttctctccgtctcggtgctctcggtgagagaggcaagaaggaagaggagaaggaggaggaggatttaggcgcgaaagagccaggaaggactcgcctgcctctgcgcgaggatacgccacacagacgacggaggaaacagaagatagacatttgcacagacacagagaaagagcgaactggaaggaagaaaaggcgcgccccagggacgcggcaatccggacaggagaaaacaggaagtaaacaacgaggagacgcgagagagagacaacctcggagaaccgcctcggcgctcagagggaacagacagaagattcgactgtacaagaacgcttgagaaagggacgaagtttagacaaaggagggaagcacgacgcgcagctggtttacgacagaggacacagaaaacgcgagagattacacacaaacggcagacgacctttgtcgcagccatgctcgtcttcgatgttgtccgcttgcttatatatgtgaatccttcgaggggagatgaagtagagagggaagagatctacagagccgttagtggttcaagacggtgaccttgtcgtttcaacaagcatatggacgacaatacaagcactgtactcccccgtagagttggaactgggacgaggcgtctcagctgccgaagtttctcctgtattacctgacagcaattcgcggtgtgtgtgtgtgtgtacagccggtacagttgtcgttcgaggaagttcgctgcatcgctgacatcagacgtttctcgttcgctgctctgtacgaaatgcgatgcatgttctgtcactacgggggtgtatttatagattcggaatggagaatgcggcatcatgtgagagagggggaactgtcttgtgtgtctccttctttccttcctgtgttctcgccgtcctgcatccttcatcgtcttttctccttctctctcttccagaatatcccttctctcctccgttattcgcctttgctcttgctcgttcctcctcaccttcttctctctttacctcttgtttcattcctccctctttcttccttctcacacgcgtatcgctttcttcctcgtctcattttcgctctgtctgccttttcgcgttctccttcctctcttctccacttggcagtctctctttctttctctctgtctttctctttcgttcttctttctttcgttccttcgcccgccgacctcttctttctgcgttgcagtatgctgcgtctttctcgcctccgtttgtccgttccaggacctgcgcgtctctcctcctcaggcagtgaaacgcgcctttctcgagtctcctgcttgcagtcttggcgggacttggggagacgacgtctggccacagaagccgcgaacgcttcttcgaatgccgagttgtctcgccttgtgcctctcgggcgcgcgttttttctccttcgctcgcttccgtggaaggaggcagtgacgctggaagcctccgcagagtccttcctttccacgcgacggctcttgctcctcgcgctaagaatccctcgcccagagaaggaggaaaaaaggacgcagagcgcgtacccctcggcgtcttccaggagaagaggagacagggaggggagggaaacacagagagagacgcgacacaaggacagaagagaagacagagaagagaaatagcaaaaaaagagaagaaagagagagaagaggaagaaagggggagggaagagaagcgaggaagatactcacgccgtacgtagctgagagacccgccacctgtcgtgttgaatttgatagagtgaaatgagaatagaaacttcgaagaatgaagagaatctgctttttcgttactcttgagtgtcactgttccactccttttccatcctgcgagagtccgcgagcgcaacggatttcctctctcgccgtcctaaagagccttttgctttctcaacgcgcggcagtcagtttcttttcctctgactgctcatatacgcacatcgaggagagaggcaccccggtggtttccctggttttcaggtgcaaacaagctcaccagatcactttttttcgttggtttcagttcccctctgcccggtcggcgcgtggagttcgactcttttctgcatccccccgattttgtgcagctctcaagtgtatgtggacgtacaacggcgtgtgagaaagagaaaacgccaaaagagagggagagggtctctgagcgaggctctcctgttgcgactgttgaaaagggagaggcgaagaaaagcctttcaggtcgagagagactcccagtgggccgggggggatggacagaccgacggtgacattgtctctctctttcttcctcatttcttgacttctattttcgaatttctcctccgttttccacgatcctttcttttctctctctgcagctgcgacgcgccatgtctttcttctctccctcggcccgttggtgtgcagttcttctggaacgcggcgtcggcgagaaacaaactttcgccgttttctgattcgcgggaagggcgccttcgttcttctttccggtcgcgaagtgcagccgttcctttctttcgacgtcctcctccgttcctctttttgcgccgcttcatgcgccgagaagagaggaggagatagaagagccgcgaggcaggccggcgggccgcctgggaagagttcttcttttcgacacaaggcctcctgcaactgacatggtttccaatctccagcggaaaagctgagctggattcaagacgcagagcaccaaccggctgaacacggcgtccgttcttttgaaaagaaggcggaactcgcgtttccacgcagagagaacgagctgagcatcgtgcttgttctctcgacaaagaggcctctcgctgttacgtcctctccgtcttccgcgtgtactccgaaattcttctccccttgtcttttctctcggtgtctctccacatctcgccgtccaatttccacctcagcgacgtcctcgaactctcgagcaggagcctgccgcgcttctttcctcgcgtcgctgcttcttcgtcggccttccctcgcgcaacgcgtacctctctcgacttttttcgctccacga

SEQ ID NO: 3606 - DNA, 2049 bp, Toxoplasma gondii
  source 1..2049: mol_type = genomic DNA
ttctcactgacggtgaagctctgcgttcaaagttcgaaacgtcctctgagacagactcgcctgacgaagagcagacagcgactcgatgatgagtggggacacaatggcggaaggagggggacatttttgggacgtcggcaaaaactcgacagcgatttcttttcttggcagaaagaaggggcctcagcgatcagagcaaagagaacaggtcctcccgagattgccagatggaaggcggctcttgtcgccaacgcagatccattcagagttcatctcttatggaagcgacaggcgtagggagaagagcgagtcttgtttcttacactgaaagtctccgaatttcgacactgtgatgatgggggcatggtcgaccgaggggaatgctgcggcaagggcgcggcgaaaggcctctttgacctgcacgttcagagcctgcaaaccgcaagaccggaaaaagaatgaattcaactcgcgtcgcttccacaccccaaactcctgacttcgtacggaacgtacggaagcgccgagagtcgcgcagcggacgcggagacgagaaggttgcgcgagagaaacgcgagagagaggggagacggggacgcggagaagaagacgagagaggaacgcgaaggggagcggcgaaaggactggaaaacatacctcgagagaaagagagagaagaggcacgcgacgggagagaggaaaacgacatcgggggggacaagacaggggcggagagtgagagagagaggagaaaacgaggaactcgaggaaggagactgactttgctttcactgtaaaaagacaaaacggaggcggataaaaggtgaaagagggaagtgagagacgcaggaaggagacacccagggaccacaggagagggagggagaagcgtcgaaaaagagagcaacgagagagtctcgcgtacctgcatcgtggcggacagaggagaagaagaagctttctgaaaagttcgagagtccacgaaaatcgggggaagaataaaaatcgacgcgcggcgtctgcaccctttcaagtgttctcgaaagtcggacgccgagggccagcgcgcgtttttggagaaaaaaagtctaaagaagttgcgaagaaactgggagcacccacgaggaaggcggagagaagcgcaagagaaggccgggaaagaaaaagagaagaaagcgttctgaacttgcgaaaaaatccgctcttctgcagtccgtccggagagaaaaacatctctcagatcgcttcccaccgcaggaaaagaaattcagctcccgtgaggtgacagtccacgatggcctttctggatctggaagactccgaacttcctgcatttggaaaccgttcctgaggaaaaaggcgcgaagcgcccttctctctcgacctgtgtgtcttgcagctccgccgcgcatgcaagaaaaaaccgtggggtgacactgcggcgccgcggagacagaagagacaaaacagaggagacagaagagatgagaagaagcaaggaaggcttcggtgttcatgcatctcctttttctgcttgcttcagcaatctcgcattccgcctctactcgctaggcgaacactgtgaacagcaacgcccgcgcagcgaacgaccttttctcgatgttttaaaaaagcgtcagggaacgcaacgcggtttatagtcgtaggaagggtagaaaaaaagcgagaaaaaaaaagtaaacctcgttgagtcgttgaaggcgcggatctccgagagagcaaacttcctctctttccttctgtcctctttccttcttttctctttctttctcttttttttcgcttcttatcttctccctttgcgtctcggttgtgcagctggtgtctcgcccagcttttctctttcgtcttcgctcctttcttcgagtcctacttcttctctcttccatccacggtgcaggcgtcgtcccttctttccacgctcatctttcttcttgcctcaaaagtctcctcttcctcatcgtccggttcttctctcctctcttttcttctctcttctctcctcccttttcttctctcttcttacca

SEQ ID NO: 3607 - DNA, 3067 bp, Toxoplasma gondii
  source 1..3067: mol_type = genomic DNA
ggttgtcgtggcaaaaggagagggcatctcgttgatgaaatgtggagtcatgcagttaaaggggttctgggggtggggacatgagacggtgactgatgggagtagaccgaagtctgagttcctggcttattcagccacacgttttagtttgcattccagtcaatcgtctctgcaatattcctacttctgggtagggaaaacctggcatcgggtcttacatgtggtgagtgtcgaaaaagggatgagaataaccgcttcgaaggctttccagcctcgatctgagagttttggattttaatgcatttttctcagcaataaagagctgcaatcatcctgtaaatggaaagctttggcgtgttactgcttccatgtgctatgtttatgtgtagttcggagctgggaacagcaaatacgtttctttgttctacgtcggtcgacctggtcaatgcctctgctccaatttctcaatttgtttcactaattttgccgggttcaggaagttgcattttacgggcgtggcgtttcggttagacgtagctgctgtgtacagctaccacacaaacgtcggcagctagtgcagttccctataatagtggtgactttactgtataaggggcgtacacaccaaatgggggagacacgtgccgaagagagccatatttccagtatctaaccctggtgtatgcatgatttccttatcgacatctgctgcggtgccacacgataaaagaacctagtatgactgacgaatttgtgccctgctgggggatgccgagaagtgaacacacggtgcctgctcaaaggaaggcctagagttcgcacgttctcttttgactttctcggaggtttagacagcgaaatagcaagcgtatttgctgtccaccacagtggtagagcatatgttaaccagcgaaaggcagatactttttgatataactgaaaccacatcccgctcaacgctacacacagaaatcttcaactttaccggataagttcggccttggcaaatttctggcgagggcgccagtagtcgcggattttgtggcaaaattgtttggccgactggttcgcagataccactagtggattctgccgctgaaggaaaggggtggcacctgaggcttctgaacaaagctcaagatacaagctcacattgactgttagtcggccatgtggcgttgttacacatgactttgcccctgcccgttcagtgcgtatttgttgatcaacatgaatttgcgtaaacatgagccagggacatctggcgatgtcgtgtagtacttatacgcattataggggtgtcagagctatgtcgcatgacagggaaaccgtgggaataccacgggcctatcatcggatcaaagcgccagcctcacatgcccttcagatacgttctatgccaacacgtgtaggcgtgttgtggctactacgagcgggggaaatccacgaggacaacgtgagccttgcagagcaggagccaaagtgctgggaccataatactgcaagttgccttgaaaagggggcggcaagtataacagtgacagttggatgccgactaattttattttcaccagcagcgaacatgtgatgacagtcgatgataaatttgcgggaaggatgccatggacggtacgatttggtatcatggactcgttattcccagaaacaggcagtacccgtcttgggttaaacttgtgggccgcttgtttacgttgctctgatccctctaatagcccactgctggcagctccttacggtagtggtcatagcgtgcaagtaacatttgtgcaggggtctctccttcgagttgttctttttttggtcacggttcctctggtacgtgcgctggaggctgaagcatctgtatgctgtgcaggcatcctttcccttgtgtcgcgttcacgtcatcagcgccacactgattgctgagagctgctgtccagcaaagtgtcgtttaaatgctgctccgtagttcccccagccttactgtcacaccgatgcgctgttgactggaacattaagcaaggtgagggttcgttgtcgtactcttttcttttcaaacagtatccgaatagtccatgtgacacaccacccgcacgtgttacgcgtgatcgatggcccttctcacaacgccttgtcatcttagtaaaatgccatataaaataaaggatccctacattgaagtcgcctgaaaaaccagagtgatgcatggacacccgcttgcggtaacattcttgcagcaggtccagcaacaacgactgacactgatgcagacacgcacacaggtgatatctcgttttttaatccctttattatattcgccagctgatggattctgcctgtttaccgcaccgttttgaaggatgcacctgctcgtaaccttgcgagcgcgtggtagttcctgtcatggactgacagtgtaagaccacacagaccctacgcagaccctgggacgattccatcatcagaaaagccgtgttcgaagttgagcgagggatcgtcactgttaaagcagaagactcgtccatcgaaagggagaacgaaattggatggtgtgtcgatcccaacacaattttcttttatttgcttttagaattagagcctggggctctcatttccagccccaccgttgtcagcactctttgttagcgtgcccggccgcatgcaggactgccgtttgaatgagacagtatgacacgtagaaaccgaatgtaagcttttgagggtgaatgaacccccccttgtatttacgatgctgtctgtggtagaaaaatctcagataaaccatcaacataccacgagatgttcgcgttcgcgtgtctgacaggcatctttacacacacaaatgtactggctgctaccttctgaacagagcatgttggctaccgtgccacatttttcttagaattctcaaaattttctgtttgaaaggggacgactgaggtgtgtcagaatgcggccagtgtccaagacccagctagtgtcggtcacagcatcggtcatgagcgggagcctgcgattcaaagcttcaagtttagtcgaagtgcgcatgttctgtaaccaataa

SEQ ID NO: 3608 - DNA, 1947 bp, Toxoplasma gondii
  source 1..1947: mol_type = genomic DNA
tctctagaaaccaagcaaatctcttgtgtcgcacctgtgcatgcgtagaagatcagcgacaaagccgagtccgaggccatatttctgcttcctgcagagcctcgcggatctctgcaacggatgttccgcgctgcttccccagggccgaaacgaggcgttaacgtggaagggaagaacgagtgtctagaaagaaagaaaacttcgtgtaataggacagacatcccaaaaacagtccagagagaaggagcgcgagacaaatatgctcttccatacagaacctcataaaggaattaacgttaatctaaatgaatatatacattataaatgaacatggacatctacatatatatgtatatatgtatatacttttatatgtttatattatctgagggaatttcagcgtacgtcagtcttgactgaggcagaagcggtataggacaccggcaagagaggaggagaggccaacgcttggaaggagtcgggggcgagagtctctcgggcattagagccatcaacctagtacttagtggagagattccattgtccaaccaatccccctacggatgtcaaccgcacagggacgcaaaaacctcctcatcgtctccttccttcctcataacgtttccttgtgtctctcagagggaggtttgaagccagcaaacatgcgcagtggttttcgacctgtcgttttttaaacagcctctccagtgtacgcacagagaatccacagtgtattgcctgaggctcttggcgcagccgccgcgatgcaggaaagaaaaagtaacttccgacggtctcgtctcgtctccgtccgactcggagatcctctcagagagcggatctgactgcgaccctcagtcacgctgcatgcatgcacactcagccatgcgcatatatgcttacatttgtacatgtctgtgtatgcaaaaggtttgggaagacggatgcggagctacacagagagaagacgccttctcagatcctagtctaaagccgacataccatcgaacgactgagggtgaacaactctgaggcaaagggaagggggggcttgaagacgagaaaaatgtgaggaaagaggagcgcgatccctcgaggcgaacgtacaaaaagcgagaggagtgaaaatggagaagaaaacagaagtctctctaccctgtctgctcgttcgttgccgcttggagacaccggagagacacgacggacgcgcatgcagctcccgcgtctgtgcatctgaggaaaggagaaggagcagagtcccaacagtgacttctcgacattcttcagctttgactagttcttgttttctccaccgaaatcccttggtcacagaaaaaaatccaggttagaagaggaaacgaggccggtggtcggacaccgtgacatctggtgcatgcgcagatgcgactgggcgctgtcgattgccggcgaggaaaacgcttttctttcgaagtgagctgtgaaggaagcagagaacaactttggacctgaaagaagaacgcaaacagtctggtgtaaaactcgaggagaaggcatttttcctccgaaaaaaacctgcgttgtgcggttcaccacggagagagagcgacggcgaagaaggctgcaagcaaagagaaggtcaacgaggacatgttgcctcttgacaatttctttttttcaatcctctgcagatatgcatgcgaagaaccttgaagatatgccttctttgtcctccgttttcctcgtctctgtcgactccccagttggaattggaaacgccgagaccccacaaaggcagagtagacagcagcgccggaacggccgaagagtttctgttccgactgcgacatcttgcgcgaccagaaagggaggaaaacagaggcctccgtctcggaggtgcaagcagagacgccatcgtgtctgaaactcgaagaacagtgaattctcgactctttacccttcggaaaa

SEQ ID NO: 3609 - DNA, 1772 bp, Toxoplasma gondii
  source 1..1772: mol_type = genomic DNA
gagcagctcatgcccatcatacaccagcaacctccaatctaatcctccttctcttggctacaatgccgatcaaaggaatttccaatggacaacaaagacggttttcttcaccatggccggcggactggactgtgaaaatctgtcgtgagctcccgcagcatgcgtaggacgggaagcagacaatcacacgaaaggaagcaagaaatgagttcagagaagtacggtatctcgcgagcattagttttatcttcggctccgtacccactcttctggacgggactgcgacaaaattactgctgtgtgcggaacggccatagaacactgatgtcgcaacactctctcaatcctcgcgaactcgtgcgctgccacgcagtctaaatctggcatttccaatctctacacttttcctcaccacaggtgtgactccaacactattcgcactcgataatacagtatcgattggtctatcttgagaagacatttgggaggggtaaatactgacccagctacacccaatacggacttgtacgttggaagtctcagaatgggtcttcgtgtgcatatgtagtgttccgcgagtgccagcgttccccttcggcaatcaacacttcttgttactcgagtgcccggatcgtggtggcagctcaagtgacgtcgctggtttgctgtaggctgtggttagtcacagaccataggaaattccgacatgaaactcctgttcctccgtatgggttccaaaatcgaacggtgccgctcaggacgatcctgggatcctacaagggacgcgaggtccaaagcaagtcttcgcacccaatcttccagctctaaataccctgcacttcttccctgcatgtctggggaaggaaattactttcagctcccgtttcgaaagcatttaccgtatgaggtttcagctgtagctacattgtttttctttcgctcctttcgttttgcctgtagatgacggaaagtttttctttcgatctatatgtgatgaagtaattcgtgcgtgaggggcacggcagctggcgtttttcgcacagcgggttgtcttgtgatttcttttcgcaaagaagccgaccagaaagtgggtcggtgggagggagagcgggcaaggcgcgtgatcacaggattgtgtgtctcctgggacagcagaggctcgggagtctaaactcttcactgcaagcaaggagaaaaatttactttttcgcgaacttcatgttgcttttgggctccagaagcaaggcagaattctggacggtctgcagcatgcatgggggttggcagcattcggcttccatccgtcacttgccgatccctgcacacttgcgaccgtactaggtgtgcgagacggttttcttcgctctttcttcttttgttggggaaataactcttgttgaacagaagacggttcctttttcgttttgggggaggcatttcgccctgcaccttcccgatttccgaaacacgctccctcaaaagtcttccccgagcggcttgttgccggatgctctaccccctggctctaactcccaagggcatgaggccgctttctttcgctctttctcctcaaacctctccccttccatgcacgtctttttacacattgatttctgaatttcttctcccggctgcctcccccaaatcaccacgcgctctcccggtggccagttccgtctcattgtgccccagcccacttcctgcggagtatcttctgtctgtaactttttctcacattaaggtttaaaccttagacacgacagtactcagca

SEQ ID NO: 3610 - DNA, 2722 bp, Toxoplasma gondii
  source 1..2722: mol_type = genomic DNA
gttcatgtcgaattcaggaggtagcaactggtgtctgagggagcaggatcggctgagtgtttgcgttttctgtagccgagacgcgtgcaagtttcttggttttgtgaagcgacccatatttcaatcttcttcgtctgtccgctatcaaatcaaactgaaggttgcttcagtagcgtcggggaaatatgaccgtaggtggactgctagacaggcatacctttctgcatgcgtcccgcgtcgctgagaatgtcattggttgcttcgctcgttttgcttgcctctgatcgtgtcccaggagtctggtgacacgacacaacaacctggcggtcctgacgatgccgctgaactcgacagacctttagagttttttgtaaaagaaggaaacagctctggcagtcgacgcccttatgagagagcgccagcttcaagaaagtgaagccgctacgcagagtatctaccatctaccctctatgatccccccgcatgcaaactagccttaaacacaccgctcgtcagtacaaaccgtgcaagcactacaagcattaattatgtctatttgtgcatctaaggtggtacttggttatatatgttgaacgctaactccccgactagactttgagctattaaacctgcctgggatcattcgagaagactctgatgacgtcgtcctaaaagtatctccagggcccaccggtggtttgtgagtctctatgtcatcaacatgtcaatgaagtattgatagcgatgaaggtttttgatcatcatagcagcataaaaaggctaagctgcaccttcagcatgttaacaaggcggcggcgataattgtatcccaagctcggttttaggttcgaatgcaccactgccgccacacggttttccatgtcagtacaatctccgcgaaagttggtgtaccataggtgaatattaaccctgcctggtcacgcaactgtcccaaaacttcgacttccgttgaaaggccatccaccgtaactctcggtgctcttgctgctggctgcagccacactcgtcgtgggggaagaaagttcactacaagcaaacagttttctttccgtaacgcgctcaccacaccctgaaaggtcttgatcgaagtggtgatgtgttcgacggcaacagtacgttccacacggctgcggtgatcgtctgtcctccatctagtggttctaccgccccagcagaggccgtctgttttctcgatttcggttttcgggcgctctgcttccttcttagatgcatgtcgaaacgctttcacaaacgaacctagtgacatgcgccctgtccggcaaatgcaagagaaaaacaaggcaggatttcgtgctatcagtcaagtcctccgtggccgtacgttagtatcacaagcgacgccgtcgtaaaactggtggatctaaagctctgctgcaccataagtctcacacccacggtttctaattccagcgcccaactcgcatttgtgaagacatgttgacttcttcgttatacacgcctctgagctgtcggcagtatgttaccgacttctgtatcggggtgtggcgcagcatagaagcccctacgatgttcgggacatgttcttcccaaagacttcggccggcgggcatacaagaagtattttatttactaaggccgcgaaacaactccaaaactgccgacagagtcggactcctgatcagttgccgttgctacaattcatgtctgcattcctccgacgctccgtaaaaagcacgggtgcatgcgatttccgcccggccgcgggttgcggtcttttggtgtcgatttttcgctggcgcgtttgggcaagaactgagaaattgattcaccggaattgtggctgcttatgactgagtgaacacttgataaaatttccacagtctcaaagtgacttttccgctgcggttcaccgccgaattctccgccagcgtctgcacgcaggaacgaactcggtactgcgcacccagtggtgccgttcttgctactctttgtgtttcctagtggctggtgcgccacgagcgttgtgtttttcttttctccggaaagatgggcgtctatcctccagtagctggcgggcctgtttactgggcgctccgcaacatgttcatcggagcccgccgctcatcccgtcgtctcatgcgcgtgtacgacatgaactgggacatctcgaaagttgtctgcaatggtgttccgcggaactcgtacaacccgagcgttaacgagtggatctggaacgtcgacacagatctgtggaatggcgcgggaggcaaggcctggttcgttctcagcgggcagatcatgttcacctttttctggtcgtttgccctgtacagcgttatcgagcgctggtacgtcaacggcaagatcgacactttcagtaagtggcaagaccgcgcgacagattaaagcgcacagactgagaaagcgtgactcgcggcagccattcgacgcggagaatggacccttctgaggatgttcatcgcgacaacacacttcccttgagtgcaggtttgcattcctcggaacctacgccgaaccgtccctctctcaggtcgccgacaacgctcatgttcatgtcctgaattacacagtcaatcgattccgcgatggttctgcgccgtttccgcgggtgtaggtgggcgagacgttgctccagctttcgagctgcgtgatcaagatggtgcctgccgagcgagttggcgcgtctggcaagcatcga

SEQ ID NO: 3611 - DNA, 4028 bp, Toxoplasma gondii
  source 1..4028: mol_type = genomic DNA
cccgaacggcttcgtcgagtttatgccgatgacagcctctgttgaccgttgaagcatttcggctaccttctgagaatacaatagcgcatccatccctgagtcacttgcggaactccgaataacactagccaagttctgtaatccggcaaaactaacgggtgtctccgcagtgtgataacccgtttggcgctgtccgtcacacagttcacgaatgtcctcccatgacacacctgcgaatgctgctgacattgcggactttgtcggtaattggctcctctgataggtcgtcggccctccttgggcaaaggaaaaaaccgcttcatccgaacaggggaaatggacttgcatgttctcgatattcttgctgggaaatacagagctggccacatgttggcaatctttcttcgataaccctccgttgcttccgcgtcgtacagccgctttactctggcctccaccgccacatttcgatgtctcgcttgatctgccctttccagagacgcacttttgcccggaagtgttcaactgaaccacagttatgccggggtagaaaacctggactggaaggaacgcatgcacaggaacgcgataagttatttcaccacttgactaactaacagcattgtatcagtgtgggcttctcctgcctgatggcttaccgtcaactcctttaaccacgcctagcctcagcttcgggggtttccgtctttctttcgtaccgtgtgccttccagcagtagtatacggcgcaccgggaagtttcgtgatcgtcgcattcttcggtctgcacacagagcagccagaaacaagttgcctcttggaaggttaacagtgacacattgacgcgggttctccctgcagtgagttaagtagaacaatgtgccagcttaccttatatagcaaagggtggtacacgatctcatctcgactgtgcgcaaacggacagttctgaccacgatggcacaggaccgctgtgatgtttccattggacaccacgaggttgctacacgcaactggcaagtagcgcagcagcgcccccgtacactggtggcgatcatcagatgaatttcgttgctgatgagctaccacagagaaaaacggcggccgccgggtccaaactgagctgtggcagtactggcagcggctggaggcaccacaaaacggcacaccaggtcaagtcacatgctcaggagtgggggcttgcatatttcaaatggtgccgtccctggagtgtctagaagcactagaccgctaagaaagagttcccgcttactctaggccgaagctgcacgagccctgggcgagacggagacatgcctttgttcggaagcgcagcaggtcatcctcggtaagcaaaggggggcacgccatagtgcacgaagattgttggagctgcaacaatcggcgtttgcgacgctcgtcactccagtctgaccggaactcctctcagtattctgttaattgccagatccgcctcccaggagagccagcacgtacgtaaagaactgaagctgtggccggtcggcatcacacctccaactggcaaaacggttggatggatgcacctcgcatccgcgattcgtttctgaactgtttgagcacaagaacacggaagacaaacgccacctgcagtccgctaaaattttgtccgttttcatttgtaaagagacaagaggatgtgcatcccttcactcatgtagcgtgcgggctgaagacacacaggacgcctacgagctagccgtatataggtacgtatcgaaaacaacagactgtcacgtgtggcatgttcttgttgtcatgctcatgccgagaacatctctggtgcgtggaacttacttttgagggcctcttgcctgagtcggtctcaatggcagtgtagcgtctcaacggaaccagtacggtaccgccctttacatcatagctaaccacgcggcctgccgccagaattaaccagacagccgagaaagtatacggtagatcataaaaatgtccagccggcatcccataggactccaaaaaccatacttccccgcaaaggcagctcccctcaatacttccagacactctacacactttgcaggtcaggcgacgaccacgtgcgcacacattctggagccggatgacgacagcgccctaaaccctaattacatagcccattggcgagcctaaacatctcgcgctggcacaaaaagttcccctcgccgcgagagcatcgtacagaaatgttctgttgacaatttgagtctagcgtggccctgtcagtgaccaaccttagtgtaggcgtctcaatggttgccgctaaaaggatggtgaccacggccagttttctgttcggcggtgcctgatgccgttggcacttgctggctgctcgaatcgcgtctctggcgctggcatcgcattgcagctttcctcaggactctaccgggcgccgtagagcttttaaccatggcgagtgtgttgagtgtgacccacaggctagtgagtccgtagcattaatatacttagccgcgttgctggtcaggccgtcagcaatccgcgacatccgtagacgccaccgagcgaaccgtttcttacagagtaactaccaaagaaggtaaatcctagttcgaattttcttggccacatcatcctgttggttaacaaagcaagggttgtgtggatgcagctaacagatggtccgcgtgcatgcggtatttggcctacaagagcagcagaacacgtgggttaccagtgcttcggtccgaactagcagtgatagttgattcgagcgtgcggagagctgcgctaacagaatggcctacggtgaacaccgaagcacacgaaactacctccaggcgtcaagatctgccacagcgagcgttttagagtacgccatcatccacgccggttaacgttgactccacatttcccccacgataacccagattaatgcagacgacctgtacgcatggttagcgtagacgcgagatctagacctcattcgactaatacactgtttccaaagagtgaagggagctgtccattggatcaattagcgctggtatcacttgtaaatgagctcgtcaaataagcatcgcacgcttctcaggcacttggcacttccctgtgcgagggatagagcggggtgggcgggcatgaatgtggtttccttgtgtggcaggggaataaggataagaattatgaacgtagctttggattatacaaggctcctcctcgcctgctttgttgcggagatagccgtggacacgacacaaaggctgcaccttgtataccccgtcgtcactgaatttatttataactcgcggggatatcactgaatatctggagatgttcctttatgtcggttctttgtctcgctactgtgttcgccaggatgtaacccggaattcgatgaatttttactaagcaaaatcctacggctacgtggcttcagtgttagcacgagggagccgtggtactggggtaccggcaaagctgcacggaatagggctgcagccagcatttcgcctacagcacagcgcgctcggagatggggctgggtaatatcatagggaaccatagtttgtttttctcgtgaaaactttcggaaattacgaacaagtagcactgtacgaccaagactcgtactgaatgttttcgctgtatctctccgccgcattattcaccttcggaggcatgcgcatgtactggtgtcgatgagacaagagtccggcagccgaattagtttgcactgaagaatctatatgccatttgccattattcctgcgcatagctataacgggggatgactcgttattggcggcagtgttacttcgtttggggaataccatcgccgcacgattctttatttttgcctgctctgctggttcgtcttctgtggttcagtgtgtctcatatgcctcttccccatcttgttggggtgacaccaccagcttgtaccgtcaccgcttagtcactcgatttacgctttgttctttcataggaaaaggagacgttggtgacgtttcccggtgttatttttggcagcca

SEQ ID NO: 3612 - DNA, 1566 bp, Toxoplasma gondii
  source 1..1566: mol_type = genomic DNA
aagaagagaaggttattcctccaatcacatgtcgcgctttggtaggaagagacatgtaaagaccgtgggtagtgaaagcagcgaatccgataatatatattggcgagcactttggctttttgtagtcactgtattcaacatggaatacaacgtgcggagaaaagctttttttcgcgccacttctgcttctgccgtccaaaggattcacgtctccgtgtagatctacaaaggaatcctaggctttcaagtcgctatgccagaactgagtgaacctacgggaaaactccgatttctatccttacctgaagcgaaagtacttcaagaggtgcttccggcagatatggatcagtgcctctcgactaggaagttcgttgcagtacattgcaatggtaatcatttggtggcgacatcctgtggcttccgggaaaggcactcctgccaggttgctactcgggaaggacatacgccggggaagcgccgagacagaaggcacatcctgacggaattcgtcttcggagtccacgttgcttcccccgtcatcgctcaatacctgaaaaagaagcaactaaacaaagaaatgccagactgatgatgcagatgaagcccatttctgctgaagaaatccagagccgtcttcacccctgacgcctgagggaaaaaaccgtacggagacggccacaaaacggcgaagaagaagaagtcatcacgccgtagcggcagtccaaattctcttgcttctgcacgcaatacaggcataggtttcgctagcggacaaccaaacttcctcgcagttgccgaccaggtgttcgggtgtccgtgcagtcgaaacgagtgaaaatctctcgaaacgctgcaggtcaccaggacaataaagattgagtgactcaagttgaagccattttcctgggttgtctacggtttggacttctcattgtacccgagccagttcaggagtgaccatgtttgtcgtatcaaggcgctgtgagaccaggcattctagcaacggcacccttgcgctatcgtcacgcttttcttacagagtcatcatcagcgctggcatcatcgacacagttcgtggtccgcgaggttcgtttcctccgcttgaagagtgagcagaaaagccagaatgtgaagaggacggagtggtaagtaaatacaaccaaaatgatgatgctatccaaaatgtacaggaacaattcggtggtcggtcgaaaaagtgcgatggagaagagccggcgcagaaacgtcagaaacacaaacgacgtcgacgcctccctcttcgagggttcacagagcgacgatttctcgagagccattttggagaagcgacggagagtaggccgtcgacaacgaatttcgtcctttcttccctgaagcggcgtatcccatcacaaagaaagaaccactcaggcaggttgtgtcggctgcgaaggctgcacctgatcgccgtaagatggcacagaggcgagtcacttcacggcgcctgtgtacacagtctcgtacaacgccactacagtcctttctggtagacggctccagtacgcaagaaggaataagggatccaga

SEQ ID NO: 3613 - DNA, 3163 bp, Toxoplasma gondii
  source 1..3163: mol_type = genomic DNA
ttcagttttcagcgccacccgtgatgcttcttccacaccaaatatatttatatatttatatatatatatatatgtgaatgttgattttcagtaaggaattgtgaattatggggtcttgttgatagggcttgacgccgcacgagacggactgcgttcttctcccgcatatattgctgtcacgtagcggagaagtttccagagaatcggaggatgttgaatagatgaactgcataaacacagtcggtgaaagctcattttgtattatttccatggtggttttgtaatttgtctgctttgtctgtcacctgcagctacacgtacaccaatgtcttcgataggattactgtttaaggtgggggtggattgtaaggcctctgccagatgcccagaagaggggtgtcgtacgtttcatgtgcgtccggtttcgcacacaagtcgggcacaaacggttttttttctcgcgtgcacgagagacaattcaaaggtgttcggtcggataagaccgcatatctaattctctgaacttgctgccgaataccattgctccaactgcctggaagccaacccgatatggatacagagaccatccggttctgatagaagctcttcttttcgttcaccggtcactctccttttagagattggaatcgtacctccggtttcactgggcaagagaaaatcagtgaataggtgccagtgtgatcagtaccaatgtactgagagtgagcatctctgagacaggatagtagtcggttggtccgcagacaaattctaagaaggtcgttggaaaaagacgcgtgtttctctggcaaacttcatgttcggctgcggtcagaattgccggtctcacatttgggttcacaatcgattagtggaggcaagttccctgccttgtcgtcgctaaaaaccaattgcaggtcatttgtatcgcatgggcttcctccaagcgacatgtgttctcgctggcaattcatacgatttgacgaacaaacagcgaggttcagatgattcggttcgggagtctatgttccttgcggctacgccgtcacgaacgttctgtttcaacagagcaaatgtttgccttctccattaaagggaggggctgcagcggaagttttcctgcagaacattgcctgtgccccgccaaaaaaccgaactgcttttcaaaatgaatcatgcaattgctcgctgaaatgtatacctgcagtacatctctgacacatgcagcaacaacagcgatgtagacaaaccggacacgaaactgcacgcgatttgtctcagagagagcggtgaagcgaaaacctccttttgcagagagagacttccatgcctgattttcgtgtgattctcatgtgaaaggcagaagcgtgttggacaggtcggcacggtgtcctgcatctcttgctgcagtgtcacctgcacctcttggcaggttgcaaaggtggcagatgcaagacgactaattcttttctatttggaaaagtgcctttgaaagattcgttcgaggccacaatattgctggagagttcactactccgtgatacgtcatataggcatgagtgttaggttgaaatgtccgaaaggcgaaattctacggcagacagtggcgcgtctttcaacacatgtgagggagatttgaattcacataaagaaaattgtgttgaggcgtagacgacttgaatagaagcgatgaaggaaaagctgaaaaaaagggtcgttgtagcgcttgggtcgatcattcagcctcaagagcccctgtgtcgaccagaatatgtggtaggcgaaaacgagggtggctggccgttacggccgaaatcgtgaaactgcttcatttggacgcacaagaaggaccgggtccagccagcatagttaattcattcacatatgtacaacaatagagcagaagaaccaccgtttccggtttaccgaatcgtgtgttgtgtgtctgtcgatctatcaaatccgtggttgtcagcgagagcagctcgccatcctgaatttaagtttcgtgagaattccgtcttaactgacttctaagcggttgtctgtcatccatttggtcttcgtaggtgatttttgtgccgggcaagaggaacacaacgcgttgaaatataccacggtcttgggggtcacaaaaaaggttgggtcctttcccgatcatgcatttccttcggtgacttaaagcacacacattggaaggtcatttgagtcactttcagcgcatcgtacagacagcagagcaaaggccattttggttcaacgaaacgtaggaatcgaggttacgccaaacacagacagtccgtgcttcgcctaaacgatcatgttttccgtatatgctttgttcaaaaacgcatgtattgctcaagctttttggttacacgcttgcttcgtgtcagacgtggttttagtttccgagacttcaatgtaatcactgcactgtaattctcgggaaagtgtctaaatacgggatgcctggacctgtactgtgggaagagactgccagtggcacaacagcgcagctgaagcatggagagagacagtcagagagccgtttgcttcgtttgcttgatatctccgtcgagtgtctctcgtcgtaaacgtggagtttcagaggcctatatatcaatggaccaacaaaaaaacgttcgttctcgattgttgttgtacaacctgtacaccatcagaaacacccttgcccccttctaccacagtgttcccggtcgtttccaagttagagtgttgtgctgtccctttgtgcgcctcattcctgtttctccatctcctggaaaaaggattctccttctcgtcgtttgacttcccctcccctacggtgtcgttttttcagcgttggctgtcgtggagcaggagcaaggtcgaaaggcatttgcaataccatcgaagctgcggctgtaactcgctctggtttgcttggtgtgctccggagcctttgtttttcagtgtcatgtctgtcctgcgtgcacagcttgtaacttaccgagttgcgggagggacatgtgcttcttttgtgtcctcaggcattcgttttagtggttttgaaacctggaaagaaggagtaacacgttcattcgatccagagtatagggtccgtgatattccgatccaatgattacacagacacccgccagaggcggcaatcgttcaa

SEQ ID NO: 3614 - DNA, 2885 bp, Toxoplasma gondii
  source 1..2885: mol_type = genomic DNA
aagaaacagcgagacgatgtcttcttttctttccgatgctgaacacaaaccgtgccgtctgcgccggtgttgcgcatctgcgcatgttcatttgcaaatttgtgtctgtacactcacactcacatctctgtgtgtttctttctcggcgcgtatgcatgacggaccagtccgacgcgaactctgctcagttctctcggctgtatctccaacttgatctgctgtccccactcggccttcacctgtcgatacgtgacccgcggaatctgacggggtgtctcttcctcgcatgtcgttgtgtgtctgcgcccgcatcatgtgtgtatatgcaaataggtagtccgatacacacacatataaacatgtacacaaacatatatatacatacatatatttatatatatatatatatgtatatgtctatatcggctcgagttccctagctgtgttccggcttttggtgggcgctatcggtgcaaccgctgtgttctccagttcttcgcgtctatgttgcacgggtgcctttgtagtctatgcgctcgcccgtcggctgcccatcctctcgctgtgtggttgtttgcctcttcttctgccgtctccatcgtctcgtctctagtccggctcctctgtattctcacccaatgcacaccgttatcctgttttcctcgagtgttgccgttaccgccgcttctgtcccttgggtgtctccccccacggtcgtcgccttttcctcctcgtttcttccctcagtatttagttgtcttgcttcagtttccctttcatgctctcccctgtccttcggcatctctgccttcgcgagcaatgaatgcctgagacgtcgtgttggtcgttactgcagaatccaggtcagccctctccatttctcgtcgtcacgtttttcgacgaactggggaccgagaagaatctcagtttggtccaggctgacattctcaggggtgagtgtctctcgaaggcagagggcggccacttgctgagtcttctgctgctcttctactcggacccgaatctgtcgagatgggtgttggagttcaatctgaagcctcgcgagttctcctttgacgttttccaggaagaacaacgtcggtggtttaacttcccgctgcaaacgcctccccgtctccagctctccggggagtgaggcagtgttttcattgcatttggggggtcacagggggtggtcttcgcaggaagcttcccctgtctcgtgggagaagccgatcagcctaaacacccacacagtcacctctccactgacagcttttcgcatcttgaagcgcgcctaagtgtgtctttgaactgctaactcgaccgaagtttactttccctcctacaaacactttgtgtccacgccccaaaaaggtgacacaaactcggtttccacctcttaaccgaccgcacgggaacgggaggttctgtcagaaatcttctcgtctgtagcgttccccagctttgcgctagaggcactccattcggcacgcattcgagcggtctgaacagagagcggtcagaacagagagcggtcagatcgggggttgagacaaaacggagaatgaatgccacctgcgttggtcactgtagaatcgcactttagcatttacaccgcacactcgagttgggttctctcgacttttcttccagtctggctgctacaatgattagggcgggcgcttttcgctgattgctccaccgttcagttgcggtactggccaggcgctcagcggcagcccgtgttgaaagcagcatgtgtgctgttccttcgacgatcggcgtttgaaaaacgcgtgccatcaaaccgaagccgccaaagaagagacctcaccgtagtcgaactcgaagtgtctactccgcaaaaagagggagtttacagataccatggaatcgcgttttagctgtccagccagccccgtagtcactacgtctgctccgtggtcgtccggcgagacgcactgcgatcgagaactccgcgttgctcgagcgggcgacacacaatctggatgcgacgagtatggagttttcggatgtctgtcgctctgtactttcgttatttcggtgcagaaattgcctttctggcgcttgctctttcgagatgtcaacgcacactctgaccgttccccgtagtctcctgtgggttggtctggtctgtcttgcggtctgtactccgcggtgcaccctcttaggctgtagccccgacgaccccgtctggtcaattccgttggcgtgtcacgaggtcgtttccattttgaactgcctgcatagtccacgatagtccccgccgccagtgacaacggacgttttgcggccgcggcctcaggaaaaggcgagccgaagcaaatgtggggcggacagtcactggccagggtaacggcggccaaactgagagagtcttgaccttccgatgtcagctccagtgggttgcgctgggaggggttcgcagcactgaacttccggtcagtgtcgacaggaggcgtgaaggttgtaagtactctccacttcgtccctctgatacgtcctacgacagggtcagactgagtttctggggtgctacagtgttgttccgagacacccagatcgtctcgcctaggtgaactgaccacgtttcacaactacagtctgtgacagcttgtttgatttccatgaacagagttttgccgtgttcagtgccgtgtaacggatgtgctctgaaggaaagtagctcgagttttccagccgctcaggtgcccggtttgctttgtcgccgtgtttttccgtggtggtgtgccgccagagtgtgcgcgtgtcgtctgcctcaagcgcaggcgcgccactggttagatgacgagcggggcttttgtagcgtgtgtcgagttccagatttggacacagcagca

SEQ ID NO: 3615 - DNA, 1908 bp, Toxoplasma gondii
  source 1..1908: mol_type = genomic DNA
aactcccaggtgcagcacacagatcgacagctctcacaggatacacatcttcttcttctccttcttctccttcttcttctccttcttcttctctttcttcctcttctctctcttcttcttcgcaacacagagactccgcgttttttctagaagcctttccgtctccgcagtttcgagtctctctctcttctgtctcttcttcgattagagaagatgttccgtttgcgtttcttccttctctgcggcgtcgggagagagaaggaggggagagaaagtgaagttcgtcgtcgagctgcaggagcttgtaggcagatcgcgcccggtagccctcttctttcgctcgtctgtagtaaatgtctctcctgtctttggacaacttccccattttctctgaatcgaaaaacgagaacgttcctcgaaggcaatcgagcaaaaaaccagtccagagagaacataaacctgtgaggaaaagactcgtggcaaaaagacagtcctgaaaaaagagatctgagaaaactctcaaaacaatcgctgcacaccctctcgcgcggcgtgcatcggctaatgtacggagaagaacgcaagatggggtacggcgaaagagggagagacactgagagtgttcactttttttaaagaggaaaacgaacagagacagaaacagagacaggccgcgcacagagagagaccgactcacgttaatagaagtccattagttcctacctttacatgtctgtattctcattcgttccaacagtagacctgtataggctaaatatattcgtcacgaatacacgtatgcaactacatacatacttcggtagacaaggtatagaaatagatatctgtggcggttcggcttggggaatacggagggagacatgggagattttctactcaggtgagagcccctcgggcatgcagaagcagactgggaatttgagaagttcgcagaagcgagaaaggaagaacgaaggagagaaacagaatcacaagtaagagacagtgcataccgcaaagaggccctgcgccgtctccgtgaggtgtatatacagcgtacaagcggcaactgtctccacgacaggtgccagcgagatacgcaaaaaaggaatacgagaaaacagttttctcttttgagaaatagtttcatgttgaggctttgaaaaaaatcgttcctcccctcacagtgcatgcaagagtgtcacgaattttcttgcatgcaggaatgtcacgactctttttcctgaggagagagaatcaagtcgcgaaacgtttctttacaaaaaaatgcaggggaacacacgccgtatttctagcgtttttctaatttatctcaaacgagttttctctgaaaagcatctctgagtgcctgcagacggcgagcgagcttacttcctctctgggtgtctgtacacactcgccagcagcctctgcaacttctgtgcaggacgagaaaagcgcgaaagagtatccttctgtcgctgtcttctgatattctttgtgtgactcaggcggtgtctgttttccttgcctccgtttctcgacgcaccaaggtctgcgctacctctctgcgccgggtgtctctctgctctcctcgagactcgacgatcgtctcggctgcacttcttccctcttgtttccgtatgttcttcttcgttcagctcctctttctcggttcttctcgcttgcttcttggccctccgttcctcttcttcaaagccttctcgtccccgttcgtccgcatcgcctctgcagggaagggaacgcctcttttttgctctcctacactggaaaacgacgacgggagtgaagggacttttctctgaggacggagatcccatcgctcccgcagcaagatggcgcagacgcagtaattccagagagaaaaatctttgctgtttccagaga

SEQ ID NO: 3616 - DNA, 3017 bp, Toxoplasma gondii
  source 1..3017: mol_type = genomic DNA
tttggccttccacctcagtctgaaggatttggagcagggacaccatgcgctgggcgttccagtggctttcctccgcaagcgccgggtcggggaagaggcccccctcgaggtcgaggaggccaccccgcagggggccggcgaccggaaggaaggggaccggcgggggataggggccgcggcgtggctgaagaagagggaagcgggagaggaagaaggtagaccggtgtccggggtcttcggaggtttcagagagtcgcttgaaggaaagaggcgctttgaggaaaggccaggctgggttgctcgttgtgagcgcttccgaggacgtgaagggttcaagggcgtactgcgcgcaccccgggagaggcacactgggaactgcagtttccttcagagatttttcaagacagtggtagaggcaagcgctgtggctgccaacagtgtgggaacgttattcgtaatcgagaacggatgactttttatcaaatctgcgttttccactttcgttcggtcccatcggagttttctcagcgaaatgaggaacatggagagtcgggagctcgtgtgttggttcagttttcccgtgttggttgtctgtgatggagcggctcggggacccacgatacgcgccacttgaggtagtctatcgatctacgtaaaggttcactcatagaggattttggcaaaacttctttgcctcttgcatgcaagcgagggacaacaagcatgcacttacagggcggtcctgctaggccgtgaccacacttcccacttgttgctggctttcagcgcttgagatggaaatagactccggagacatgagagcgtggcgcgcgcggcaccggttgaaatctaaaatggagaaacacgccggtgggatccggctatagagggagttttgtctgaggattcgtgttggcggccgttaagctacgcgaaacaaacttggttttccctggccgatgtgcagttcgttcgaaaccgctagaactgtcccgctgcaacacagcggtgcaagtttttaggtaccggagagcaggccgcgtcgatgggggctcctcaaaaattcctaacctggagcgagactgtggaattgcggcaattaccacaggagtgttaaaatgttcagcgctatattctatgcactgacgatcgcaagcggaggtaggtcgcgtaaaaaggggaatgtttttttgagggcacctatgtagcgttttacgtggaagagttggcaaacaaaataacactgtgctcggacgattataaaattcgttccaacgcttctcgtgaacaggcgcccagctcgagtgcatgaaacactcgcattcttgcctccgttgacttcttggaaacggcagactttccgagtgacctccgtgccgacgcatccgatgctagaatcgtgaagttcagcaccatcaccagtggcaccatttttttacagcgcgatcaattttatcagtctgacccgtcatgcacgtcagtttgcttccaaatcatccaagagacaaacatgttaacataatctaaaacatactcagagaatcttatccactccatcaaagccccctcgatatgaaaatgcgcttcacccaccttacagaaacaacacttccgcaagtgaatgcgtacatgttttgcacgaggtgtaattgcggtataaatgtgaatttgtagcgagtcggtgggcaacaacggcgaaatgtaatggaaacatgtgtgtactcgcacgaccgagaccgggagacccctcacggccacctgaggtcctgggccacttgaaaaacggtatgcaagtgactagaaagagcgagtcttatgtctaaatactcggattttaagaccttattttgcgtttatatcctgctcgaaagagtcgtatagctggcagttcgataggactccgctagtggtactgaaagatggataactcttggctgttgagcacaatcgagcgtcgcgcggccggccaaacgaggtagcttctttgtagtgaccttaacgtcgctcctcagtctggttgggaagaatagcgccgtagaacccgcttgaagacggtgtctccatgtgctagcctactacaagaaattgttgtagagcttcttttatccttactaactgcagattgtttgcagcaggagcgatcggtgttcagtatcagccccagcgcatgcgatctcccgagtgtatgcaatttgaggggtgctcagttgagactcgcgcgatcccctttgcttgcaggacgaaaagcaacatttcctctgtggacagttttttacaacatttcatcgaacaatttgacgggtctgattctggcgattaactggaacaatgatgatcgaaccacagaactctggacagttacgggtacccactacgcgccctgctttctttccgaggctctgaatttcctgtgcggacggtgtgttcgctgtcttctcaactgcaacgttgaggcgacagtccacccgttttcgatttcttgtttctccatcacgtttcttcttgttgacgatgcttccatgtgtgaacttgacccgctccgtggcgaaacttgagctgaaatgggggtcgatcctgagaaagcttccaacagccacactgtcacgtacttccgttcgctttgtacagtggctgcaggcagctctcttctccccttctagaaatagacacgcgcgacccagcagctgctttcgtcgagtgaatcgtactttttgctttccagccaggtctaggcagtggcatggagaatctcttttttcatttagattggttcccggtttgtcgttgacaccgccggtcagttgctgcagatcgtggagtgccaaagcgcaattccctacctttttctcgccggaaataggaggcatgagtccgacagcagtctcctgtctcactgtggcttgtggccggtgtgcgctgttgtctacctgattgaaacgggcgcgacgagagacaacttcatctggattcacaggcgattcacaacctcgcctggccgtgttttacattcatcagta

SEQ ID NO: 3617 - DNA, 921 bp, Toxoplasma gondii
  source 1..921: mol_type = genomic DNA
gatgagcagcagttcacgaaaatttcactgtttttctgcatctggtgaaaacgagttcatgacagccgcgattctgacatcgaaaataatgactgttcctcgtgcctcgactccataaaatcgacagctgcgcggggtcgaagcaggttccaaggattactaagtagcagcgtcttaaccgttttaactgaagcagtggcacaaggatgcgtgtgtaccagcctccgccagtcccatgttgtggaccagtacgcagatcactggtcactcgagaaagtcgtggcatcgaccaaagctgtgaccagacaatcgtcctcacagcaggtcgcccagcttctgatgtaccccagcaggtattttcactggttcttcaaattgttgtgtttgaccactggagtgctgaagcccgttaatacgcaagacaaactcccacgcacctgcaggcgtgttttgcaccggaaattaagtatgaagcttcagctgaaagctgtatgttggtggcgtactaaatcacgacactggttgccgccctcttatgtggaagcgctgtgaacgaagggtctcagctgctcttgtacaggtcagagacacaaaggcggatcatcgcaagcacaggatgactgccccaagtataagcaagcagtgcaacaccaaattactcatcgcagcattcacagacgagtggatatttttggatatgggccgcttcagtgaaattgtgactggacgtttgcccggattttacagtcacgggccaacgggctccggagtgtacatccactggtaggaaacaccatgggaaactgagggcgagccaattcgttgactgcggaactgtctgataaccgggcaggacgagctgcttttaaggctgctgaactcctctaacactgcttttcacgtggaaaagttacgcttgaa

SEQ ID NO: 3618 - DNA, 1853 bp, Toxoplasma gondii
  source 1..1853: mol_type = genomic DNA
tccttcttcgtttcctgcttctcctcctttctcgcttctccctgattctctgcgtgaagacgtctttcggcgacgacgcgacccggaggggagaagtgcgagcgattgcgtctgatgtttgcgaggaactcttcagcggacgtcgagaggtttccagggaaacgaacggagtcgaagagatccctcatgagcgcaccgtggacagccgcagggtcgcgcgccttcggagagatgacgccttggacgcggatgtatgtatcgaaggtatcgggcgcgaagaagatgtcgatggacaactcgtcgaagccggagaccgtctcgctctctttgaagaagtgatggcagaacagcggggagaatgcgagatgctccggaggagaaaagaagtccgagtccgcgaagaccgggtggaaacgcaccacctggagcgcgttcatggacggcaaagtcgccccctgcggagacaccgagtctccgtgacccgtcggcgagggaggagacagagggcgcggagacacgccagacgaggcctcccgtggcatgctggagagcaggcgagaacaggcgaagaaaaccgagagcggcactcgacgcacccaaggtggacagattctcgtcggggaaagaaggaaaatgtagagaaacagaaagaggaaaaaccagagagagaggaaagagaggagaggagagagaggagagagaggaaaaaccggagagaggggagagaagaggaaggaaattggagaaaagggtgggacaaggaggcagaagcgtggaagatgaacgtgtgaaacagcactgaagaaggagaagagccttaaagagaaacgacagagaagaccatcgtaaaagttgaggcagggatccgagagcagaaaggggaacgggagcccagaaggccgcaccgagggtcggaaactgcgtgacgttccaaatggtcgagaatttcaacctgttctttctttgcgctctggttcgcctctttcgagtgcctggacattcgagagagcgaagcaaatgaacaagaaagaagacacacacaccgagacagcgtgtacccggtgtcgggagcggtgcaagttctcacgcgcgggatccctgctttctgagagaggcgggagacgctccgagaacacaaaggaatacaaggagacgaagaggaaagagacaccggaaaagaacaggaacggtctcgtccctccggcgctcccaacgcgctgtcttcatgtgtctccctctgcatgcacccacctgcgaagaagctgcgtacgcgccgtgtatcgacacccgcactgtcgaactttttccgccgaaggcgcagcgacaggaaaggcaactgtctgtgagcagtgtcttggacttgacgtcttgcaaggaaacggagggaaaaaaagagtcgcaggcgcatgctctcctgtcggggggtcggcggctctctcgtcgttcatcgcgcgcgggctctagagagacacggtttgaagcctcacccgagcaagaaaagagagacacgaggaccaggaacgaggaggaagctttttgcgtccttggttctcggcgtcgtgtcaacttcctgagtttcccgcctcagtccgtggttgagcgatctgcggagacaccgcaggaagaaccgcatatcctcgctttccccttccacatgcgctccgtgtctctgtttcgagtccaagcgctctgcgcagctctttgagtgtttgcgccacgaaacatccgaagagactcgcgacttggtggacttggtcgtctctcctctgccgcgcttcgtcttctcgccgaggcgaaggcgggaagtgcatgcactgtgtcaagacaggctcttcctcgccgttgagaaaaaa

SEQ ID NO: 3619 - DNA, 4635 bp, Toxoplasma gondii
  source 1..4635: mol_type = genomic DNA
tcaaatgccctgtcaacctgtcctctatagtttcacaaccgtttccgtcgtgatccgtttctggtaggtttgaactgtacacatgtcgcgagttttggtctgccgtttcctcgacaaattttccgaatccattcatgtcggggactccgttttctgagggctctaactccaccgtgttctttccttcctcggtcccgcgttcgctcaccacagacactttaggttcgacacctgcaactacacagcctgggtttttcgcctctgtggtggcgccttcacacactgtccatgactgctggcagcacgcttggttttcggggggagtcggcccaaattcccctgactctgcaaatgccccacttgtttcaatagatgtctcaccacagacctcttttccttgaatcgaaatgtttgtcggttcgcccactgcaagttctgttaccgcttctatcttctgaaacatttgtttcacgtcgtcccccacgggcttcgcgcctcctccctcttccccgatgtcgccaacgaaaccgactctcccgtcggtgtcgatttctgggctttcaatctgttcggtttctccagcacttcttgcttcgagcgtatgcgggacagcaggtacgctctcgctgcggaaatgtctgctttcttggtcgagacctgtcgagtcgtcaatttccagagatgttccctgttccttcacgcccgctgcttgagaaacgagcgcaggaaatcgacctatgagctcggccttcctcgtttcagcttctgaagtttgtccacatacagtttcatgttgttccttttcagtcgcagggaacagtgacttcagcgtctgagcttcttccaggatgtgcacgaacacctgcagttgccacgccaaatgaacgtgcacgtttcgctgctttcgttttctgcaccagaacagatccaccacgcctctcggacttagcggtgaactcgccgctcccgtcacatccgtttcccttcctggcgattttccagcgtttgatttcctcacgccctgagggtcgtctgcctgctgtcgaacgaaatgtctcagacgagagtcgcgggaaagcgactctctggtttcgttgccctttgtgtttttcaaagaaaatccgagagggaacgatgagagcgatccgatgctgcgggcggccgtccatgacgcggtgtgactgctcaggtttcgctgtccctgtcgcattcgagtttcctcgtgacaaaagagcagcaacggccatttctttttcgcgctcccgtgacttgctttcatactgtctcgaaggcgccacacaaacgagaacgaactgttcattcggcgctgcacaagcgcacccgtcagactaatgccgtcagacgcagggacgtcagagaagtctgtaaacagtccacggtggctccggaaggcacacaacggggaactgagtgcgggaggcattgcggctacgagagtcagacacaaagcctaaaagcagaacttgtgccggagaacgaagccacagcagtaacgacacgccgtggaagattcagttgtttctgtcccttcgaagagcccaaggagctaaaccaaagtggaaacgcgaggcagccgcttgagaacgcacgacagaagctgagcaatgcgccgtcatcgtttacggaagccactgtagcgaaagttccactgcacattggaacgctgcagacgctaacagacgacgctgacgcccgccttcacagtaagacagtctttctttaccttataacaatcctgtcgaactccggagcgtccgcatctctctcgaaaacgcacactgcactggctgtctgacacagacagtcgatttccaaaagtgaataacgcaaaatgtcgacacacgggagcggcgacgagatccataggtcgaaggcaaatgttcaaaacgcacacaatctcagaaaaaccaacagatgggaaaggatgcacggtagacatgcaatcatcaccacctcaaaaacttcagcgacctcctaccagcaaatcaacgaggaagttagctgggttcgctggaaagcgacgagtcgctcgagcacacagatagtaagacgcaacaatctgttcagcagctttatctagaataagtgagaaaacgaagactaatttgaaagaaatatggtgcagcttacccgcttttcttagtggcactcgatcagcgaaccacttcgagcagcggtcctgtccggtggtccaacggtacacagtgacgattgacgttttgcagactgtgttcaaaaaacacagtgacgacctgataattcctttcacgacgtttgtttgcaacgaaatgtcgcaaaacgctggtgacatctgttacgattaatcgttcacgggtcactgcaactgaatcaaaagctaagagtgaatttcgattccgagtacaccataaaacaccaggtgtgccccgagtagactgacacatatagggtgtgttcacaaatacaggctagcacactgaaacttggatcgggcaagcgctgacttccgagtctctttttgtggtgggcatcagctgtttgtagcaacagcacccccattcttgcggtgcgggtacagaaaagtgacaaaactgggtctttcgctgaatgaggactccgtcgaaacagaaaacagtgacaaccggtttcgcctgtgatacccgcacccgaatgacggctgtcgaactccacttaaggtactttgtctttgacacgtcacaacagtgtcgttgcggggatcgcgcttgatcttctggatctgatttttccaagtcgacactgtggaaatggcagtgcgagacaaaaaaggtttcgacgaactccaccaacgaatctttacggatgaggagccaggaaagaaggaacgacttttttggcaagagtagtcgtgctgcgaaggttcggagatccgttagtgtagaagatcgaacctaacactaaacaatttagtacaacacgcacgcttgtgcctcttacgctgcacaggaaaggatcgatctgcgaccgagtgaaccaacgtagcagatgtcttctgtagagtcgaaggcgcaactgtccgtgtgggcgaattggaacgaggcagcgcaggcagctccagaaaggttgtttccattgtggaacatgaagatcgtcccgcaactgtgacgttgaaacgtgtacacgcgcaagcagatggcggttatcgagtgatggcactgctaggagcataaccgtgacgaattctcacagacagaaaagatcttgactctttcagatctaagaaaagacacggttcccccccgagacccgcgaattatccactgatacctacagcttaagaaggattgcaagtaattaccaaccgtcctcggtgtgattatgccaaagcgtgcatctgtgctcacactctgttacataattagaagctcacttccccgctgtgttggaaactctgaacgtgtcgaagttgatacttggttgcaggattcctcactgtcagagaaagcagcttctatgcttgtcattcacaggtaaagcccttctctgttttttctcgcacttttttcgatcatcgcttgtacgccctgtgtaacaacagtcctgtcctttgtttcagcagaagcactctaccgagcgttctacattagaataaagcaaagcgcttaaagcttgtgagtaaagtagaagcgagaatgtcggtctcggtaccgtaaatcctgagaagaatcgagtaccgcaaaaactcagaaggttcctgtgaaaagataagccccgatgtgccagcatcgaggcaattcacctgaatctgtgagcagtacagagcaaccaggttcttttctgaaaatccacttctggacttggtgcagacgaaccacttgaaaacgaagaacgccggctctgcgcgtggtgcacgaagacgctgtcttccctgctcttctacgtttgtgtagcgtctcctgtctcttgaaggaggagacgggatatagctctggcaaggcagctgctaggccttcgcacaagaagaaaaacagtggatactaaaggagtgacgaatcgagttagggacgtcgatgcagcgcagaacgagcatcgaggagcaagcaggtcgtgcggtcgcccgtgtctcccgcgacggagacaaaagaactcaaagcacacgcaggtcttgctttctctcggacttctccaggaatggggatgcgccacggtggtggcaatcgtcattgctgcgttctgtccgtttccctggctgcggaaaaagccgtacttttgtgttcacctcagaaccagctgtcgcttctaactgagttttcgagataggaagcccccctcccccccgcacagttacgtgaggtgtttctcgttttcagacggacaaattgcttctcactcttttccgtgtgacacatccaaagaattgtgccataaacaagtcccgtagttcacaacaatctctcctgccgcccccgctcgtcgtctctcagctgtcacaccactcaatgtcaccccctgttcgtgctgttcccgtcgacttttcgacctgccgtctttccatttttctcgactcttttctttcctcccctttctcccgcgtccctcccttcgttctctccgttcatttccatcctctcccaagttctttgccctgagaaacaa

SEQ ID NO: 3620 - DNA, 2309 bp, Toxoplasma gondii
  source 1..2309: mol_type = genomic DNA
tggacagtgagaacaaccggcagtcacgggaataaatatgcgaatgtgtggacagaaaacccgatcgacaactatacacctatgaatacggcgagagggtacatgggcacttcctttttttgtgtcagctattctattaccggacatgctcattgaggcaacgataaggatgcagtttcgacagcataggcaatggtggtgtatctgttctgtgtggttctaggaacaggggactcacgcatgcgttcgcccaagtgaaatgacaaacccagaggcaggggcgacacaccacgaaaaaacatgaagaagaacaacaactcctacctttcctcttcattctttcgtcccagtacggaatgaagtggcgaacgaaaccgaagcaaagagtggcaagaaacacgacccctgctacgggacggacgaaaggcgtgggaagaatgagaagcggcaacgaaagagtggcgacaaggaggagtaggcatcttgacagacacagcgacggttgcagcttgctttttggtccatcctgaccagaagtacgttctgccctcatttctgttgtgaaggaggaaagcgcgacagtggcgatgcacacaaacacattccacgtagcgtctttccaccgcatgggtagtttccagcgttgaacgaaaagaggataacgcgagtgcagagcagaaggaaacgcacaccgtgcaagtcggttccatccaccaactgcctcgtttccgcgcagcgcaaccaaacctgcctgtgttcttccgacacagaccgacacgctaaagatattccgaagaatacaggaaccgataagaacgagtgaacagtagcaaaggtgggaaattggaacacagaagcagaaaaactaacatcccaagcataccgctgacgggtttgaaccactggcttggagttgtcaccgttcactcatgtgtcattggtacgtcgatcacatcggggagaaaaggttttcaggtggttttggtttgaggacctgaccagaaaatcgccgcattcccttttcctgctcactcttcctgggcgacacactcggtggctcgcggtcctgacgagctttgtggtcggaaagggtgcgatacagacggaagaagctccggaaacactatgaggaatccacaccaactaacttcacaaagtgtgtgcgcatcagcacagctgcaaacttttttcacgcagacggggatacgatttttccttattttccaaacctcgttacagccagcggtctctcttgtatgcaaaaaatagcgcagaatttcggaagtaatgcctgtttactttccttgacaccttttctccatgccgtgcatttcattcgcgtgatagtaatttctcaaccgtctctaggaaacgcgaaaaaaagtaccagaccctctctttcagtctttgtactgcggtctgttttccgctcgctgtctgatttgcatgtgcaggtgaaaatgtagtaaccgtgcatgcgtgtgcacgggggagtgaccctgattcataaaactgttgcaagccatggtttctttcttgaagaccaacgctagcttctcgttgcgcttcgtttgggaacgatcccggtgcaatgatgtaaattccggtgatccaaaatggaaattaaggagagagagaaacgtctacatgcaatcagagagcgtggatgccgacagcctgcaaatacacatcgcaggcattgccaggagtgctagtgttttcaaggttcccctctaggtatttgtgaaacgaatcaggttacctccacctacgggagggctaatgccacagcgtgaaggttcgtttggcgcctccaatacagcagggccagtaaaaagtgtgaatatggcgcttgactcgtgagttcaggagtgatggtagttacgccttctctgagggcaggacgaatgcaaaggcaggggacggtaaaaacttgagtcctcggctagccttgttcttcttgacccccttgtgattcacagtcgcgtctgaggtttctcaagacgttgttgccggttaccggctacctttgcggttatgtgcctactgaaaaaggaccgcctgaaccggggaacgagctttgctatagcaacgttgctcaacgatgttgaactgtgctcagattgattcgcagccaagcacttaattgcgaatttgaatggttttgtgtgtaggcggggtggggtgctctagtttagtgttgccagctgaggtgtaaggacagtcaggtgcaccaggttttgaaattgccgttcgaaggtaacttgctcccaccatgatttatccagatcgaatgccgtaagacacga

SEQ ID NO: 3621 - DNA, 1867 bp, Toxoplasma gondii
  source 1..1867: mol_type = genomic DNA
gcctgactactggagtcggacggcaggaccttcgaagacaagcagttgcggacggggacgaagagtcgcaggccgatgctacgtctggtgcatgcgacgcacattcacagcggcagtgcggggaaagacgaatgaacggggtctttccaaagcacagaggaagacgcggcgagccgcatgcgcgagggagtgaacgagaaagagaagacgcaagtgttcgcttctggaaggcagctacaggacgcgctgagagacaccgcactgagattggagcccacgagaattgaagcagtggcgatagaagaggattcaccttcttcctttctctgttcgtctcctcgggaaggggagacgcttcagtctctccacggaaccgcccggctccccccgtcgccgcggagacaaccgagtgctccattctctctccccaggcgtagtcgccgacgctcccgagagaacgcaggcgcatgcgccgaagaagaggctctcagcgacggtgaaacaacacgagccgacaagctggtcactaagaaacgagattgccttcgctctcgcgagacaaacactgtcggcaaggagatcgacgcagctgagctgctgaaagaaaaaactactcagtagttgcctcctcgtttggcaagaacgctcagctgacggcagaagcgaagaggaaaacgcagcgaggggacgagcgtccaagaaggagcgcgcggcgagctctgtgtggctcggacatcttctcctcaggatcgtctagagaagaaccgccccgctaaaaatcgcagaagttctctttcgtttcacgtcttctggaattggtttcgaggtcctcttgatccaaaaagaaggcagccagaacttgtcacgggcgacgtcttcagctgtccagcacgcatgcttcgttcttcagggagctgaatcgaagcagaagaagttctcttcatttcctcgtgttaataaggccgacctttgtttctctggacaaagccgaaggaggaaacagctgcgattcaaacagcctttcgtttgtgcagcagcacacttgcggaaacagtctcgttcacacaagcgacaccttgaaaaaacacacatgcatgcacaaaaatacatacctggacatgtagttatacgcaaatgcacataggataaatagatatatgtactacggatctatgaataaaccttggatcactctcttggcgtcgtttgagactgcatgccgctcgggaacctgtcgaagcgcatgcgtaggccgtacacactgtctggcttcctttgccgacaagtgagacgtatgatgcgcccatgccgcttgagacaagaaacgaccgggacgctatgaggaaaaaaactacgtcttggtcctccttttcctggtctgctgtgctgccttggttcgtcgacgaggcggcgctcgccaggctcggcagatcagctcgcctctcacgttcaaagcaaggacgtattcactatagtacgaaaatcacctttttgcgtcttgccccgtcggtgaattcagtcgcacttttcttcaccggcaggcgctcgcgattatttgtttgacccgcctgttactctcaatcgagttcttcgcatgtctcctcgcaggtcatgcgtgagatccggagactcggctggtgccttgtctggtctcgctgcgcctgcattctcccatgttcttggcgtttttgctgtcgcgtgcttctcaccttcacgacttcagggagtctttgtttgtgtctctccccttagtttcctgttgcacggctgttcctactaccgtttcgttttcggcgcaggtctggtcacgctctcgtgactgcatttctgtttcttgtcgcttcggacgttactcacgccttcatca

SEQ ID NO: 3622 - DNA, 4905 bp, Toxoplasma gondii
  source 1..4905: mol_type = genomic DNA
acggagctctgcacaggcacgtccttttgtctccacgaaaaatctccacccgcttcacagacagatccagtgaaagtcctctgcacagtcccactgtgtgtggctttactttgaggcgcgggcgtttgtttccctgagtctttgcacaaagccgaggcaaaatgtttctctccgatggatgtctcttgcattcgagccttctctcctcactctggagggattcatgtctttcagtccagaagaaatatgtctcggaaaccggtgagtcgcctctcacccgcgcactgcaccacgtctctgctttgccgttgttggtcgactgcctcttcctccccgtccccctcgttttttcttcactggcgcagcaagaacctgaaaaaggaaacgcgaagtgaagcggaactcgcgaggcagatcggccgacgtttctgatgcaggcccgcgagctccggaccgccgctcgcgtccgccagcaactgtatatacaccgggtgaaaccggcgtctgtcgagggccataaggtctttttctgtctggagaatcgcgacagagaccttttttttcgcaggctgaaacggggacagctcgtgacgcccaccccgtcgttgcggcgagtgtcttttcaaacgggtgagttttgccatggcctctcctcctcacctcgcgcacactcatgagactcttgacggcgagacctttgacggccagcgcaggggcgaagaaatgacccagggagaaggccgctgcgaaaaagacactttcaggaattgcatccgggcagaagtccagaaagtcgcgtgactccaaactcgagacttgcgcatcgacggtgcatgcgctccgcagtctctgacactgcttgaagagtgcgttcgtcgcctccactgtcacctagtaccgaagatacggaaaaaggaagggacagagggacgaagaatggagaggaaatgaaggagacgaaagacatgcagaaacacaaacgagcgaagaaaggcgagagagagagagggagaagcagggaaaaacgaaagggtaaagtgaattacgaaacgtggaaaggcaacaaacaagagagagggcagtggagagacgtgcaaagagaacaatcgatgcagagaactctgcgtgaaaagaacagaacggggacgagagagagaggcagaagaaaacatgcaaggaggccagacatttcagagccatacttcgtcaggcacaaatttcgagaggacgcgggcgcgattttggccagcatccgctctgaatcgacacagacactctggatggctgtggagatccgtgagaagacgtagcaagcatccttgtgaagtgtgtgactggagttctccgtatttcgcaacttctggacaaactgtagcttgcttcagagtccccgtggttggccgcagagtcctggaactgaacacaggagtcgtctgccgaggaggcgaagcactgttctcactgagaggcgcacacagcttcccagttcagagaccatgggccgtagtagtagtaaggacgcagagttcacgaggttgagaaaacgtcttgtcgtcagtgaacgcgcagttccctagacagagtttcatcatgcgaagcgccagttctgggatgaaaagtcgcgaaaaccttaccccggcatcgattgttttgaggacatgacgaaattcagctcgagagaaaactgaattgcctttggctgtcaccgcctgccgaaagcgacttgttggagtgaccatgctttctctgtacagcgaggcgagtgaaacagagaaaagcagacgaaacagtttctaagattcgacgttgtgtcgagaagtcgaaagtcctttacctcggttttctgtgtcgcagtgatacctggcgttcctgtctttttacttttccacaaactaccgccttgacggatctctggaaagacagcggaagctagagatctcggcagcaaaggcattgacgacgcaaagctgcaacccaactcgcaggatctctactccccagacgcggatgagacaaaggagtcgaggtcgagacagggaatgctcgaaaaacagagcaaggtaaagcagctgagagtcaaagtgctttgtgaggtttcttctgaacgagtttcagcgtttcttcatccctcggcttccctttttttcgattcattcttcactcttttgcccccagccctcttctcctctcttcctctcatctggcttccaccgccttctcgttcttttcttgttcttcctgtcttctcttttcgttcttctttgttctcttatcgttatcttcttctccccggtcggtcttttctcactgaaactcggcgacgtatgcgtcgacgaccgacttcagcagcgccgttaccggcagatacgctgacgacaggaattcgcatttgaatcaagaagaagaacttgccgattgacgtggaactgtgaggcgaagaaacatttcgcgcatctttggaaactccaagagacaaaggcagtcgtttccgtgtcatctgcagcacggtacttcccgtccatcgtttcgaaaaggtttcagtcctgacctatgtgagatgtgtatctcctgagcgcctctggattttttagaacgatcgcgttgaccgacaaaaacgcgagaatccagtctcatgatgaatgtagagaacgtttactctcttcttccgtgtcgcgattcgtatgtcgctgttgagcgttccatcttgctttcttttttcccctgccgagttgctccttttttctttgaggtgctgtttcctcaccgtcctcgagaggggagggaggcgagtcttcacatttcgtcgagaggacgcagtcggacagagtcacacttccctcgagacaaggatcgagaagctttttccacgcttctgacggcaaaagcaagcctgaccgaattaacacctacgccctcacacaccaacaggaggaaaactcgaagctgtattgatcctaaatcagactgagtttctggtccaggtcaacactgcgtagatttagtgccaggagaaaggtccgactgtcctccaaattttaacaagtcgacgatcctaaacaatcactggcgaactcctcttgacagactcagctccttttccatgactgtgcatcagacgaatgcgctggagttgccggatagcacccgcgagacagcggggcgtcggtctttcgtcactcgcatcctgttctgcatccaagcgccctgcagatgtggagcactcggagttgaagaatccaccattctttgtcgatttctccgcctaccatttcgacttctgcatgcgacagctggaggggaactgtctcctcaggtttccttcgttttcgtgcgagtttcgcctccttgcgcttttgttcgagacccgcgggaaagtcgttgacgaatttctctcgcaggaactcgagaagaaggtgctttttcctctcgccgagcgtcgccgtctctccacccccaacttcctccaagtccctctcactttcctccaggtgtgccagttcttctgcttcttcttcctgcgtctccttgtcttcgcggctgcgagttcgaggcgaagcagacgggtgccacaaaacgattcgcatgcacagcgcgtccagcaaaggatcccagccgcgcgcaggaaggcccctgaggccttcgacagccgctgcaaaccccacagaggcggcaaccaggtgctgcggaggcggccgcagatcttcgtcctctcgcgcgtttgctgtcgcgtctctcaattcgcgcatcgcctccacacgagctgcgtcctgcccaggaaaatcatcggggaaagcggcagaagaagacgaggaagaggaggaagaagcagaagaagaggaagaagaagaagaagagaaggaagattttctctgcggagacgcggggtgcgagaggaaggaaggcagggaagaggcaggtctgtccgttgactttttcgactcgcggactgcctgacctccaacgcgtttgccgacggagtctggtgtgaagagcgaagcagcaggagacgcgaccctgctgtcggtcccgagctgctgtttcccccagatctcaaggcgtttctccttcatcacctcttgcagaagtttctcttgctcgagttccagttgcttgtttctctctttttgctgctggcgggcgcgacgcagaacagagagcgagttaactttctcttttctccagcgactgcactgctgacgcacaaacagaaagacgctgagaacgggagggggatagtaagacgacagctcgcaaaaacctaaaaatctgggcagagcgcacaagacatgcacagcggcaggcatgtggcgaacgcgacagaaaatgcacacgaacgcgctcttaactcgaaaccatccaaacaacgagagagagagagaatccgcgacgcgagacaccacaagtgtggggaccgaactcaagaaaacacgaccaatattcatcgacatacaaaggcctccatatacatcagcatacattcatgcacaaatatatattcatacacagatatacatatatatatatatatatagatatatatagatatagatatacatatatatatatatgcatatattcgtatcaatgagtacatgctaagcgttggttgtggaccgccggtgtgtcttgacagaataggagcacatggggttgtcctttcggtttcttcttctgtttgtcttgctgcgtctgtacctgacaaacaattggagctcggtgtgtatgtgatctgtgttttctccggcttggtgcatcagcttggagagagcagagaggactcgagcgattttcttctccgcctgggacacgaggccaaattcctcgacttcaaactctcgccaggcatctagcagagaagggggcgaccgcgaggaaacgattttgccttcgcgagaaacggcagaa

SEQ ID NO: 3623 - DNA, 3547 bp, Toxoplasma gondii
  source 1..3547: mol_type = genomic DNA
gcaaagagaagcttcggagagagaatgacgatttttcttggctcttgaaatcgggggctgcctccctcgtccacgagcgaggctggaggaatccaacctgcaggatgcggcagctacggggaagagcccaaaaaaaacaaaaacctttttctccccacgacgacgcaaacacgacaaaaaaagacgccagcacgcggtgccacactgacttctactgaaaccgcgacgcctgcaccgcgaccgctgtcgaacaaagtctctctgaagcgtatacaaaccgcgcgctggctgctcgtagcgtcgaactcctcaccttcttcagggcttggtacaggtggtagttcagcttcttgttcgtggagatgtcgctcctgacagcaggtaggaggacgagacaaaggaatcgctgagcaccggcgctggacaagttgcttgtgaagattttcgtcgcctcaaacatcgcctgtcttgaccagctttccggctgagtcaaaagcaaaacttcctcccacctctggaggcggggcagaactttgaaagccttcggcatttttccacttctgtacttctgcagaaaggatcccatggctgtgtacacctcaacaactttcggaggcaacgcactgcagtcctcctcgggcgcttcagctgcggcgccgctctgaagaaaaaggaaagacagaagacgcagagaactcaagagaaaccgactccggagcgcggctgagaacgaagtgaaccgcgacagtgacctgcatacgcaaaaggcactgcaatgaaactcaaaaggaacgctccccatgctcatcgaagacaacctcccgcatcatacgccttgttgcactcgaagcgtcccggcaggcgagggaagccacctcgagggagaaatagcaattttcatgcaatgttcgaacagaaacaaagaacgatcacccaaggacgtcgattcactcaccgactctctctcctccttctgtcgcaacttctccaagataaaatccgcgagcgtcggagcagccgccgcagttccctgacgctgctgaacgcgctggacatacagttcgtcttcctcgtctgcctcgccatcgatgacgacgaagccttcagaatctacgtcttccccaccggagtcccggtcgacatcctcggagtccagctcgctgccgctgtccgcatcggggccgttctctgagctggacgtacaccagacacaaatccgaaccgcaacgaatgaagcgcatttcgccatagaatgcgaaaacgcactaaagcacgaaaaggcgggactaagaagcaagcgtccaggttcgctcaaagaaacccacgaagcgtaggcatggaaaaaccatattgcattctgatacctcttgagcagtcagggaatatatagattgtcttcaggtagccgagaccagggcctcggtcctgtcagatatatgcttgtcaagaaatcatcctcagctcgagagacgcgagcacatgaaagaaaccggtgcatttacagtggcaggaaacgccgcatggcacccttcatctggcattcacctccaaaaatccgtaccgacgcgagcagatacatccgcgaattccatgaggtagggaaggcgaactcttgaagttcagaagagaggcatgaaaccgtgacacagatgtacgaatgtcgcctaaaaaaacatgcaacagacgactcccagtgtcccttgcgggaaagaggacagcggcaccgttgaacgtatcatgcagtcgggaccccaatcagagggaaatccgcgcagaaccgagatttacatccgttggaaaggcctggcttttcttcagagcgataagggatgagtaagagattatcctcacgggaggatcagaaagaaaacttcatcattttcgccaaggactgacaacaacctttcctcccacactcaaacagagttgaagtcggaacacgggggttttcgcgacgttctcgggagacccggacgcctcaccggtggtgttgctgttcctcgaccagacgaagaattttcttgctgagtctccggggaaccacgccgtcggcatcttcgccttcgtcgtcatcggccgacctactcagcctcgacttcttcgcggccttgcctttcttctgaaacaggagtcccgtctcgggtgtatgcacacccgcctggccgaggatgtccacgtggagagggttatggcggttcgccaccttgcgcttttcgctctgcactttcggcctgaagaagcaaaacatccacgatggcaaagaacaagaaaagatgagaaagagagaagattgggacgaaagtccgtcgagtgtcgacgactcggcgccccacacattgactgggaaaaagacgcggaggaaaaacgaggatgttggttttactgtacagagtcggcaggcaacgctaactccagaacgaatccacctggcccccgcagacaactgcaccgtgaaaaacgactcagacgcctcaaaacggcccatacttttcaatactatatacgcgctcagacgccggacatggatgaagcagcctctgcgaacagacttgtgtggcgaaaaaggaacgagcgcctgaatgggcgcgtgtataccgactgagccttgtcagtacttttctacattgatccagaagatgctgtgcgatgcgacttacatttcttcgggggatcgagtgaccggcagaaacgagggggtcctgtcgccacgctccggagagtgtgcgttttcgggcagagcacaaacgtcgaagaaccagcgcgtccgtctcgcgaagcagagaccagactcggattcgtcgatcgcgaggatcgaacgaactccggagaaagcgacgagtgcagcgaaccccacaagcctggaaagcccagttttttgtgcaagcaggtccccccccgtcacggtcgcgctgctggacgcgctaagcagacagcagccaccggaaggggaagggagcagatacagctggttcgtttccagcgactgttggagaatgaaagaagtttaaatgaactgccacgcgtcaaagaaaggctgcagaggtttttcgcgaaggatctcgctgcagagtcctcagctttggggtaggccgactcagggaaaacaccccgcaggtcgaccgccaggtgtgctctggacgcgcgggggaagtgaaagttccgcgggctatctacagcgaaccgacttcccgagaaaaaggactgagaaaagttgacgttcgtgcgtcctttcgaggcgggaaaaaccagcgaaaatcgaagccgctcgcgagccccacactacctgaagttcgggcggtttgtgcgcagcgagggaagtctccgcatataagaggaccaccgtcactaagcgtagaggccgagagaggcctacgggtcgttgtgtctccgcccacacttgagaaacgctctttgttggcctgaggcgaccggctttcttgtacgcgccgcggctgttccttgtcgggggtttccaggggaagaattcactactcttctgattttcctgcacttttccgtcctcgtcgccaacgtttcttcgtcacga

SEQ ID NO: 3624 - DNA, 2634 bp, Toxoplasma gondii
  source 1..2634: mol_type = genomic DNA
actggttggcaaatcggatacctttagtgactgggaccagcccgacagagcctccggttggtcgagatggtgtcttggagcccgtctgttgcctgcgctttctgagtgtctctctaggagtaccgtgcaccacgggaagagtttgttgctccgcgtagctcgtttcgattcgaaatcatgcattcctcctatctggagcagcacaccaggagagaccgatttctgctgcgtactggcactctccctgcagtgaaagcccctccacgacccgcagaggcctgcattggtgtgtggaaagaaagagagacgtggaccatatcgatatatcggatggcgtctctgtgccgaccagcgtttaccagaacgcaacacaacctgctccacagaatcacaaggatatacacagatctcatggagaagcggacaaggggaaaggaaactcgcaggcgagtcgtctacctgtttcgggttgccttgagtggcaggagcacgaaagaccggggagaaatctgacgtcaagtgctcgggcagtgtgggttgcagtttgtgagggtgcatggtacctcccttctgcctgtttatccggaagggcgtggacgcaaaggatccatcatgagaaagttgagggtggacgcggaatcgtcccgcgacttccacatagggctcgttagccgatgcggtcgggccctgacacaccaaatgccgcctggggacgtaaaacagtgcccgcgagtaagaggaaggactccgcctcgccgaattcgtgtggatgctgccgttttctggtgggagtcttgagaaggggtgcctcttgccgcgtgttggcaacgatgcgtcaaacaggaccaacccactacatccttgtagaacaacatgaaagaaagaaatgagccttaaaattgcagtgacagacattgtcagtcacagtctggcccgtcctcaaagagaccgttacgacgattgttcgattttctgcccaaacgcaaggaggggcacgagaacatccgttccgatccttgtatgttcattacgttagaaaacaatcggaagccaaaaacactaggggcatattacaaagcagcttaacacttggcatttaaacatatctgcagcttatccaggagagctggaggaggcgggtaagtcgcagagtctcaccgactggaagatctatccaacagtggcggggacacaccacagtgggcatgaagcccacatagtaatgagaaaaacgaggcctccgtctcacacttcttgtcaaagactattcgtgcccctatatatgaaaactgttgaaggaattaaggcttcatctccaaaagggaagccctgttgttggtactgttactgggttgcgcatgccacagcgaacgcagccatcaatcagaggcgtgccgttgaccgaatgcgatacgcttggattcactctccaaaaggccgcagctactgtttaaaacatgtttttctacattggctttccccttcagagatatacgcaccaagagaagtcgtgaaactagttggtcctcaagggtcgagcctcaacaggaccttccataaactctcacgcgatcagtgacatcgggctgccacgtcctgcacacccgcggagtctggtttgatcttccacgaagtcgaacaagagtgacagggatttgtcgtgcaaaatggtttcaggtaaatgcagcaaacaaagcaacggattgtcgactttcgccccgcagcgagtgctttcaatgcgtgtcttgccggatcgacgtgtttcgagtgacctacccgccgtgtagaaaatggggttccaaaggcaagaacccccacggttcgaagagggaaacacgagttaccagtaatacatgatctatcaaaagcacagtgcagaaaatagggtcgacgtccgggtttgcagtaccggtgcagggactgagtcctattccttcgggcacctcggaacgaccccaacatcgacgcatgcgaagacaattttgcgtcaagagagcaactgagcacatgtagcttctggaatcgtgagcaggaacaattcatgaacgaagagtatctggtgaccaggccggcgtcgactacaagaacacttcgttgttgccccggcggtcttcatcttttctaccggtgtagatggatgacgtacgaccatacgaccaagcgctgggcgggcaggaaaagaaactcaggcttcccaaccattaccaaacgttgttgtggtgcattacggtcatccagtttctacaagagactccattgctccaattgttctgctgtggagagtcaatttctccgtgtgtgccgcatccctcgttcccccagcgggagttctctgcggatagcttcctcaggatcctctactcatcccgtgggtcacggtgtggccagctccgaaagcttcaaggattttgaattaccactcgcagtgattcgttcgttgtgttttctgaatttcatcttgcggaatggcgcgcctgtatatcaggcatggacacggaggaacaggcgattttcctgctgcatcccccggtgggtgataagtcttctcctgcaatgtagacagcctgggcgacgtacgccgggtgttttcgtgccataggaagtgttactaagccttatgtgggttgtcctcga

SEQ ID NO: 3625 - DNA, 3587 bp, Toxoplasma gondii
  source 1..3587: mol_type = genomic DNA
gcaaggcatgcagttcggtgggttcccgaattggccagcgttgcagagagaagcgtttccgccggaagccgcttgagaaaagggggaacttccaaagacaaggagcgcaagggatagaaaaactccttgcggagagcgcttgagtcgcagctgcacacccaccatggtgagcgacttggattcgtttgctctctcccatcgaaaacgtggaaggagactcttcttcttcactcggctaagacggcgggcatgatgctgtctttaccggtttgcttcagtttcagctcttcatctgctgtttctcctctgtctgcgtctcgtgtagcagcaggggacggtgcatgcagttgaggctcgcgaaaggaaggcgccacaggctgcgaggatgccgccgtcgttggagcagactccacagcggggaaggttgcgaacgagcggcgagaagagagctcttgcgctgacgctcgcaactgaaacttctttccctggaagggcaagcatgcgtcggcagtttagcgctttctcgttcatcacagaagcgaaaagacctgagagtgagaggcggccgtagagcgagaaagaagactgagggaaggccgtcaacgagtctattttttaggggaagatgcggacacaagagggccgcttgaactcgagaagagcgtctccactttgcaacgtgtgtcttgtctttctgccgcgccgaactttgatgtctccgtattgccagcctgtccctgattcccccttcccccgtctctctcggcctccccagcttccccggtgtatgaatctttttccccgtctttttcgcgactcgcgactccggggagtccacagcgcagaggtcgccgtgggcagtcttcgcgtttcaccgacgggaggaagagacagaagagaaagacgacagagaaacagtgttcctcatgacgcccagacagaagcagtggtcttcgcttactgccaaagcttgctgttgatcgaatttcctccgtgtcttgatcaaaaacgttcgtgtgctcgccagcggttcggggacgcggactgaagctggggacgaaaaacgaaacgagggatccaagctctccgagtaaactggaaagagtgaaagaaaagtgaacgacaaaatctacctagcggtgagggaatctgtggcttctctctggtcgctgccgccgctcgattctccgcgaagcctcggcaggtccgccgggcagattcagagcaagacgacgccgaaaaaaggctaggaagaaggagggaaggggaaaggaagggaaaggctacagacagaaactctggtagctggcctttgctttttgattcagaaaatcagtttctagcgcgttttcttaaagtctcttcggcttctccacccagccggctgcactcgctttgcgagcagctgtcaatcgagacaccggaaaaaggcgcagctcgagagtcgactgcatgcacacaagcgaagcaaggcactctgaacagcgttgagcagaaaaggaaaaagaaagccgagaagaccgataaaggcctctgccgttcaaatgtatgcattcgtcttcgcggcgaaaaaaactgaagagaagttctgagctgtttgtataccggctgatcccccttgggtctcagtgcagatgtcgtcgacacgaaaccgcgagtttctgattatcgccggatgaaaagcgaggaattcacaaagggtttgtttcacagaaacagtggagattcactttgagtgttcttcagctgtcttcgagtcttttaagtctgaaaatcacccgccgcggggaagcggtctagcgcacgattgcaagtctatttctctcttgcgtggtgtgtctcccgtagccagtggatggttttatgcccttacgaaatgaaaaacggataacggacggggagtgtgcgaacgcaatctgctgtgccttgagaaacaagctgtgttccacttttgattgtgtctcagacaatctcctacgactgcctgcactggccgtttccctacgatcacggtacgcgtgcgtggcaatgtaaacacacaaacctacgtagacttgttcaaggagatgttcacatggcgaggaacagatgcgacagctgtatacggaattgcgctgcacagagtttctacgccccggttcgttaatgggacgtctgcatgcatggagtcagtgaagcacgggtcgacgtaaccgattgagcgcgaaacattgttaaaacatagtttttcgaagacaactgaaactttaaatcgaagaagataaaagatacatctggggagcttcctgatgcctgttaggtctaccggcgacttattgtatcatggtattgctacactaccgtaatacagtgctacgcaccgcctgagacgtcacactcgtgagcgctgtacgacagcttcacatctttcctcctgtctgtgtcaagtattttatcaggtaaacaattttgctcagatccttcagagtatcgtgaagacgagcaaaggacgggaagtctccgaggcagcttcgttcgtcaggctacgcacgaggaaatcgcgttgctgcatgtgtttgttttcagacgcagtcaaacaaacactgttgaaagcagaatctgttcaagagatgttctttttcgtttgtttcttctcgagttcatttgtagcatcagagagttttcgatctcgtcgcactccttcaactgacaattctctagacacacatatatacatatatattatgaatgtgtgcatgagaatggttgctttgtaggtattgcatcaaagttaaggctacaatttgcaccacgattttgaggatccggtgacactgtgcaaagggtgcaagccagacggcaactccacctgcatgtggcgtcagagcgtgttgaatcgcgttcacgaatcgagcgaggttaacaagtagaacgactaagactctcaggagacagcggaagaaaagtccttagatgctaggggctgagtggtgccgcagggacgccgcgtggcagactccttgggattttcgtgttggatgtatttctggaaataaaaaaaagtcgatcgcttgcagaggtgggtccttggaatgtcagggtacgtgatttggtgttctttcacgaatcaggtgacgaatgtcgcaaaatgagcgtggcatggggttacaaagaaacagacactgcgagactgcggtacttgcattctctcatatgttgaatctagaagtacaaaagccatgtgctatcaatagatcctgggcgcatatcttccccgcttatcttctcagtgaaagccgttaaaagaacaggaacacagctgctgtgattaaggttccaaatatgtttctaacagtcgaaaactcacgacgcgaaaaggcaagtctccattctacgacatgcagagttgaaaaaggcatccttttagcgtctgccttgattggtatgtatttcccagaatccgcaactgtgaccgacaatccagctagcagaagctttgaggaaatacctggtagccggatttcgctatctcaagagagggaatcagtgtgtagcactgtcaaccaagacagggaactgtcggcgtccaacggctctctcccatcgag

SEQ ID NO: 3626 - DNA, 2720 bp, Toxoplasma gondii
  source 1..2720: mol_type = genomic DNA
aacaaagccaaaaggtgttgttctgtatatcttctgtttctgtgtgcccggactgactcaccgtgttcagggccgcgactgcatttatttgagctgccgagttactccgttccacaccacgctggcggagcaggcgtgcaagcatttctcgcacggcgtttgttcaccggcccttcgcacactgctcgtcagagcctcccaggcagctttccgcagtggcgggacccgcgctccggcaaagactgcttttctatgccgtaccagggtagccacgacagtttgcctagtccacgggagcaaagcagagacgccgcgagtctgagcgaccaggagtccagtatcgtgctcactgacacggggtcgcacgctcgcaggcgtgcgacttggaggctccgtaactcgcgtccagacgagcatgagggcgaagatctcggcgaaacgtctgcgtgctttaacgaagatgctgattcctggcccgtcccggacagccgaaccctcgaggcagatgccgcaaacgacgaggacctaccaggctgcctcttttcacagccgcctgtgactcaggtgctgctcagacggcaaatacgggagctcggatacgccatgaattgacagagttttttcgattaggtggagtttccccggtgaatttctctgttcgcttccgatgttctcgtccagaccgcaccggtcgcattgtctgcgtggttttcttcggtgaccctcagtccactgttgaaccaaagggtccatactggttggtaatgaagcactaaactgacacgggaagcacatgttctgaagagatacacgtttcgctgatcatgcgttcattcgtggaataaagctccaccgattcagtggcacgcaagaagtcgtggctacgacgatggtccccgccatcaaacctagcgactactgaagtcagctcgacggtgcctgagtaagtcctagctttgtttaaacgccagcaggcgctgacgcacacacatttgtcactagtagtttccattgaaactggctcttcgatttgggacaagctcaagtcgcctcagattctccgcggtggttggcaaaaagtgcgcgcctgagcgcgggcggcaggagcaaaagaaacgcaagctccgatcttacggggctctgaagtgaacgcagtcatttcattcgtcagctaacagtgtggatatcagtgcttcgtcacgccgccacaggtgtgaaacgcgtgcatcctccacgtatctttcaccagagaactggcagtcctatcgtaagaaacctgagaagttggccaagtgcacgtttcgctactcagaaacactcatgggtggtaaggtatgttctcgctacctgtggcgagtctggcacgtcgttatcgtttacgtgattacagaaacaagaggtgcgcactggactattccctcgaaggccgagccctgaagctgcttcacgctctgatgggagttcttctctacaaatcgactattttccccgaagtgaggcggtgcaaccgctcagcaccacaattgtaaggccactggattgccaaaattatttcccctctacgctacggtacggcgacgtacggatgaaaccccgtgccctgagtgtgtgttacggattcctgcaagattatgtccctcagcgaaaggaaaattacgacatctggatttctgtccccatcttttggtttgtctcacagccataaagggggaggaaacggagtggccaacgcatcctattgaaatcactgcctaaacgcgagttcagagcatgtcgtcctacgaggaagactcgacctcttctgcagggcacacctgagttccgaacacaccgtgttatcctgaattaaactggaagaaccttcctggaaccataagctgctgcgtaagcagcaaaccaaaactattatccatgaaacgggagatacgtcaatatcaccctgtactcctagacctggcgacgggctgggcggcctttgaaacaccgcaagtatcggcaaaccgaagtgcaagtacaccaccgctggaaataaggcggatgtcagaagagttttcctcaacagggcttgccggaagaaacacttggtgtccagcagaacggagaagttccagacaaactggacggcatctcgcgctagaaaaaactcactcgacgatacggccgcgcggatgttgcgccgccttctgcctgagcatgcagcgggtctctcggtatgcagggtatcatcccggtgtgcccagcgaccccgaagggcgcagtgtctatgttgtcccagaaaaaacagagtcgaaggaaaaaaccaggttttcttgcggcatcccccttggccgctgcaaggccgctccctcggcaaagtcgtcaatttacgctgtcgtgcgcccgaagggcgcttatcctcgcgacctcgcctcattctcagctttcacgcgataaacctgggccgccctcaagattttccgttgtctgagcgtttgctcccacactggcgaccaccgaccggcgaagagtcttgcctgaaatccaagtgttccgacagcagttcgtgtatcggcgactctggacgcgccggaagctggcgtgctgtgaggtgctcttgtcgtgcaggcgcctccgcagcctttccaaattcgcatgttccttcttccagagtccagcaacggccttcgatgtctttggtttgactgccgctctggtgccagagtcgcagtgagtcgggtgta

SEQ ID NO: 3627 - DNA, 3168 bp, Toxoplasma gondii
  source 1..3168: mol_type = genomic DNA
ggcatttttatgcggattgacggacccagctgacgtgtcattcatctgccgcgaaaaactgtacagttcaaatgaattcatgccgttgtttaccaggtgctgccaacctttgtcttgtgttggacagacgaaagcatcgtttacccgatgcaaagtctcgattaaacacacaagatagccggcagtcagtggactgcttgctatacgagttaatacgaaatagaaatgcgcagcattatcatatgtatcgtgtggtgcaatatccacatctgcattactaacagccgcgcctgctgtatcttctagagtatttgttcttccgtttgtttgcacatagacgattttggaagtggaaggaaaccatcaagtgtcgagctgcctacagcctaagcaaaagtaggagagggaagacttcgggaacatcggtggaatacggaatcgtcagcagaggaagggtggcgtatttagtgtcattaggggggaccaagcagccaatagggtaactcagtgtcaccacatgggttaccataattagtgccgggtgtaccgcagcaaaatatcgataggtcccgcgggttcattttgatatttttgctaaactggagcatcctccagttgactatggacgctgaaagagtgtgaaacactggtaacttccttacactgccttgaaaaaagattcttcttggggaccgtcacggtttacacacaatatcaattttcctcccttatgtcacgaattcaggtacttgcatcagaggataaggatagaaattgatcgcatgctccgggtggacgtgtcgggtacattttcccgcttgatagagcacgccttgaaaacaagagtccaccgagggctttcactaggaagtatgatgcccacgtgtacggatgatggcggctggtttccggccggtttcttgaacaattccgtcgagtgacacaagagaactagccgttgctgagggtaaacgcgtggagtttggaccgcggcgttctgtagaacagtcagtgatacctcgttgtgcactaggtgacagaagggcgactttgtttctggagccatgtgctgcaactcagtcgtctgtgttgttctgtcaatcaaataaattccgtcgtcactggtagttcattggcatgttgatgacatacaccttagcaagccacatgttccagatggaattactaataaaactgcaaaaggcgccacgctagcacctgggtatgcctcagaaacatctcgtgcatttgctatcgttcagcatttggttagagaagtggcaacaagacgggaatttaggatgttgcctgctataacagcttcttgtgtggccctcgccagaggacatcagatccaacagcgtgaacaacagtgtatttgaaacctttccagctgactggcggtagtccgacacgctgcagcctttacgcctccatgaatccccccgtctacccttgaaaccgcctacaaacgtcgtgttcattccctaacacttccctcttgtgttccgaggcatccttggctttttcacgtccgcaaaccggactctcagccctgggggtaactgatcttaaccaagacacggactctatccagctcagtatgtgtgcgacagtgtgcgtgaccctgaaagtggcggaaagttgctggaagacatgactatagcaagacacactgcaatttaatttcacatctgccacctggccgctgacaatttatcgtcgtgcctcgacactgctgcgccctgcagctttgtcacacaactgacactctcggaagctcgttttccctcacttctccaccggttcgtgcatttgaacccgtttcccccgcgtttccacccgcacaacttcagatgaaaagtctgtaaaccaacgcgtagccagacgacatatttccacagacattccttccctcagcacacacgcccgcaccagaccatcgatttccagagtttcgctgaccccgccctcgcagaagaccctgtcgcctgagggtttctttcgcagggaacgaggagaagacagaaagtcaggcgcattcgtgaaattagttgtgggcgtttgcgtcaaacaactcccggaaaacagcacgaccctgcgaggcacttgggcgggacgtgtggtagcccgttggcaccgggaatgtgcctcgatgctgtttcgcagctgtcagtgttacgcggtcagaacaatgggaactgccggggcttcctagttttcgcggaagtttcctctctgtaaaagatttaggagaaagccgaaggttaagccttgtcttctcgcctctgtttcgcggttctttgccgaagtcgagttgtgagcttgagtgagaacgtagggagacacgctggacgttctcgagggtcctggcgctgatcgcgagaactgccaactgcggcgtttctcagggcctgaccctcccattgtgtcaccattcgtcgattgttttttcccatcattcctgacctcgccgtcagttttttgcagtttcttttgaccccaaacaaagcttcggtgtggtaacactttcttgtgccatcgtgaagtttcgtttgtgtgttggttttcctgggtgcaagtggcggaagcgtgtcgacacagccgaaacccgctttcgtgctttgtttttgttcacctcctgtcgtcctagtttcctgtctccgctaagccgtgtcagtcaggattctggcgttccgcctgcgccttctttgcaccctcaatttcttgatgcaacggttgtgcctcacgcgaaagcacagaggcttcctctcgtgaaagcggacgcagaacagtgctcttccgctcgcggagggtttgcgtcttttccgtctgacctgacgcctaggtgacgcgcgaaagagggcacagggacaagagaaggaggaagatggactgcgtcgcgacccgcagcaactcttggtagcactttagttcccctcgccgaaagagagacatgaacatcgaacggtgcaggtcaaagagtcggagggcttcggccggaagagagtgtgttctgattctttctaaaaaggaaatgtgagtgcatacggcagcggctgtgcagaagcccgtccgtctgtgagggggactccgagagagaggtttctctctctctctacgaacgcggaactcctcgtttccagtgtttcgacaaccgactcaaca

SEQ ID NO: 3628 - DNA, 2404 bp, Toxoplasma gondii
  source 1..2404: mol_type = genomic DNA
cagaattttatgactctacgtactctggtgacagtgtatatcccaacatatattctggttctttcaactttttgaagcacacgttttaatcttacctgctttcgatgtagtcctccgaacactatgtgttcgtgcagagccgtcttcggcggcccatctatgaatttaaccataggttgtattttctattccatgttctctgatgtgtgtacacatgatgactgtcagcctagaggttgatacactagcgtacttgtcagatatgataattacgattccaattcctacgggaactcagatctttaattggataggtacgtatatgacttgtcatagtacgacacgaagactagaactatgggctgcccttggatctgtttttctctcaactttaggaggcacaacaggtgtagttacgggcagtgcaggtatggatgttgccgcagagtacccgttgtcatactgcaagtacacaggtggattgtgcaacgagggagaaacgccagagtttatctagcaccggaagtgcagcggagctccatgctgcactttcgatgagtcgccaatgtggtgccataacgacttcgccactgctctacatataattgcaagccgacacacggtaagagttgacgccaacttaaatgtaccggttccataagagggaggcggaaacggagaagccgaacaattccaggttgactttgttgttgctatccataggtacggtaatctcatcgagcagcagaggcgactggggcccatccacttgtggcaattatatggaactgaactgcaaaaacacagcactactttcctgcttacagtcgcctgtccggcgacggaggcaaaaagaccccactgcttgaggtcggtctcacctaggttcacccacattcttttgcgagactctcttggaacagtctgtgttcccgcaccgggagtcggtgctggactgtcttgtgttgctcgacaccgcaataatatctccattcaaaagcatgtgaccaaaatgctttcaaaattcatctttcaatcgttttaacagccctgtgtcgggtgaatgaaggaaagggagccattgtagtagaaagacgatagcatgatgtgaattcggcctggttggatgcagattctgtctggcacgccactcactataatcgttgcatgctctacgtgccccgtgaaactcgaatccctctcatctcaggctaagatccttgtgcttctgatgtccactaaaaagtgtgtggggcaaacacgaaaaaagaaggatgtctggttggtcgaagtcctcacacaaaatgtcgcccagatttatggcaaacgccttggtgtggctttgcggccccttggaaagtgtgccgcggcgaaacgtttcggtggagttacagaggcggagtcgcatcactaacgacgttatcatgtctctctcaccaaacatgttcacttgttgtaaaatacagtacgggatggaactacctttctaggaaataccatctcagccgcaacttcagagtatgctcgcgttacaaatgcgccatctactaggcaacccgccatggaacactcaacgccccccacctcctcgaaggtatgtatcggtacggaatgaagctccacctcccaggaggatacgcgctgaccgctatcgaggatcgtgtcacctctcgttgaaccgaaagagttcttttcatacttgcaagcagttgtaacatttcttgccgttgtattggacagtagagtcgcttggctcttgagcactctttctaaacccagcgttgctactgtgttcaatacatgcgggatgcatgagctgcaggaagcgttgcgcagccattcactgcaactgaacgactattccgttgtgattttttcgttcaaatgcggctccgaaggcatccgtgcaattgttaacgctgtatctcactgaattgatctggaaacaatgttttattcgttccgtgagcgtttcaacgtgtcgttgctttgctccaaggtaatcattagtggtagtgggcgtaacacgctagtctcctccaccgcggaccttacgttctctattgatcgtacacccgccgacaagattcctggattccttgcttatcctggcatattcatgaaaggctttttcagtaaccggttctaacaccgccagtgtccccgtctctgccgctgcatcgacgactgcgatacaacgacagcggcaccaccagcacaatccgcagacgatgagggaagcatcatggccgagagtgacacgtgcattctcggttttggtgcttctcttgttcggcgtgatgcgatcattttcaaccgtgtttcggcactgccgtaccaatgacttcgagagcttctgcgtagctttacgcgagttgcctgaatggtataaatgttaaaaaca

SEQ ID NO: 3629 - DNA, 1738 bp, Toxoplasma gondii
  source 1..1738: mol_type = genomic DNA
gctatgcaaaagatcttcgttccttggcacacttacatcggcagtatatcgcgctgctcgccgtagagtgtctgttgtggaccgtagaagtgcgaggcccgccattttcacttcggcaaggcctctggcccaagaaatgaagacgccggcagggaacaccagaccagctgtcctggcgtagcgagaaagatgtcggatgacgacgacagagacaacacgcaacgtgtatcacctggattcccactagaagacgcaatcaagtaaacagggaagaaagagcaacgcaaagcgaggtctcgcctcgttatcggttgacctcaaggctgagaggcggtgccacggtgtacaggcacggggctctttagcagagccaccagtggaagcaggggacgagcaggcgcccagggtaaggcggctctttcgcctacttcaccgtaaaagtccgagttctcggtgttggaaaagagaagctaacgaagacgcgtgacgccacggaacggggagaagtgcgaatgcaaaacgaactttcctgacctggaaaggatgcagcgactacgcattctgcccgcacacctgatacagagagtactgtccggtattaggtcccttttcaaaagatgtcgaatttggggaagtgggggaaggaacagaagtttcatgcttctttcagttacgttgaaatttgcgtgagtcaaatataaccatgcttcggccgcattttgatccgatgctcataatgtggcgcaccggcagtggacggagaaaatagggcacaaaagaacgtattgatagtgctcattcctggcggaaacgccatagtagggcgtgtggcgccgagtggtcgcatacacaaatcgtcgcgagatgaaccggtcgtgtcacgggctagacgcagcgcatcccattcccgatgataatagcgaaggaagcctctggcacggaaatacgcaataatacttcagtagcataaggtgagcatggcgatgggcagtctgacaggaagagggatcggggcatccgctcgcaaaatggggccgccgcagataacagcacccggcaaaagtgaggagacaacacgggcgatactttagagctgcgttgaagcgaaagctcctcagacacggaacgaactgctttctttcaaaagaagtgcaagcgatggaaaaagcgacgatatctaagcaacaagcgcgctccgcacacgctacaggacaggatagagaaacgagtcacagagcacgaaaatcctcagcttttcctctcgaaccggaacagaccggctgttgagctagcagtttccctgggtgttaatgaagagagaacaacacgaagaacaaactctagaattgatagatacacactaacctgctaacacgatgtctaccgcaatttttgtcgaggttcagcgtgtctctgcttcctacactcaagaacagccagcgtcgcgagccgagttgctgcgatcagcactacggacgggcatgctgcatgccgcggaaaggtggcaccgtacacgtatctggttcttctgagcaagacaccaccgaagaaattagagagtttttttacatctcttcgtctgtgcaaaggacgatgggaggaggagagcgcagccattcctgtgacggtcatccttaagccagtgtggcacaccgaacactggcagttggttggtcgcagtagagaagatgcctctcaggtggatcgatagattcctggagagatgagtacaattata

SEQ ID NO: 3630 - DNA, 1851 bp, Toxoplasma gondii
  source 1..1851: mol_type = genomic DNA
catgtggtaatgagggtagaaaatgaacgacgcaagacagtgctgaacactggaccacacagagggcgcgattgatgaagtcgcttctttggtgtgactttctgtcgaaaaggaagcatctcattcacaaaacacgcccagtattgggttttccccaacgacagggactgctgagttgcttgttgctttctcgcggattgcaattgggcagcttgccccaagtctggactcccgttcttcagaacagtgttagtggttttggcgcctctcccagtgtgttcgatcacgtgcttcagggtatttcacctgaacccccgcatagctgtgcctggcgatgtgttggccacccaaaaatgagatccaaaggattcacagtttcaccggagtccaatttcaaagaaatgcaacgatgttcacagatgttcttttgatctggccatgtcgcgatgcttccgacggggaaacccaccattttttggctcgcaggcgaacgcgcgagctccactgttcgagaccgtcggtaaaacggcacagcgttcctgtgcgttccattttcccgcaaatctgcctgtatcagtctccttgtactaggttcaatccattcaaaggtcgcagtggccagccggctaaggatcgtgagcagatctgtgcgctgactcgcggattcgtctaaacgtttccactggacgacagcgaaaccgcaaagcggcttctgtcacctctaccaaggcgctgctggtaaaacggccgggagggtatttacaggttttctccgtatacataaaggggagagctttaactaacaaatttctcgccgcatttacctgagtcgcgtgatgtcttccaccgtctaactgcatctagcaatggaggccacatgccttgaatctatttagctcgctgtgtcggtggtatcgcagcaaaaatggttactatgggtccaacggaatagctggctgcgttagttcttcgagtaatgacttccgaacccccagtttacggacaaaaacgctttaatccacgcagcactggcacactatcaacccgttgccgcagtcatcacttacgcaaaaagcccctcccagcctctcctaatgctcgagaatctctcagtcggaatcctatatgaattgaaagtgcgtgaaactcgcctgtaactccgatttggaggtcgagagaacgaagacacatcctggcacatgcacgcgtggcggcttcctcgactgcattttctctccggctgcgaaaaaccagcgttcgtttacacgcgtccttttctgtctctcccgtctgcctctaggaaaacgagcagcgtaatgtctggaacgaatgcgagaaacgtgaagaaacaacaggaaaaacggcgttcaacccgcgagttcagcgtcgtcgatttttcggctcctcggcgcatgcaacgcggcaccggcgctcccacgcagaaatgcctcagagtctccagttggcgtttctcttttcgcgaaaagagtcccgatttgcattttgcaaaacgtccggacgaggttattctcggccgtgcgtgaaaactcgagaagacacaaactatcgcggcgtggaacagaaagctgctcgtgtcccgggtgctgccttgtggacgcctacaccctgccgtctcagctgcatctgcggtgaatccctgtggatcttcgatttcttggttttgtttcacgtcttctttcattgtgacgactcggaaaacaaaggtgagcagagaactgcttctcgacgcgagcgcctgcgccgaaaggagagcaggcacacgtcccgtttctgcatgccgtggcggtaacgcgcgtcttcccagcaccggtctgcattgcttccggtgta

SEQ ID NO: 3631 - DNA, 2042 bp, Toxoplasma gondii
  source 1..2042: mol_type = genomic DNA
actggttggcaaatcggatacctttagtgactgggaccagcccgacagagcctccggttggtcgagatggtgtcttggagcccgtctgttgcctgcgctttctgagtgtctctctaggagtaccgtgcaccacgggaagagtttgttgctccgcgtagctcgtttcgattcgaaatcatgcattcctcctatctggagcagcacaccaggagagaccgatttctgctgcgtactggcactctccctgcagtgaaagcccctccacgacccgcagaggcctgcattggtgtgtggaaagaaagagagacgtggaccatatcgatatatcggatggcgtctctgtgccgaccagcgtttaccagaacgcaacacaacctgctccacagaatcacaaggatatacacagatctcatggagaagcggacaaggggaaaggaaactcgcaggcgagtcgtctacctgtttcgggttgccttgagtggcaggagcacgaaagaccggggagaaatctgacgtcaagtgctcgggcagtgtgggttgcagtttgtgagggtgcatggtacctcccttctgcctgtttatccggaagggcgtggacgcaaaggatccatcatgagaaagttgagggtggacgcggaatcgtcccgcgacttccacatagggctcgttagccgatgcggtcgggccctgacacaccaaatgccgcctggggacgtaaaacagtgcccgcgagtaagaggaaggactccgcctcgccgaattcgtgtggatgctgccgttttctggtgggagtcttgagaaggggtgcctcttgccgcgtgttggcaacgatgcgtcaaacaggaccaacccactacatccttgtagaacaacatgaaagaaagaaatgagccttaaaattgcagtgacagacattgtcagtcacagtctggcccgtcctcaaagagaccgttacgacgattgttcgattttctgcccaaacgcaaggaggggcacgagaacatccgttccgatccttgtatgttcattacgttagaaaacaatcggaagccaaaaacactaggggcatattacaaagcagcttaacacttggcatttaaacatatctgcagcttatccaggagagctggaggaggcgggtaagtcgcagagtctcaccgactggaagatctatccaacagtggcggggacacaccacagtgggcatgaagcccacatagtaatgagaaaaacgaggcctccgtctcacacttcttgtcaaagactattcgtgcccctatatatgaaaactgttgaaggaattaaggcttcatctccaaaagggaagccctgttgttggtactgttactgggttgcgcatgccacagcgaacgcagccatcaatcagaggcgtgccgttgaccgaatgcgatacgcttggattcactctccaaaaggccgcagctactgtttaaaacatgtttttctacattggctttccccttcagagatatacgcaccaagagaagtcgtgaaactagttggtcctcaagggtcgagcctcaacaggaccttccataaactctcacgcgatcagtgacatcgggctgccacgtcctgcacacccgcggagtctggtttgatcttccacgaagtcgaacaagagtgacagggatttgtcgtgcaaaatggtttcaggtaaatgcagcaaacaaagcaacggattgtcgactttcgccccgcagcgagtgctttcaatgcgtgtcttgccggatcgacgtgtttcgagtgacctacccgccgtgtagaaaatggggttccaaaggcaagaacccccacggttcgaagagggaaacacgagttaccagtaatacatgatctatcaaaagcacagtgcagaaaatagggtcgacgtccgggtttgcagtaccggtgcagggactgagtcctattccttcgggcacctcggaacgaccccaacatcgacgcatgcgaagacaattttgcgtcaagagagcaactgagcacatgtagcttctggaatcgtgagcaggaacaattca

SEQ ID NO: 3632 - DNA, 2623 bp, Toxoplasma gondii
  source 1..2623: mol_type = genomic DNA
ctggtcacactaatctttgcacatgtcacttccacacatcctccgatacagacagcacatttatcatctcgataggagagggagcgctggcgacagcagtcgtttctgacatgtctgacagcacatttgtctcgcggggctccgatcgtctcgaccggagcgtgccgcatatgcatcactgagacgttggtcgtctttcgaagggtttcgtttgctttgttccccaaactcaaacgcgttcacgggggagtccacacaaatctaagcagacagctacagacttgctggaacggcaaaagaggtgtgttgaacctcggcagtatacatacgattcacaggaggggcgaaacggggggctggcgtacgggctgcgtggaggaaggttttgggcactgtgaaacgatcgtcggtttgtgtcggatgaagagaaaatcccgacgctccggaaggggcaccttggtaggggagcagagaccttggcatttgcaagggtgggtcaaaagggaaacttgctatgggatgtggagcagcttggggcggacacggcagctgaggtaaaggtgcaccttcggaatagaagatgcacgactcttgcggaggagcaaatgcgttgggcacacacttcgggaatatgttttctgccgggtaatcgaatgaggaacctgacacgccgttaggcacatgcaagtgttcgttaggacgaggttccggttggtacacacgcaagttgctattttgaataggatttccaaagttgatttccgggtaactcggcaaaccgtgtggtgcggttcctgagtcctgattctcaagggcgtccacaagaattttacaccgctccgtgtaaggggcagaagccgccgccgccgcatgaaccccagccatcgtgtatattcgctcttcttgcttctcagtgctttccacgggatgctggggttggattctcatgcccctgtggtgcacaaaaaggtagaagagtgtcatgtacctccgcccatacggcgcagaggcgatttctttcgccagggcaaccacggcactaaagttacgttgggtctgccttcccagatgcatgggtctgtcgtcactattcgactggcacggcgggaactggaaataactgcctcgttccgagagatcctctttcgtgaaacataaaccagactcagaacagtccaacctcgcgtgaggcatacggaccagcggcagcaggttttggcagaacagcgagaatgctgcgtcagtgggaccttcgacattcagacggaaatcaccgtttctggcgccttccatgccaagcccgcgactctcaggaacctccgtgtcctgttcagcaattgtctggggaatgttttcgtggaggaaggcgccacacgtcgcaaaactcatctctccttcgtgcactccaatcggtgtgtttcccctctcctcgccctctttgtcgttcaacaggtagttcaccacactggccgccgccgaatccgagtggactgtcgacaagttagagaaaacagggacaggtgaaccgaaatcctgcatgccgatacttcctggattgtagccgttgtcgaatggtctcatgtcatggcttgtttccgaaagctgcccccgttgagcgtggctgttgctgagcagggagtgcttggcggtaatgtgaacagtactgcgatcgttctttgcttgatgcaggaagccgctgttccacatttcgcgaatcgctatgcccgccggatggaatacatgttgaaagcgatcttcacggggaggagtgtgtgaagcttgaggaggatggaatgccgaaaagagctccgcgtacggtattttctcatagactggtagtgttgaaacttgagcctgtgcaccggagaaaccggaggaacgaccttgaccacttgcaggtgccctcaagctacggaacacctcctgcggcttcaaggtttcgtgggacattttgtctgtttcaggctcaggtgtgacgtcgcgcatgtttcctccatgcgttgtggaacatgtggagcatgcgttggagtattcctgtccgtccttggcgaaatgcgtttcccctctagcactcacagttgagtcagccgagcatgtgagaaacggtattggcatctcctcgccaccaggtagaggtctatccactctcctgagggacaaaaacggctgatccagctctttgggccggttgcttccttgttcaagatcccagaagggaggtccgtcgctgccagccgctgccggctgtagcaaagagctgttcttaggtaagtgaagagcaaagttgtctttggcaaagccttttgtttcttcctcggagcgagtgtcacgagtgtccttggatctgcattctgctttcttgtctgtaagttcgcaggactgagaatttgtctgcaacagctctgggttaagggcggatggttttggagtctgcacgttttgatcgttccccacatagtttcttctttctcccgcgccagctggccatggtggtatggctggactgaactgtgaattggattccctgttccagcaaaatgccccatccgccttaccaaaggaaggtgtgccccgttccctctgctccgcctgcgttttccgctgcgtcttttgccggacgcta

SEQ ID NO: 3633 - DNA, 2009 bp, Toxoplasma gondii
  source 1..2009: mol_type = genomic DNA
gtcttcaactggtggcatctctgtcttaaagcgtctactcttcaccgcctccgctgggctgctacatatcccttctctctcgtctagtgtgagaattgtgggctgcgcgtcctcctcagcgcgccactgcctcccccgtttgtggcagacgaacacagagacgaacacacagtctcccgacggtctctccggtctcgaggactctgcgtggtccaggtacgaaaaggatttttattttttctcgcttcgcttcgcccccgaaacgcttttctgtacgcactctctgtcgagccagaagaacgaacgacagaagccgacgcggaggtcgctgacgaaggtggacgcgtggtggatgtagaacgcagagaatccagtgaagagccctacgagggcggcgaggacccagacctcgagaacctcgaacagctggcgcttccccggtgtacagacagtccgcttggccgtgaggagcagccgccgcaggagagccgcaacatgcactgcgaggagaaccgccacgcggagcagaactgcgaaaaccagcagcgcaggcaccagacaccaggtgtacgtacaccccgcgacgcggcggccgagacgcagcagcgacgccggagcagccgcatgcaggcggcgcgggcgcggcagagctccacgtctcggggcgggagagaagagcggcaaaaaagaggcagcagaggcttcggagtcccctagaaaacgcgaactcgcctccgagaaatgatgagtttctgaatccttgaggaggatgcgctcgaaggagggctgtcggccgtctgtggagagggactctcgctcttcttctctctgggaggatagaggcttgagcggaatctcctgtggccgccgctcctggcgagaagagccggagacgagcccaactagcggcagcgcgaccgcgaaccctgaggctctgacttctgagaagctgtgcacagaggcagtctcgcgcccgtgtggagactccgcagaacacaccagactctcaaacagcggagaagattcctccaaagacgcagacgaagaaaacgggaacgaagaggggggagaagaagagaagcaacaggaagaagagttctctggattactcagcggattgggagcaagggggagagtcaaacgttttgatgttgtgccttcgttgacgtctctgtttagcgaaggaaaggagggcagcggcgcggtcgcagaaggcgcatgcgtggaaacggagtcgccagcctctcgctggctgttcttccccgcccccgtctgctgtatgtacacctctcgcgggctctgtgactcccttcttctcctgccaggacgaggctcttcccctccgccgctcggtgaagctggcatgatgcagagacgaaggggagggagaagaagagaaagaggagaagtggaggaagaggacgcaggggcagctagccgagtcgtccggagttactcgccactgccgccggtcatgtcgtcgcgcttttgtcgaaggggagacatgggaggagagtctggtggctttgacagagcatgagaaggatggacaatgaacagaaaggtccgctgtcgctgcacacagatacgagggcggtgaacggcgcgggcaggcggttcagcagcggtcctttgcagaagttgacgtagagaagagaacgcgagtctctgggcttcgagcaaaggatagaagctgcgtggttggtaccatctccaaatatcagagataaaagagcgtattttgtctccgggagaacgtgcaggccgcgacgctttcgatataggcacacgaaattggctgggcggagtcaaaagaggggggaagagtgcagaaactcgggcgtggaagtggagagagaagccgcttttcgtctctccctgtctgcgtctcgtctctctcgtttttctcagctctctctctcggtcttctttgtcttctctcggggcctctgtgtggctttgtcgtctgcgcctcgccgagcgcgggcgaggttggagcagccagggaa

SEQ ID NO: 3634 - DNA, 1499 bp, Toxoplasma gondii
  source 1..1499: mol_type = genomic DNA
gtttataaccgtatgctcctgaatgcccgggacgtgcagtaaacagaaaactcctgaacttaaactgaggagccgaaacgaaggtacaaagacatacaacagctgtgtctaggacacttggcgtcacgcgcacgtctgtgttacaaaaatcctgttggcatttggacgagtatgagctaaggggagaggatttttcggtcctaggaatcaggggagctcaggtgcgctgaggtggaaccacgtatcagcaaaaagaacctccaaggcatcactccgccaagaaataagcatcgacacgctgggcagctactaccttttcagtcaacgcggaaccactcgcactcttttttgcacagtttcctttacgtgcagaaggtgcacggcgggcaccattaaaatcaacgaggcgatttgtcttgcggctggtcacgtagttcaaactcgttgacttcagtgaagacgcgctgtgtctacagaagaaaagacgtggatctggatcgagagagtgaggcacatgaataagaaagagacaacgtacagtggacgaagccttacgatggaacacgcgttctggaggcggcttgttcaacgaatttcgtcacaggcaaatcccactgggtttacctctctatttcgactacttgggtcacctctgcaggacgagttctgaacctccaatatacagacagtggtacaaacaaatcaccatatcctccacacaaaaccagcacctgcagtttgtctgagagtatcaagtttgatcttctgcaccacccgctctgaaatcgtggttgaccatgcggtcgcacgacacctgcacatggctggagtcccacaagtgacaaagactaatccaggtgaatgtgggaagctttcgtgttgcgagcacacgtgatgtcgtacgcttgcaagttttgagggtctgctgaagctgcgtgagtcttttcctgcatgcatgcaaaaactacacatgcagagaccgacgggttttcctcaaagaaatgtcgccaaaattcgcctgtcttctatcatttcatggcgattatttttttgttgacttttcgttccatcagtatttctccccagctacttctcgcgtttagaaattgctcttgacaccatttgctgtaaaatcgaaaaccgtctttgtttcgcagccttgtaaaagaagcgtttcaccactcttgagggacgatcctgtgtctgcagcgtacgccttcttccgctcgtgccgtgtttcttctccaaacacacaggccgccctgtttccgcataaaatgacaaatcgctctctccaccgacttttgcgtcttttgctccgctcggaaagccgaccagtcaacttgcatgcgggcgactgcctctgacgctcgcatcctgcgcagatcctcgtcgttgcctttcgacttctcctagcagctgtcttagtcgatctgtctgttcggcgactcatcagtcgacagttcgcgttgtgcccgcctcttaaaacgctgtaaaca

SEQ ID NO: 3635 - DNA, 3798 bp, Toxoplasma gondii
  source 1..3798: mol_type = genomic DNA
gagaagacttgccgccagcagcaagactccaaggagtagcgcacatccaggaggtgggcaatgtggagtgtttagccttagttccattccacagacgcggattcccttccgcggggttgctgacgacttgttaccgagcgctccaaccggctcaatagacgcccggaaaacgcgtcgacccccgcgccattcactcgcgtagaaatgggcacgtcccgatgcccgccccagcctcttggaccggggacaaaggcagccgtagagaggaggactacctgtgtcccgctcggaggccgaggtgggttggctgtcaggcaagcgatttcgggaatcaggccaactatcggaattagatctgacgtttttgccgggcgccgacttctgccctcctgaaggagatccgggatcgccgcgcgaaccgcgaggtgcttctcttctgggcagccgacatcttggctgcgagtctgcgccacatggattgcctgggggccgcacatgccgaacagagcgtgcttcttctcggggaaacggaccttgttcagagaggcggggcccgtaacaccgagcgcacctagaggccttgaacacagctgcggtagcactgggattggcaaggcagaagaactcacctccaaagacagggttcttggaggacgagaccgtagactgatgtgacactgcttgtcccagcccggcctcatttgacatggaggatcttgtgctgtccatcttataccgcctggctctgtaccgaggcaatctcactcgactacttcgtctcggttgtgcgatcggagatccgtgcttcaacatgtgaaatgaagaacggaaatcgataatggggtagtcgtttttttctctggttgggcaagcagcgtcgatgtctctgacaatcgaacatcgcgagtcctgccgggtctccggtgacctgaggaaaatcaagacactctgggcacccggaagacgtcaagctggggcgacatcgatatgttttacatttcatatagtggtagtatagagtaaagcactctttcgacgtctgagtttcgtatacaaacacgagagacgtcgcaagttggtctaagtcgactgaaaccacggcaacgcggttaacatgaaacacactgtgacgctcaggcaatggttgatcttttgtttggtggcggaaaaaaacggcgatcgaaaaattaaaaccagtttcctgcgtcccgtggaaaccaaaaaaagatgggacgcctacatagattacacatgccgatataaatacggggagacttgggggacaaatgcggccactggcatgccaggaattacgtgagacttcgctgcacgcatgcaaagggggcattatgtgtgcgggagaaaatatcgcaacccgcagaaaaagctttgacatcaattcggacacatctactggggaaacagatcatttgtaggacggccgcgttcgagtctcctggttggccgtagtccatttgtgcgttggacgcgacaccctttggcaccctgcgtgccgcggttgcgaagcgcttccgctgttcggttcagtgccacttgtccatgagaaacaacacgtgaacttagaatggtggaggacacccaagaggcttcttacgttacgagtagggtcgtctgataacaatgcagccgtcaacgaacgggagaaggcccaggaatctcgcccttacaaagcgacatcaacataacatgcacagaaattttaatataaatacctacaggaccaatgacttcgacacacggtctgtcatctgcagaagaggcaggcagcttcatgaagactagcttttcgttccgctgacaccggaaaacgaccgtagactacagccgatcaaccagggctattcccattgagaccagtcaagctgctcggtcgcgatgtttcaggcagacatcagcgaactacgggactcgctgagtgctttcggggcgacacaagagagtccttcgcttcagcgaattccacagcctgtggcgacgaagtttgtctacctgacgttcagaaccgcggcatatgagaggttctacatcaacagttgctggcggtgggaatgtgagtgaatagaagtagcaaatgctggtagacactcgtagcctgtatctagtgatgataattttcagagaaatatttactcaggtgaagcttgcttgggcgagtccgcactgaaatagaacaagaccgggtcgccaagattaaggaattacagcgacaaaaggtcaaacactctgctgttcacttcctggagcattatcactttcattctgcgattcagccagcgttgacagaacaggaattactgttacgactatcgccagagtgtgcactcacgctctcagtctcctttgaacctttcactgtggctgggcgatgggaccgagtggcacgttttgaaaaggtaatctccaactttctaaagcttcagtgacgaatgaggatgacacgtccactggcacgtgggatagacgtccaagacacacggcttctagcgaacacgtggtagcctcagcttcatggccgctccatttttcgaagtgggcacgaatggtttgtgcattccaaaggttatacagaggtggccaagacgcaaacagcacaacttattttagtgacagcaggtgtgttgaatcgcacaggaccgccagtcgtacagagatacaaatagaacggaaatacctacaatactgtcatttggagtaaataagcttttttgacacatccacaatactgcatcagcgtacgcgcttgctgagatcaattacaatttcaggtcatctgtaacttcagtccactttctagccctggtttccggagttatacacggaaataatgtgcgcacacaacccgttcctatactgtacgaggccggcaaagctagttgttcagcaaggaggcaacccccgaagtactggaaggggaatgacgcgagggagtccggatgaaactagacgctctcggacaccagcactgtcacagggaataccggctgaacgagccaccatgtgcgtgataccacaagagctgtttatagcgcacactgaacacacgtgccgctcgcagcgtgtacgtaagcttctctgtcttgtcaatgtgcttgcttggcgcaatcattgttcatgtacctctcttctggaacttgttccttgaaggttgacactcacgcacaatggctaatcatgcaaatgtccaccgaagatgcaaggagcatcgactatatcattccacgagaccttttattttttctctctcacacgtgcacaaatatgctgcgggtgaacgcattgggaagttgtcagaagaaactgagcataatgcagcgacagcatctctgctgtggcgtgcaagacaaggacaccagacgacatgtaggtgggacaaggaagggcagcaccattacgtcatgtgtacccagttaattattacggaagtcttgttctttgatgccgcgttcagatgtgtctcctgggctccattctgatactgcattagattctgccagcacaaccaggaaaaaaaacgagtagggaagcagactcaagttcggtaattagcaagtctgggtcggtttcgccatgagacgcgctaacgagcgagatgccgcgtctcttttcctggtcaggtgcctgagaaagcgtcactcagacatatgctattctgtagcagcatacgtgtacagtgctagcagaggtgaatgtaatggcaatttctttttgataaagaaatacctttttgctctcgtgctaggtcgcaggtgccggaggttcccactgctaagcacaaaa

SEQ ID NO: 3636 - DNA, 3745 bp, Toxoplasma gondii
  source 1..3745: mol_type = genomic DNA
ctatctgttacctttgtgtccttgattccggcttttgcggaggatatgctagcctcttggtaccaatcacgatctgccttgtcatcgcgcgttagtccagctgttctgactctggttgattcacacaaacggtcccccattcagttcgtctggtcgtacacagcactttctctcgcagatgcggagcagcggacaggtggggtgaatttcgagaaaacggcagctcagatgctagcatgatcaggaccattgtgctgggcggactaccctctgaggcaggagcccaagcgtgttctcccaattcctttgtaaggtgaatctagattcagaagacaccgacacaatacgcgcccaggatagagtgtgtgttctcgaaggggcaagtacacaccgtacaaagattatgtccacatgtacgtctcagttaatatcgatcttatgttcgtcgctatcttcccggcttcgcactaccatttgtttacgcagatggcgactggggaactgcggaggatattcggagcgaggacgagagcgacacaacagagccagagacagaaggggggaattcaaagtgcaaaacccggtgattttttccttctccttgcactttggccagcatccaactgagaaatgtcttttccaaacacaaggctcctgtaaacagggaaacagcgtgagagtggtagagcagcgtttttgggcatttgcaagagtgctcgcgtatgcctcagaaaagggttgactagtaacgagaaacctggaatttgcgtatcgtcggtgggtctgtgtctcgaagtcgcgctgagtgttcactgtatttaaatgcaccccgtggcgtttgtgtatctgaatatcgaggctgactttgcctggtcaggaggcccttctctcggtgtttcctctcgaaaactttgaggacgttcgggtcatgcgtttctgatcgcggcctcggtctttggaccctggtatttctgttgtcaatttcgtttttctcgtgtcaaagcggccgagacgcaggttgtttttctcagaagagcggcgtgatcgtacgtgtgtccacacgtatatgcagtaacgcgtgtgttctttatgtctattcgcccctcgttgtcttttgtcatgtcgaggcgtttctctgttccgagaacggccgcttggcaatggaaaaatcggaggggtttgaacacagtgctgttctgctctcctttgtctttgctcccgcgggagtgcagcgccaggccacgccgggttcctgccaatcgctactgtgagacatgcgtcgcggcaaaaacggatcttgtttgtttccaatctgaaactctgtctacattcctaaacgagagaccttgtcttgcctaggtcagaagccaatactttgttttcaaaggcaagctgacttctatgggaaggattagaaaacagaaaagaacgcacgcttgatcggaccgtttccggaacggactcggatagtctcctggctgggacaagtggtccgcgtccttcgttatagagacgtaaaacagatgttttatcggccacttttcttgtcagtgctcttgcggtcagctgatggagggtttagggtaattgagttttcggtccgtcacagttgtagggtcactttgtgatcagatacatcgacatatcagtatgtttcggagcggagaacagtagaaaaagcggacaggcgggctctcaagggatgtgatacagacatagtaccaccgcttttcccggtgtgtgaaagctcgcttacacgtttggtgtcagcagatagtagtggcatgagtgcgtcttcgtttttgtttagaccagaaaaggaaatgctaagttgaaacactacgccagtctgtaggaggctcgatgtctgtcagcttcgctggattgcaacattttgctctggacaagcgtttggacgtttttccgaccttaaaagtgaatgatgagaggccctgaaagaacaacacgagcggggaagaaacacgaatagctccgtgtcgtctttgctgcttctgcagattgctcctgtctgtgcgtagactatcgagggaacagaagttttccaaacgcttccaatccgaaagacaaacaaagtcagaaaaactttctttctgctttctgaaattgccgctggtatcattctcgttttcagaaacccatttccagcagttccccttcgaaacaccgagagtcctcgagggtcgattcgcgttcccttagggtcgcgaaggcgccttttgtgcaccttgccaggaagcaagatttcatgttccaacagtttacgcggagagcgaaccctttaatcatacggagacatgctcgaacatgcgcgcgaagtgttttttttctttgagatttcagcacgccacagaacttggaagagatattttgcgcgtatggccgagctgattgccatacaactgtgcgcctcttgttttctttgccaggagttagaaattgagggggatagcggaggcgagagatctggtgtgtcaatcaagaacgaacaatttgctgttgttcctggcgtgtcaatgagctttttctgccagcaggttgactcgtggggtcctcccctcagttgccggagccgcttgttgagcctgtaacaggtcccgtaagatggttttcttgtccatgactccgtcacgcgtcagttgttgatttcgttccggttaaaaaacagcctgcattatttttgatgaaaggagagcgtcctgtccgctgaacttattgtgcgatactaccatttgtacagtgcctacgtgcttctgaagaaatggatgattctttagaaatgcacagtgcaaaacctttgtttggtgagcatacactacgagttggactataggtttggattttgaaggtctttgtctattgttcaagtatctggagcactagcgacgcaagctatggttcgactgtcgccgggggccaccgtgacgaatatcgaaaagggttctcaaggtgaagtggctggaaaatacagtggacggatactttcttgccgccttgatggaatccaacaacacccgtgtattcctgtttcttgtgacagagaaacgggcaagtcgtaaaatagactcaccagaaaagggtagttcctgtaagcgtaagaatcacactctataatgcgtaacggggactgtagcttcagttgttatctggtcggtgctgcacgcctggtgacatactgtgactctagcatggtttcgagagcacgcaatagatctatgagtctgttccgggcacaccttgtacttcataagtatagaatacgggagttctaatctgcgggttaccccacacctccatgtcggctcattactaccattctattgaacacgattccgtttcgagcgtatagttttagagtggaacgaagcttcggcctcgatacggtgtcctcgttccctgaaaaatgaacctccatatataaaggacaaaacgtgcaacagacaggatctctacttctagatttcgggcttctctctagaattcaccgccatggcagagtcaacagaggagtcaggtaagggaatggattttgtttgctgcggagggtgcacagagtaggctgcatatttctattagagtcctgcgcatccaaccgtaggttgaggcccagcgacactaatcatacagaacatgtccattggtcacttatctcccactccttccgcttttatagaaaatacctcgtgtacatgctagagagaccatctgtggtcgtcgggggttgccg

SEQ ID NO: 3637 - DNA, 3748 bp, Toxoplasma gondii
  source 1..3748: mol_type = genomic DNA
ctcggcctccactgctgccgtccacagcatggatatttgcattctggcactcctccgaattcggagacggccctgaatagctgtcatgttgttttgaaaagcctccgacaacacacgatgcgtgcgaactcgacgcatcgccgcccaggtcgggaccatcttgtgggcttgaccatgtgcttggaaaacgacgctcactgctgagacctgagagactggctgcctcagcagaacctcggtcggcctccctactttcgtgtactgcatcgacggctgaagtggttcttccagagtcgagcgagtcactttgtttgctggcgctcgtgtcatttgctggtgccatttgcgactctagcgggagaaacacgacgtgcaagataagtttttcttacgcggaaaacaataatcggcacgcgagaccggagtggacggcgccacagggcacaaggacgcatgaagaacaacaggggaaaaaccagcaaaagcgtcatttgacggttgtgacactgagacagctgttgcctttgcctgtcgggcaatctgagtagctaaacagtaaccgtcattgggatggatgtacaccgggagcgtttgacagatgctgcagaaacctgccggatagcggcctccctggttcgagacgtaaacagggtgcatcagctctccttttggaaggaaaagagtcagtcacactacgtgtatgcggctggcagaatggaaatgtggttcagtggttcttagaagaaaatcggcttctgaacgacgagaaatccaagagaacagacgcgcttggatggacgtcctgggtgacgctgcctttggaagacattttcgggaataaatgaaacgcactgagtacacaaagaaataggcgaaccactgtgacgagctgcatcctattcatttactacagaaatggagatttcgcttcaaagtcgcagacaagaaggactcgcgcctttgcgaaagagccctgagaagaaccctcagtggccgttggaaaacagtacttggtaggtcgtttcagacagtgcattggcgtcagtcttgaatcgagacgcttttcaaaggtcagtgtttcccaggagggcaaaaatctaaaacgaagtgtctccaagcaagcgtttatttcgaatcgatttctgcgggaactcagagagctatctgaacggctgctgcatgcgcagtaaagtcggaaccacggtccggcgtaacaggatcgttcagcggggactgccaggaataaaagcagctaaaacgactctttcaagccgttgttattttcatttgccacgttcattcggtgttccttacatgggggagcgctgagaaagctcgacgtgctctgggtggccatgtctgtgtgtgtgcatcatggtgactcaaaatttgacccttgtgagcatagttgaacagccgcgagtgggaacctggcagagtatttcggaacagagcatgtgcagaagaagcagagtaatccacgcagcgctcgcgtgttagagcagttcttcagtttagttgtatactgttgctatatagagtgaaatgatgtcgcctgtgtagggaaacacgattgttaccacccaactgtgtgtgtgtgtgtgtgactccaaaatcaacccagttgacaagtgtcttttcctgccggcgttgtagagtgtggcgctaaagttgttcaggcgaggttgttagggagttgtccttcctggcacatagcgacttcgatggtttaagtgtggaaactgtggaattctagctcgcggaaaagaaagatggagttgcctcgcaaatggtgttgcggccgccgctgtgtggtggcataccgcccacagtggagtcagtttacaaagagagctgtgtcgagcaaacgcggcaaaacagtgtgtgtacgcggtacatatggatatgtgccaggagaaggatgatccgcatatcgggtacaatgactaatgaagccgtcatgatagcgtcgtgcggtactggtagtcaaattatcgcccagacaaaaggaaatcgctgggcaacaacagggcagtggaagcgctaacgagaatacttttgcagcaacaatgccagtggtcgcaagaaagtaaatctgaaccagcgaacttcagcttaccgaggcactgacagagctgctctgtaatgtaaatgttagagttcgaacaaacctgttaaaacgttaccaagccgaaaaatttgaaagacccgcttgtatagacgttcttcgtcggaaaagacaatgtgtcgtcttccctgtgaagcagcacagtgaatacactcgctggcgagacgtccatgatactggcagccgttcttcgtgtttgcgtgataggggcgcagccatggaattggtcaagagcagactaacgcatctggagttaccgaggtcctttaagctatcaagaaaggagtgtgcttacttttttttgagctgagggtcttgttttgacccagaaaagcaagcgggaagggagcacctcagaggttgactggtcagtagcagccctatccattcggcagccaaagccaggcctggaatgtccatttgagctctttcgatttgtgtaggtacccgcattacatcaaacttacggaatgcatccactttcccgccttctgtttttctgtcactctccacctcggggcagatgatgccaagacggtgggaatgttcttgcatgacttcaaagtcgcaggggactgtgtgatccagcccatcctagagcgctcacttatcagagcagtcgtcgactttggagcggataatttgttgacactgaggtaaaagccgtcattggccacacattacctgaagatactgctgttggcaggtgcggtttcgttcctgggatagatgtcaaaaggtttccacaattgccaagtggacgaaaccggcttcctttacgaggcggtgtgccttttttctgcatcgtagagacaaacgcaagtctgcacgttgttccccactttcagctatctcccccaaacaacgtaccaactgcgatgcaactggtttcgtggtagaaccagtttgcttgcttgaacatacttctcagtggagtgtccgtgtcggctataatctccggcaacagcgttgggcttcgttcgattcccagcagctgaattcctcattccgccgcattttggggggcaggagtcgtccctcactctgttgacgcgtttctgttggttggtcgtcgttttttggggcacgtgtcagttgtccatgcgccgaggcgggtatgaggcgagtgctcgttggttagagtgcgtactccaattctctgaattgctttatctcgtcccagtttgcggacgtgtcgggccatcagcggccttgttgtctgtacttgcgtcgttttcggtccaagcaatcaccgttgtggttttcccggtccgcacgactttgctgggtttcccaggcggtcttcattgtctgcatgttttctccatgtttgtcatgccgagagggactggtcgaggttactctactgcactcgtttgaaggcatacgaagtgttgattacgcattggtttctgttgttattttgagtattcgcatgcacgccttttctgatctgtgtgtttggtgcgcgtctctaacctataaagtcaagcgaagaatctattgaaagcacgacgagaaggaaatcgcgcgcttggcgtatgcctcttcagcaccctcttcagccttgtcaggtttagatattttgctactggctgctttatttgctcgccatcctga

SEQ ID NO: 3638 - DNA, 1731 bp, Toxoplasma gondii
  source 1..1731: mol_type = genomic DNA
gggagttcactgtccttctacgagaggcaacagagacgactcgaccgcgctcagaccctcagcagggtgaaccggcaacggcgaagagtggaagtcaagcactgtttttttcaggaggagccgatcaggacgggagcagcattcatgaagagagaactcagttgtcactctttcctgaacattcgcgttgagcagacacgaaaggtctcgctgcttctccggctgcaggccgagttcctctgaaaggctggcgtctcgagcgcccaggctttcacttcgaaactgcatcacgcttgttgtacctgggcgcgttcgttgaggaactccttttcagcctcgatgtaccacggggacttcggcgccctcgtcttcaacgcgacgacgcctccgtatcgatgactcttcagacgcgcaactccacgcctctggtctaaacaccatgcagctggccggcctccgagagagggaggagaaagaggagagggagaaggaagaggagagggacaggaaggagagagagaagagagaggagaggaagaggaaggcgaagacgcagcgagaagcgagggataagaagtcgagagagcgaagagaggagaagaacgagaagaagaacgagaagaagaacgaggagaggaagacgcttcagacagggacgaggagagcggaaggggaggggaagcgcgagaccgggccgaggacctcccgtcgaagcggagaagaggattcctcttcgctgctgcccccaacgccttggtgggcgagaaaatccgacgcgccagagaagccattccacttgaagagagaagaagaagcagaagaagacgaaggaggagacgacgcaggtacctgccccctttaagaaaggtgcatcgatgtcatcgctgagttggccaggcaagttgacttgaagctgcggagagcggagaacggagagttgttttttctctgggagagacgagttctacgaacccagtgacgtctcgtccgcttcatcactgggagcggctggtcttccgccaggcgcggcctgaagccgtacgagcagccggctgagggcgccttcgctgcgccgaactcggactcgagcgaactgcgaatcgcggcgagaaatctgttccttgccgaccgatcctgaagccatatggaaaagcctcgccgcaaacaagttggagacggaaacgacggaggggaggatgcggccaaggctgtcgggggctgtcttcccatgtgcatgcgcaccgaaaagcgtacgtctcagcgtcgatactcaacttctgcggggacgcgagtctcgcttgtttcgtcggaaggttcgcgtcgaataaatcctcgcagattgatcttgcttttaccgttgtctctgcttcatcttcgcgttttccagcgcccatcccctcctgcctccgcgcggcttgcccctcgcgactgacacaccgccctgtgtcgttgagtcgtctgcagtcctttcacggtcgtcgtctttctcctctctgctctcccactgtctggccagcatccagagttttagccttctcttctccttacgcgtccttctcttgttctccctcttctcccctggatgttctcctcgcgcaactgcgtttcagcggcttcgcggtgcgaaactggtgagccgtggacgagggtgtctggcgaaggatccgaaggaaggaagaacagaatccgaaggaagagagaagcggcgagagtcctcgaaagaagtcaaga

SEQ ID NO: 3639 - DNA, 1991 bp, Toxoplasma gondii
  source 1..1991: mol_type = genomic DNA
gcagaacgttgccggatcatcgatggttttggtccctctgttgaatgacacacagtcggcatgctttgctgccataagtgtcccttttttgcaagtttcgaggagtctgaagaacagatcttttgtttgactgcacgtcggccctgcttcgtagtctgaaaattgaactgcgcagactgcgcctgcaacgtctttgtagcaggactaatccaacaagatgcaatagttgaggtaactagaacaaacaatttggttgtctgctcactttgtcgctagcgccgaatctacgcaacgtatcctggcaattacgtaagatatggagctgacgacgggggaatgctgcgccggctctgcttacctcgcctagtccccgatagggttcgcaagactgagaagagcaggcgagtgtagaaatggtatttcattaaatgaactccagcgtacctcaggtgttttgtattttgcgaaccgctccccataattgctgacaccactactgacataacggcacacagcattctgctcgcatgaacttcagattaggcgtgaatttgggggttagcgcggaagtgcgagggacatactgtgtttcccgttccaagaggtagttccgccgcacgggcgacagacacggtgaagagaacccatagaatcgagagctctgagaggagtgacatcttgagcagaaatatccaaacggaacattgcctcctgaatgtccaaatttccggtggaaagcatcttacgtaggcgtgcggcagcggactcgagcggtcttactagctgtacagacacctaaaccacaccgggatttcctacccgtttggatacacttcgtcttctgtattcgattaccttcgagaaccacaccctactgtcggcggtgaaccgattcaagtgattcttgtgctgcatctgtgcggcactggagttaaaatgcacgattttaacagggggggttcggaaattcaagtggacagatttcggtcgcaggctttgctctgtggactgaatgttacgaacatcataaacgatgtgtatcggcctcttgcttctggctcgatggagctatagttccacttgttccatgcagtaccttaccgaaatgagacctgcttcgatgctgcaagcttttctggcggaattgtcgcatgcaaaatgcgactgggctggcgccgacatttcagcgccttatgttccacccgcctgaactggcagtactacttccagtccactctcgcgttagaacatcatatcgttccaaatatcttcttagtgcgaaacaaacaagtacagaggctactttgcaattggcacatcccaaccaagcacctctgtagttcttcttcttaggctatgctgtgagggtaagcgatgttctgcatgcagacagctaactacgtgtgtttttgattccgcaccttaggtatcgcatattggtagcggcggggggaacggagttttcagcatttagcggagcagtatcttttcggtgaagcgtcctgttggccatcatctttcaaaaactattttacccctaattccagaaaaaagttccgactatttgagcacgtgaatgcgtcaactgtgaaagaggttgctgtgtcagagattggggtcgcgagagttattaagctgtctcgtctgctgatcagttatgccagtgtcgctgctgttcgacatactccttactcggcgctcatcgcttgtttgctgctcgctccgtactgggcgaacacagctttagtttcggcaaattgaaagctttttcatacatacagttacaccgtcgtgaaggccgggtgtgttcgtcttgagggcgctgacaggtgaacagtttgtcccttgtgtcggagttcttcgagttgctgtctctttcgtttgcagtcacacttcggtcaaatcagttgaactgcttccgctttattggacagctcgcatctggcgattctcatgtgtgctaggcatagcccaagccagcgaaaggcgta

SEQ ID NO: 3640 - DNA, 2237 bp, Toxoplasma gondii
  source 1..2237: mol_type = genomic DNA
aagagttagacctgcctcctccttgtcgcagctgttgttgaattcatggggggccttccgcaagcaggactgaaacaaagtcttgcgggttgtttacactgcgtggcgacaccgagttttttgtctttcgagttcgtcgaaaattgtgatgcttctttgttacctgacgcgggcggtgtcaggacgagttcacatgcgcagacgagaataaatgtgatgcaaagaactttttcggtgtcatatcagatgcgttttgctgtctgtgttgtgtctccttcagatacgcgaaagccgctgtggcagccattgagaacgggagcctgcgtggcccgacaaccatttccccttactgcgtccatcgctgcattatttggctgtccaacgccgttcctcggaggatctgggaggccgcctacctgcctcggtgtctgtctattcgcaaacgcgcgctgaaaaagaaggaacagcaagtaagtcacgaggggagagaaaactgtcaaaacaatcactcaatcgaatatatcagcttcaaaaagtgttttgaccgagaaacacgaaagcacagagtaagaaagtggaacaaggaagccgaaggacggcacagacacagcgcaagatctgaacaagatgcggggaagtgaaagggaaaggacagacatcgcgtgcacactttgaatcggtgtttttcatgcaggcggaggctaagaaggacatgtaaaaggcggcggacaaccgacgaagttgtactatgttcgaccgtttatactttcgtccaacgtggcagtctggtagtctcacgtatgtatgtcgcgcagtggagcagagcttcgatcgggggacatgtctctgcggttcccctttttcgtgtgtaagaaaacgttgtacggtacaggactgggaagcggcgttttatcccctttcctcgtggtttgtatcttcgtttccgcagaagccaactgtgcgtgtgcagtcagttccggatttctctctggtgtgcacttgtcgtcactcgcgcacggcatgcacggatttgcacggagaagtccgcaaacgagaagtatcagcacaagtgataagttcaaaagctcttcggagttctgagctcgtgcttgtagcggaagagaacccttccttcacacgcacacttgttccgtttcgggaacgcgcaatcaacggccacatccttcactttgttacgttctcttgctcggcgcggaagacaacgtgactgtcgcagtgccttcgaaatgggtggataggaagtcagccgttactgcaagcacaaactaatcatcacaaaaagcacggcatcattggaaagtggtgcacaggaaacgtacactgggactcggcgaccggtagaaaacagaccctcgcgcgctcttgtctctactctcatggtggctgtaaaggcttcctagtaattgtcgcggaaggaatttaggaggggaggatggaaattagtgttttctgttgagaaggggaaaatggattccgtcgccgggacttgaacccgggtcgcgcgggtgagagccgcgtatcctaaccacctagactacgacggatgtgcgcccactcggcacacgagtactgattgaggtaggagaattccagaagagcagttcactagcagtgattgagtctgcagagcagctattgaagaagcggtgacaaaaagactgatggcgattcactgaaagaaaggtgtgtggcttagatcagccggagggagatctactgaaggcggctcttcggcgagggtgacaatcgcgagtgtgcacgtttcctgtacggtctaacatgcgaaagcggtgatttttcgtgttcccccagtttttggcctctgtcacaaatgacaaaggatatatgtccatcagttgctgcatgcgcgaccgagataactgaagtttgtcatgttcggagcagttgtctttatcagacgttccctaaatcgaaacgttgggaacaactggttgtttctaaccttccctgcctctacgtggttttccgtgtattcacgggtttcattacacgttaacggttccccggtcagtgacttgccgttcttttttgcctcgtcgctggaacagctcgagacgtcgatcgtaacttgttagacgagatctgtccagagtttgctcgtaacgcccaaagcggaaagttatgattctacctctcgttgtacatcagtcttgtactgcaaatgagaaaggaataggtcttctcggttttctgta

SEQ ID NO: 3641 - DNA, 1702 bp, Toxoplasma gondii
  source 1..1702: mol_type = genomic DNA
ctggaactgggtcatggaactcgtcaactctcgtcttgaggtctctcgcgatggcatgttcacctcgccagtatatgctgcgtctttgcgtccgtgacaggaagaaatggtaatttttatttcaagaaaagaacagggacgttctctgacactgccgtcatctccctcctttgtgccttttcattttattcattccggaaccttcctttgaacgcccctaaacgaggaaacgcgtcacgagtcaccattcggatacatgaccgcacatgcagtcaactgcatctctgcatacacgtccactttcatatattcatatatatatatatatatatgcaggtagacaaatcgatataaacatatagaggtgtaaaaatagatatagatagctagggatatcgacgcatagagagataggtagacagggagagatgcacctagatgcagatgtagaaagagacacaaactggtagaccgatgtcactgtagatacaaagaggcacagagatcgagagacaaagatatcagcagagagagatgcataggtagtccgagaggtaaagacaggtgtagacggttgctcagacagccagggagacatgtcatcaacagttgttgataggcagtagatgcagtcagacggatatcgacagcagcggaagtcgacacacggtcctttgcaggcgacagaaaatcgactggtgtacacgggtgcttctccagttctgcaacgcggatagtctgtgtagcgtctgagacatgaagaccaagacttctcgcgaacagtgcctggttcctcgttgtcctttcatcgtgtgtggtttttcgtttttcgcattcagcttctttgcggtctttcaatggcttctgcctcggcgcaggagctgaacgtctcgccaggaggcgcagagggacttggacgagagaaacatttcctcgaaaacgcaaacggaaaaagaggaaaaggctttgtagacgggacggcggaaaaggagaagcgacccaaaaaccacggtctggggaactcgactgcatgcacacaagaaaagtagaactttcgagtgccccccatccagtaccaccctctttgtcttttctcttccgcgctctgtgatttgttctcttttctccatctttttcgttctgcttgcaaccttccattctgatggtcttttttgctgctgatcgcataaatttgtgacacaacggcgcatgtcacctgtgaagtttctctcgtgtgacctcttgcgtcaagtcgcccaccgccgccgtctcctcttcctcgttttctgtctccgtctcctctgtgtttctcttctcgtcgtcttctcctgcgttcttcctttcgtctgtgtctttgcagcttcgtccttccgttggagctccgtcctgccctccttcaccctgctgccctctcctctcgacgctcttctgctggccgcttcggccgcgcctttcgcggaacagacgcccggcggagaggcagaagccggtggaggacgcagcggagaagcgaaggagagaagggatggcaacgaaggactggactagagagaagaaggaccggcaagttgaaacgagacgaagaatagacgcaggttgaagaggagacgagagggagaacaaggacaaggagaagagatagaagaggacatgaagcgcaactaggaaaactccgaaaagaaggagaaagaagagagaaaaa

SEQ ID NO: 3642 - DNA, 1977 bp, Toxoplasma gondii
  source 1..1977: mol_type = genomic DNA
gcgttttccggatctttgccagatctaaaactggactggtaaattccattgcacacagacagagtggtttcacaaggaagctcttttgtcttcactatacactaggtgaatgccctatttacgcaaccgtttacaggtgattcatccccttcctcgtccaagagtctaggtgtgcatccaaaaagaagacatcagagggtctctgactgtcttgaggacactggaacgctagacgtctcggtcgcgatagaaaacgaaaaacgtagccacgggcgaggaagccgcaggcgacgaaacccaactgaaacaacgacgacgcgattcgaacttgaacttgtctttccttctctatctcctcacctcgaacaacaatttgcacctcgcctgcatgcgacgcccgtcgagaaccataagaggcgaggcgacctgccgacggagtgtacgtacactcaagagaacgcgtggcggaggctcgaccgcgtcttttccgtccttcacatgaagaggaactagcaaagccccagtgaagcacagacgtccttgctccgcattgaaggagacagcggcggacgaggaggaaagagagatcacaggacctgtaaaaaaagagcagacacacgagacaggggacaaagaacgcgagatgacggacctgtgggaatgcatggggagaagatttgacagatccgacaaggacgagcagatgcggcatgaaatacaagcggtttctatagcggcaaatgcagcctcgaggtcaccaaaagcgtcgcccctcaacaagggagacagaactggatcttcgaatctgttgaggtcgcagaccttcacatcacttatgctagaattttatcggaagcagtttcctgcgtgaagtcttttccagctcgagttcttaccccacaacgccattttagaaaagtttttctccttgagcttcgagtgcttttgccgccactgagcagcgcgtctcctctgttgagaggaaagggtcttgggacttcaaaaggatttgtctaggaggatctgttccacgttccgttcaaatctaagggaagccgaagaagatagtcgcagctcctctcgttgtgccactctgactccgcctttcttatgacctctgtctccatcaacgagcctctttcgccctcgacacttgcctctgtctcctcagtccttcttcttcttcttcttcttcttctccttcttcttcttcttctatttccccgttcttctttgaaataggtttttatgaagtgaccagaatttctcgactgtgcagcgacaagccaatcggcgctctcgacgctctcgcgctgctgggtctccgtttctctctctttctctgtgactcggagcagcgacttggtcgagaaaagaccggaaatcacaaatgcaaggcgccgcactcctgcttcttgcgtccgcgaaacgcacaagacagttggaaaagtacgaaggaaagaggtttctccgaaaaactaagaaacgcgagaagaatcgacggcaagctgacgggcctgtggggctttcgcgcgaaaagtcgaaggctgctctgcaggccgaagagacaactcctttctccgcatcctctctggtctctgtaccccccgagttgtggatgacgcttgcttaaatttgcagaaaagactctgcaaaagaaagtgaagcggctcctccacacgcgggccgccggtgcagactgcagtctctcctttctgacgcttggcgtttccaagggaaagacccctctgttgcatgctagcgataaagcggatttcctagtctcgtcgtcgtgagactgcatcgtgacacgacaaacgacaacgaagagaactctttagggagagacaaacgcgcgtttgtctttttcttcggactctcatctccttccgcttccagtgtctcgtcgtttcccgcgactcgcgtctgtcttctccccgtgtgtctccccggatttctgccaagaagtcgccaaaa

SEQ ID NO: 3643 - DNA, 2280 bp, Toxoplasma gondii
  source 1..2280: mol_type = genomic DNA
taacctgctgctgagttttgatgacgtcaagcggctgcaggatgctggcacagacaatgccgctgacggcgccagcaattccagagttcattcgggcgctcttcgtctcctcctcagtgcgctccaaccggccattgccctccttcttctcagcagagcccgggagggaagaacatgctacgggagcagggggacgcagcaaaagccgatagggcgagctgagcaggcccgcggcaggtccggagggaggtgcgttgcgaggcgtgcgtccagccgaagcggcagccaggacaggcatcggacagactcggtgagacgaatggaagagagaaagagacgacagagaagagaggggagagggagaagagagggaagggggagaagagagggaagagggaggagagagagaagacagggtgggagacgggagaggggaataagtggaacaacggagagaaaaagtgaagtcgagaagagcctgtttttccgcagcaggaggctgcagcgtcgccttttcgcgacgggcacctgaagcactggagtccgccatatcgacaagttaggcaaagttgacacggagaaaaacaacgacatgcggcgacgctacacactgtacagcccctccatgtgtgaactggacagtgtgtcaatccagactgagaacgaggggctgcggcattattcggtgcagagtttcgccatcatctctggtcccactgggtgtacatgcactgagacatgggggaaccgagcagcgatggtctgggcgttgcttcgttcagcagtgcccgctgccttgttcgcggcgctctccagccttcttgttccccctacgttgtgcgtgtttgcatgcacatcgaacgggagaaaccgaaaagagatggcgacgaggcacacaaaacagggactttgaagctgagaaacgcgacaagcctctgacagactcagctcccggaggcagcgaaacccagacttacgaggcctcaggtggacagctgcgaagagcgggacggtgtatcgacgctctttgacttctgccacagtcttttttcgggttttctcgtttctctcttgttatgctcacaagaagaaagaacggaacacatgcgctttttcgcttcgtctctccacgcatgtgctaacggactcatccaatagcaaaggaagaagtgaaatgaggaaggtgagagacttcctcgcgatctaagtcaagttcctcggtcgttttccagccaggaactcactccgttcttgctgcgtcctcgctctcagtttgcccgctcgtggaactctctttccacagaagaagcgacagaacaagtattttcctcccaacaggagaacgccgtagtcctcaaaagggggaaggaaaacagcggaaagacacaccttgcgaaaaacgcaagcgcttgcttgccgtctgccgtgcaggcttgcctcgagccgcgtcgaagaccttttctgcggtgtacttacagctgggcgttgccaaggcgcgagaaaggcgggcggatgtctccgtatatacgccgagacatgggcgcaagcacagcaacaggcgtcgctctaccgggcgcagatgctacaggacacaggccggccctcttctctctcctctcttgttcctggggtctatgtgacccaaaaagacttcttctccagcgtttcctctctcgtttctcaggtcttctctcaggaactctctccttcgcttttcccccttctctccgcgagttgtcgcttgcgtcacgaactccgtcccacaatcgcgcgcactctgaacgctctccctcctttttcgctcttcgctgcagccgctgcccgcggaaaacgcttcttttcctgggaagactttctttctgtctctctgcactcttcggaggaaccagttaactgaccgcacgaacggttgtcctgcggtgtacatacaccccaaaagtcagcgactacttcccaggcggaggagagaggatttcttgttggcaacccgggtggttctcgcgtgtgctgcggcggatttcggtccttttctacacacagctccttcttctctcctttctcccctcttctttcctctcgcctcagctgaggagaatcagagagaaacctctgcacaccttggacgaagttcgccggtgacgtctgcgagcccgcttcgaactctccagcggattcgtccttcctctcactgccttctgctttgttgccgtcttcctctccgcttttcgcttctcctgccctttggcgttttccgcgtttttcgtctttcagtcttcacca

SEQ ID NO: 3644 - DNA, 2116 bp, Toxoplasma gondii
  source 1..2116: mol_type = genomic DNA
gatgtcaccgcagcaaaagacctcacgtcacgcgacgaagtcgaggacgcggaggggcgagcaccgcacccacctgctccgttttctgcatgaagatggtcggtctccagttctcgcgttggccgagctctcagcagcgctcctggcatgttgtcgcccgcggagtcgccgagagcttctgggaagcgagcgagagcgcgtgtgccgacggaccgatccgcgagaagtctgccgccttcgcgacgggaggggattccccgttggtgcctgctgccttcgaactttgcaaatccagccgacgccggggcgacaggaagctgcgcggccacccagtggaggaagagaagccatgacgtcatcgaggtcgaagacaactccagtctcccaaaggaggagggaacaccgaacggaaagaaggaacagacggaagagactggggaagagggtgaagaccctgcgggcgagcacgaagcagacgccccgctccttctgcgcttttgtctctcagcctccatttcgtcggcgaggcggactcacggtgctcgtctcgaatggacgtgagttcccgatccaagttctcggcgcgcatctgcgagtccagtcaggcccagatgcctccttcaaggcggcttgtctgaccatgaaactgacgcaagaatccagcctcgcggagaggggaaaagaacgcgagaggactcagagaacagagatcagccgcagaaacggggaaacgaagagagagaacgacggcggtggaagccagccgggagggaacctggaaggagagaccgaggacagagaagatcgctcaggagagtagaggaaacaaagccgagaaggcgaaagcggagcgaaaagcgtaaaagatcgaacaaggagagactgagaccgacgaagggcgtaaagcctcttcactctgcacggagggcagaattagccacaggttgcggccccgagatctggctgaatccggatcgaaattacctgttggtatattccattgcacgggacgcgtcgaaaagaaaggttttgcatacgcagagaaacgacgactgaagccaaggagaagagagtgaaaagcgaacataaaaaaagaaaaggacagcagatagccgctcgcttgctcttccgtttgacggcgagagcaagaagagacgcctccagcgggaacgaaggattgagagagacaacgataatgtggaccgggaagtgagttgaacagaaaagtttcgtttctaaaaatcgacttcgtttcacctctttcttcaggttggcgcccccaggaatggggaggtcactcgcctggcgcttcgccggccgaagacccccgaaaaagagaagtggatttccagggcaagacccaggcaaatggagaaggcagagagaaaagaggaagcatagacagggaagaaaagctccctgaaacgaaaaacagagaaagaagagtgcctttccggctcgcccgcccccgacattcagcgaacgagtaggagtttttcttccagccgggtttgtgtgtgtgtgagtgcgcatgcggagaatattcgcagatcgcatgcagctccttttccccgtctcgtgctgtgcagcgaatctgttcgtcttccgtatatctttcttctcttcagttatcttcttgcaccgtttccgagtttcatctgctttctctgtttctctgtaaaccagagtggggagaggacgcgacgctcttcggcgaccgtcaccgaatagccgaggagagggcgctctccgccgttacctccctttctcctttttcttgtctccttcgccgtcacccttccctccaggttcctcgtcccttctccaaaagttttcccgctcatcgtctgctccagattggcgagaggagaccgggtgaggaggggcggaggagaggaacggaggaagaggaatcgcggcagaggaagagagaagggaggaccgaaggaggaggcagagaggccacagagaggagaacaagagaatctatcagcaagagaaaaagaggagaaaggacagaagaaggacgaagttgagagggagggatcagaacggtggagggagatgacaaatgtcgcttagaaagaaaaaaggactggcctacttatcaccacca

SEQ ID NO: 3645 - DNA, 1121 bp, Toxoplasma gondii
  source 1..1121: mol_type = genomic DNA
aaacgcatgcaacggtgtgcttttgtctcgtctgcgtctctctgaacgaggtcagggagccgctctcgtccccctctctcctttcaccaagcccttctccttcacattagctctttggagacttcccatctcgcgccggaacgcccctcaggtttctccattgtcatctgcgcagctgctcgacgcagtcagagccttaatcaccgtcaagcgtagaccactgcacagacgcgcatgcagctcaacacagacgaagagagggaggagagacggagagaaacgaagagatagggaaagagagagatggagaaaagggcagagcctgagcaagagacggatcgagcagtgatgtttagacagaaaggttgacagaagcagagagagtcgttgactgatatcgacgagttcgtttgcttgcagaagatagcacctccacacgccactcaacgccttcaccaggtgtacagacgcacgatagcccggtctggtcttccccaggaggtttctgagagtttcatggatggaaaaaaagaaacatcgagtatcgttgtctctcctctcacttcctttttcagcgatgcacgtctcttcttcgcatggacggtcgatcctgcctcgcagtgcatgcaggagagacaaacgaccccagaataccacacggggaaacaggagaactcgttcgtaacaaacgaatgcatgacgaaaaaaatcaaaagaggaaacggtggagttcctactggaaagaaagaaacgtcttccggactccaacgtgactttgccgccgcgcatgtacgcgcgaatgcacaccgcgtaacgctctcctcaacgaaccgaaacattcaaaagctcttcaatcgaaaaagttttcctcggtaataagcagaaacgtgagactcgccgaaactcaaagaaaaaaagacactcaaagagagcaagagattctctgcaacaagcaggcaagagtttttgcggtccgcgagttgtgcaagagaatacgtggagcgcatgcgcggatatgcatgcagttgactgtatgtacacccgggagtaagcgatactacaggagagatttctgggggtgaagcaaagcagacaagagcagtttctctctcttgggtgta

SEQ ID NO: 3646 - DNA, 2524 bp, Toxoplasma gondii
  source 1..2524: mol_type = genomic DNA
ggttatacaagatagtcaccgtaagcttgccagaacgacgaagcaatcactgcaagacttccgtggagaagttgggttacgaggaaggccaacgcttcgtcgtgtgttcgtatgtcaacacgtcagcaacaatcttggtcccggatgctccaggcagaatggaaccgtggcgggtcccaaaccattgttggagtaacagtgtgctgacggaggaatgtacacagctgtgcacagtaggatcgtcgtgctcattgtgccaccgcagaccagctttcatttctggactgcgatagtcccgtatattctgcagaattctgccctcccgatgggcgctcccgaacctcagagtctcacttctttctaagtgtagcttcgaacagtgcaaggatgaccaccgcgcgctatctaaggagcgagcccggatggctctagcaacagaagttggaatatttgcagcgaagatcagtcgctgcattcacataagaaacgatagccctaataaaattagtttgtcttagtgtgtgactactatccccatgagaatgtggaggaacgactgaataaactgcgcctttcataatgctggaacttcagcatcatcacacaaaagccttggaaagcaaatataaggcaccattgtagtttcgaacaacgcagtagtaatattgagtggatacactgcagtggagagatgtatgctctaatggccctgcaggcgttgattccttgcttgacgccgcgctttaccgaggaaatagatgccacaaactgaacaaatttgctataagcgactttcgctgtggcatcgattccactgcactcagtcgcagtggcgcccgttaggccgccagtcgacatatgctccggggaatcggccagccacacgggaccacgtcccggcccatctccttccatccctcatttctcactcgtataacagtggactagaaacggagggaaatgtgtgcagggcgggaactcttattaaagtggaaatctgtttgtgcgtgtatcccccacaaattcacagcggccgagaagatacgtccacccagccccctgctgccgtccgcactgtgccgcccataagtacccagctgcaaacgggaaatcagagagacacggaactaaaaccggcacacagaacttacagttacgtagatctgtgcaagttaatgtggtcgaagtgtttactcaaccaagagaactgcgacgaactctcgctattctgggtagagaggctctgcactggacgggaggaaaagttttcgttggttgcatgcggcacgctggtagcggctgacaacactctttcttcagattcactctcgtttctcgatatgtgaggtcacttctttcgcccgtttaaggattattctacctcagtcgctccttctttcctctttttcgccttctgctggatccctcgatgtctctcgttacttcaccatttcgtggcgactcttcgcttttgacgccttttttgctgctgaggtcaatactctcgtttcccctgatctcatctgacttaggaatgacagaactatttctcgtccggaaatcttttgtttgcacctccggtccacttctcgttctccgctgttgatgagtcttgttcctccggctacgcgcgagcgctcacaggctcaacggtctctctgggtccactaacaggggactttttcgttcccgtgtcgggcctgcatgcgctttttttacgtcggagaatctcagcgttttcagggactttgtcattatctggcctccgctaagggcgacgctactccgtactcggtcgacaccggagacggtcgcagtcttttgccccgggtataggagtgatttggttttgagatgacgcaattttcagagttccggccgcagatgcttcgcctcttcttcggctcctttccgtttgcttgatgtgaggcgcagcgacatcgtgaggcaatgcctgtgagactcaattcaaattcgccccgtcggcagatgtgaggccgacctgctcaccttcactcatttctctcacggttcgacatgcgtctctcttttctctcaactgcaagcgcgactcattccatgcatctacctggactcttccgaaggtcgtcgctgttttcggccctgtcttttttgtgacctctcgtctgtcccttatctctctacgctttgcctcttgggtttcttgctgcgctcccttcagagcgcagtccagaaaacagagacctcctgcttttctttttctctttgtattcctcttcacgtcttggctcagttcttctctcctgtcgtcgtcaccggtctcgtcatcttctgtcgccctgaactctgtctttttcacctccgcgcctccttgccgccgtttctctgtcgctgcctctttctcctctgagtttcggttccctctccttcaccttctctgttcccacctcctctccccaatgttccagccatcgagtatctctcctctttctcgtctcttttccctgtaaaggtctcttcccctctcgttttttggggaaaa

SEQ ID NO: 3647 - DNA, 784 bp, Toxoplasma gondii
  source 1..784: mol_type = genomic DNA
tctctcaccagtgtggcgttcgttgggtcggacgacttggaggagccgaggcggcattttcttcttcctccttgcgcccttgtctgccttcgaggccttcgccacctccgcactctccgcctggcgggcgccgagggcgacagccccgccagcgagtcccgcggctgaagcgagaggagacgcagaggccggaagaaggaagaaggaaggggattgtgacacagtgcctccgccttcaggagacgccgaagaggtcgacggagtaggagagaggagcgagcagacaaacgggaaggggaaacttgagtcggagtccaaaaaatgaaaggacgccggcaaagagaaagtgatgaggagcggaagcagcgccacaccgaagacaagacaaagccgagacggacatagagagaacggagagagtctagcgatccgcgagcccccagcggggcctgccggagaggcggtccgccgcgtggaggtgactctcgcgagaagcccctccatcttgtgagcgtgcacgcgttttctgattctcaacagaacagaccgagaatcaggaaaccacagatcacgcgaacgaaagccccacaggtcgccaggctgctgggcttagacgaagacacatccgtctagtagtttgctcaggctttttctctgctttctccgcgcgaggaagcaacgcagacgaccggcgaatcgaaacaacggcgacgaagagggggtcggagaactccgttgttttccgtttcgaatcagccactgaggcgaagatgttctctgagaa

SEQ ID NO: 3648 - DNA, 3713 bp, Toxoplasma gondii
  source 1..3713: mol_type = genomic DNA
tccaggagcgtagtgtacatcgggcacccgcgatttcgccatatccgagcaagtccgagaacttcttgcaggggaaggaggagaccttgaacgtagggaccctcttctccccccctccggctcctccacccctactgatacggcatacattttcaatatcgacgtcagtgttctacagcttagaagaaacacccgatttctccctcgaacagaacaaacacatgcgcagcatggatcgtccagcaaggcagaaaacagcgctcaggaaatcaccgggaagaaagggttcggtggataaagaatatgctgaagaaagggttcggtgaagaaggagtatgttgaaaaaaaagggagggatgtgcggaagcaaggcaacgttggagagaagccggagcagccccacgcagactaacgggggcactgtattagaagttaatatgcgtgtgcaatgaaggcatgaactacagaagacaataaacggttaaaagaccagaaattccgcgtcgtttgcttcttcaatccttcgttgtggtcgacaaatgcagttgtttccagcaattcgatgcgtaagggcaagccgaagaaacaaaccgaaagctggaacgcgcaacgaaatgccattaaagcatacctgcttgatgagaaccctccataacccttcgacggaggttttacccatctattttctccactctcgtggaacacagaagaacggtaaattcacagacgaggtgcaaaaccgggtcttcgtgtggtcagcgcggttccgcgacttagcgctgcagtaccaaagaagcagcagatcgtctcaagacccccgttgtcgcgtgagttcagaactgctgtagacgcaatccttcactgcaaaaatgtacgtcgtttcaggaagaatttgcagggaacggagaccaaacaactcgcatttgtcgttggatgccagcccgccagcatagggtacttcggcaacgcctgcgctcaagacgaagtgtcgccggaaacagctcaaatccccgaaaacgccgtgtaaagatccggtatctttgaaaaagaggcacagtctttcagcaatttgtccctttctgctccacgaatctccggagcactcaatagactcaagcgcccaagatcggtgcacatgtcctggtgggtggggatttatgtgaaaaggaacggaagaaatgcagcctgtttcattcagaaaaggcacctgcaacggtgacatcgagatacggtttctgaggagaatggtaagtcttgaaaacgcgatcgttttgcgtcaacagtcgccgtcgcaaccggaatgttggtggctcggaaaccaccggacaccgggactgcagcacagacgccgtcctattgaaggactgtctacgaaaccctgcagttgaggcacttcttaaagatatcctacggacaaaaatgctgagcaaagaaagaagcgagatacttttcccgtcgcgaagatgtcggggtgctacggaccgcggtaggactggcggtacgaagacggcagagacttccaggggtgtcgcagcatgcgagggaaatggttggacaaacagggattttcactccgaagcaggtaccagaatctggggaaaatggcagaaaaaggctgagtttcctacactgatgtcttccaaggctgattcgccgatctggactttccatgatctgtacagagacctccccttcattaagacttgctgaagcccatcgtcttgtagctgacactgtcgatggtctgtgaccgcatggcgaaagtgtctagtcagaaaaaggagttcccccgaaagtgtcttgtcaggaaaaggatttcgtcccgccagatcgaggtatccagatgcctcgagtagttgtttgccgaacaaggctgccgatgtgccaagcggctgaaggaacgcagatttaccatcgaacggccagacacacaaagtgaggattgaggcgtttgcctcgtcctcgcttattccctgatcttaggaataaactgattcggaatgcctcacagcatgcgtcgtgtaagacgtagacaagtgctacaactatgggacaacctccgcctccaggcctttgccggtaaatgggcaccaaagtagctttctgcattgccaagcgcgttcgtagtcatgtctgaaagcatggaccatgtcagaggacaactggaggttttcgtagaacagcagctgattttggcttgacagaaagtagtttctgtacccgagtgacggatacaagtcctggtttatcccatgaagtctacgtggtgggtggaacagttggcagaatggctgatgccaattgaagaaggcggcgtctgcatctgtattttctttttttctgctgtcatctgggcgataatattgacggaaacaagaagagttttgagaccacctacaaaagggttccagtaaacgagtgagagtgtctatactaatggcccggaacgtgcccgacgccggatgttactccttttttcccaaactactcaagcggtagggtttgtattcaataatgaaccaggatcaaacatgtacagcaagtataagctctgtgttcgagcgggagtacacagaaactggaatgcgagaagtaagctacgcatctttcttggttataaagtacagtcccgccagtgcctcttctcgtggtaaacacagtaggaaatagttcttctcactagcagatgttagaattgcggcttccacgtgatctactgcattgtaagcatcaatttcgttcttcaggtgtctgcttttgacgccttttcggcagactctttggtcctgtaaacttcagccacaatttccccctcgacgacaggacatctgcgtcttctctaccaattttccaaggtgaaatggtacttcctgaagtgatcacactggccaagtctcttgaagggtgcgaggaggaacggatgaaatgtctcgtcagacatcacatgactgacaacgtggtctgttggtcccagcgctgcaggaagaatccaaagatgcagcaaacttttcctcaattagtggactcgagcagcaacttcagggctggttaaacgccatggacatttgaaatggagaacggtcgtgactgattccactcctgtgctgtccactgctactcagtaacgcgcaggatcccgccacagtaaggaggcaacaaagcgcataaagatgtactttccactgattcaacaaaggttgaacgcttgctttactgccccaacttttctttagcaattacgctagggtgttaagttggcattttgagctaactttccaattacggggatatcggcttttcaatggcaatgagcttccgggcctatcgccgtgcataacggctactgcggacagcagttgttgtcttgtttttatttaccgagtctgcgggattttagattcttcaatttcgcttgtaaggtgagatcctctaccagtttcaaacagcaggcaacaggggatgttcaggagctcagaagcagctacttggaagctgtcggcgagtcgaaacttcgctgtctacagaaaaacgcaggaaaatgaaaggattcttaatgatagcaatcgtaagatgaacaacctcggtctgtacaggaaatcctgagacacagccaccacggcacacagtctctgtttcatacggctgccgcgtcattgttttctccgtggtaggagggtgacacaccacaaaaagacaggagttgctgaagaaca

SEQ ID NO: 3649 - DNA, 2497 bp, Toxoplasma gondii
  source 1..2497: mol_type = genomic DNA
gggtaacgtgcctttgttttcatacgggaaaggttctagtgaaggatagcgctgacacctaagtggacttgcagacaaatcctgctgcctacccactacaagttccacgtttcggtaaatgggctttgggtggttccagattcgtatcagaacacagcgagaaacaccacagaggaacgacagccggtgatccaccggtgtgtgtttcttttcccagtcagcaggaaactatcaccaatacccaccgatagctttgtgatctgcttcaccacgttacaactccgtaaagcggtgtcacatgactcggaaaccgatggtctcagcggtaactccgataagaggacgcgtacactgactcatcctctttgctggtatgtaaattaaagctttatagacttccctcgaagaagcgcatgacgagcttatgcagcggcgttatggaaatgacgagaagccaatggagtgcctctacagcgttctgcggtgcttaggtacacacctctcggagtacacacaaacgtaaaacgaagagagttcactaccagactccaagcaaactacgaaactgtacgtaatgcttacttcaaaacatgctggttcgagggaaactataaaacacatctatatggcgatgtagtgttatgtagaggagtattataccttgaatttgaaaacatcaactatgtcggacagacgcgaagatgcgtctccggagctctagaatgcagaacatcctttcacgataagcaacgtatatgcccttgagtgtcggtcagttccatgactctgtttcaccgacgcaaacgttcggagcgacctcgacaacgcttttttagttctctccgtattcgtacttgtgagctgaatttctgttacagtattgacacagtggcgtttttttccattgcggctgcacgtttttttttcactgcatctatacggaacgctctggtctcgtggggaaaaatgcttcaggggagttaactgtgttggtgatcagcttggaaacatagaaggacaacacgggcagaactgttgacttgggaggaaacgacggattcgggacgacttccatcatcgacccgatgacgtagttgacaagcctttcacaccctgcgtttctcttcagtctgacgagtttgccgtttttttcaaaacacactgggtgcttcttcggcgacattaacatatgactggagcgctttctcactttccgacttgcggtccgggagaaatcgaggctgccagttcaaaggtgcatgcatacgtaccacagacactcgtcgcggtggtcagctgagggaaacatgcacaggttggacgcagggaaacagagcatctaaacatttcagctgtctagaagttcagctgatctttgcatctcacgacgcgggctgattccgcgaagagtcgacgaggcggttgtacgaaagacctcctcagccgtcgacgaatttgcgtctgttctggggggtgggggattctcgagtgaactaaggaatcgagatctgtccaagtcgttttacgccaaccattacaccttttcgtagtcaattgcgtgggacattccaattaaaaagactcgcttcagcaagtaccggggaatcttgccgtttttctgctgcggacggactcgcgcaagctggccctcgccccgaaactttgcccctgagtggtgtatgtaaactcgaacggacgccgagagaaagacctgttcgctacgaagaccgaccgtgttgttgcttccggattttacttttggaacttctcccgcctattgccgccagactgcctccatacgcctgctctcttctcaccttgcccctgttggcttctttctcttcgacgctggataaccggcgagaaaaatcaaaccgtagagaagaagcgacttcttgtccggcgggctgcaggataggcgtcaggagggaagaatctttctgcaaagaacggcgcaaaggactcagggaatgtggggaagccgccaggccttggaagtgcgacgcactagttacagtggcgccagcagacatgaacgagttctgacgaacacggaattttgaaagtcgccgccggatccttttggatcgatgtttagcttttcgtctggagtcaacaatttcgagactttcttgtctttttcgaaggcctcttgccgtctctggattcaaagtactactcaacgtgatatagagaaatgcgggagagttagttccactgtctcagccggcttcgccactcaccttttttgtaccctgtctggatggattcggggagcgagcacttgtggaagagatttttttcagccgtttctttagagagagcgacatcgccctgctcgctgatcggcccccggcctcgtcctcatttcttccagcttgcgcgcagctgtctgtacggctggtgctactctgatgatcccgcgtcttgctggcgagtagaaaccggcggcgtttctgggttctcacttctttcgttcaaacttcaaaaaagaaaa

SEQ ID NO: 3650 - DNA, 1997 bp, Toxoplasma gondii
  source 1..1997: mol_type = genomic DNA
atgaaattgcagtgcagttggcagaggccatggactgcgttggtcgtcgtgtggtcttggaaccagaagaattctctcagcgccttcttgacgcaagtgcagagacagtgcaactccaacgtcttcataggcagccacagccgagtgacagtgtttagctctggagttgagatggtggaggtttttcgatcgtgaatggattagggatttggcgctgaaagcacagatatttcttgagaggtggttttcctgcgtttacgtcaactgcgttatacgaagccacggcaaaaaatccacaaaagtttgtgctggcactgtcactgcgcatgacggacgtaaacgctttaccagctctggctcgtttctctgctctcgtagcctgctttttttcgctaaaactaaaaactaaagtgattctgacccttatacgtattaccaagaagacaacgaaaccgttgaagtcacgtgaatgagaggtggagaactgcaacaaaatgaagcatgaatcgagaacaggcttgtcgcagaatgttctcgagtttgtgttgatgctgcgtgcggcctttttcgcatcaacaccgaggcgtctcagccaaacattgcttgcgatggtcgcgcacacttgaccgaagtgaaaccgatgacgcagaccgttttgaagaaaccttgttcgaacatctgcaggaccgaaggccgttgttccagcggaacaaagaaaggggtgaacaagaatttgtagtgctctcgtgtagtttacagctatcttgcatcctgtagagaaacacactcactacattttggaattcgaactatagacgggacacccgtttctggtacctgtattcttgaccagcccgaacgattggacagctcggaccgcattgctagacatgcaggcacacaccatgctcgtttccagagtgttataaacattttcatttgctatgaaggtgaaattgtaggcccagacaagcaaacggtagcgaaactgttagccgaagccgagacaaccaggtatagcaattttccgtctcctgaagcaactctgaggttggactaagtgctcggaggcgcttgtcgcaaatctgctgcttaaagaacgttgatgaaaacaagtgatgggaaaatttctcgttctgcttctacgaatagaagtctggagccattggaccaatggcggaggggcgtatagacctacaaaacacacggtaggatgctacaggagttgcgggttctcgtttgaggtctacggccgcggatttattagtcgttttgcccgcatttttctcaaaaaatgcatgaaaccggacttccggctatctcgtgaatttgacttccgctgaatgtctcagtgtttccaggctgcgcaacacagcggcgcacgctgctccacagaggaagacacgagaagccgatattgaagattttatcccctcttcctcgttgcgcgagatactccattaactccctcgttccctaccctttaccagaattcgattcttcaaatcagaacagcgaatcttgtggtcgcttgtctccatacgccatcgtaaagcagcaggtttccggcaagtgcttccgcacacttggtccactcccggaaacgcgtcttgtcggaacggagggtcccttcgttcttttctctcatcaacttcatatttgcttgaatttcttcagttccactctcacaagaacgtatattgggaggttaaagtttgtttgcggcatttttggggtgacgcatctcgccagttctccaacaactttacgcggcgctctggacctgtgacgtttgcagcatctcaacagtatgagatactaaacactttgttgaggcagagccttttctttctggcacctcgcaagcttcttacatttatccgttttctgtgaatcatgagggcggaactcgccgcgtcagccccaccttagctttaagacacaaccactacgcacacatgatccacgttatataacaagatgcggtaggttcacga

SEQ ID NO: 3651 - DNA, 4553 bp, Toxoplasma gondii
  source 1..4553: mol_type = genomic DNA
agccacagcatggcacgaaacatgtaagaaccttcaaacacgaaaccaattcctacaaatgcgcgaaccttccttgtgaggcacacgatacctgtacacagatctcccagcgtaaggatgcacatgagtcaagtagtatttccttatatgtacagtatacatagaaatagtctgtactggaaacagaacatgtgcgttgacgtatctaattggaacatttatgtgaatagcgaatccagaggaaatggtgattccggaagtccttccccgcatagtacaagtgtccgcttgcaatcaaatcgcagactcggtcagcgtcctcctgtgaaagtcgcttatcgcgcacttcagatatctttaaaacgctgcagattcgctgtgtctgctgtgcagaagtcagctggaaaactggggcttggaatatcaaacggatggagggaacaccgtgtccgtccacgcaacgggcggtcctgtggatttctcacgcaaatgaaccatatactttcctcttctctcgcaagtcttccgcaaccaccgaaacgagtcaagcccggaaaaaacatgagacctgtggataaatccccccatgaaatttagggattcttcgtgcagtgtatcgtgtacctgatagtccagggttgtccgaggcctcaggtgctttgcccgaaacgccgtagaaggctgcccattgctcgcagacgtcgaccgctgcctcgactcccccaggggcaccgctcgctttcaagagagaagcgaaaggatcaccagtagaagcggctaggcgggcgatgcaccgcgctgccgcataatccgacaacgcctcgccagcagcgatcgggctgggctgttccccctttttcgtttcgacggcaatgcggaagggggcggccggagtggacgacgtgtccggctgcactgagaaagtgaagtctcccgcggatttcagattctgttcaatgtaggcaagaacaacatcggtcaccgtcgagagaggcggcagcgaggcgagacgggtgatccgaaggacagcaccgggagatagagccattgcggatttcgcaagctaatggcctggacagagaacgggtcgcgacgtccaacggaacaattcggagcacgaaaagagtaaggattcaattgatgcacaacgactgagaaaatgtagagaaaaacgacggaagcgtcctgcggaacgctgaaacgcaccagacaaacaggttggaactgtgttagtgacctggcccgccacgtggcaacatgaacaggaaaagcatggggatgggagttcaaggcgaatactgcgactcttgaaacaaacagaagaaaacttcgtctcggtgggaaacagcacagccccgcgcgaagaacgacgaggtctccgcagcacgcgcccgcagtcgactgcgcttgtgaggagaccatcgcgctgcgtgtgaaaagaaacgccgggcgcgttgatggtgtgtcaaacggcgctctaaaagcacctatgtcagtgtggaggcctcaagtattctcctctctttaccacgtcttttctggcccccaccaatcttgtgtaatgcctttgtacgcagtgaaaacgagagttcctccatcacatatgcacccgcaagtcatttgcatccaatcagcgctcgcttgtttagagacgggcaaattgatgtgacattgcaaccaggtgcgcaagacccaaacatgcctttggatacaacgcgagttgccgacgttaactgttttacttgtcttcattgacgcaccgtcgggaaggaacgtcgatatttcgagattataggtattgaaagacacactgatgaatagttatgaacagcattacgacggacagtgccgtgccacggggcccagagaccggcacgtccacctttggacaattagctgtgttcgagaagttcgcacattacaggagatcaatttcactaccggagaatgccctgattgaacactgaggtgtgtcgagtgaggcctgacctgtaatacaggtaaggaagcgatgtagccatgtagcgcagctgacgcttcgaagcgaagccgatcacaatcctcacgcagataggacactaattggtaagaaagtcagcccataatgggaagccaaccttgggcaaatctcaagggttattgacaacgccgaggcagcatgaacgcatggttcatcaaagatctgccgccagaaacttcaccagcactggcctgcaaatttgccacgcgaagtaccgggggaaccatgctcgttttctcttgcacggtaagtttgttttctgcgctgcagcaccgtagagctcccaccacgggatgcatggacgtcgacactactgacagcaaactatggcttgcaacgtaatgcggttgacaaagatgagggcatggaaaacggagccccggaaaaacattaaagtatctggcaaaagcgcaccaccgttttaccaaactggataccggaactctgggccactcttcacgaacagtgtttccgatcccccttgcttgcagacactggacaaccaatgaagtaggcggccacgccgccagtaaccgtgccaaccggtaaaaccggggttcatagtgcgttagatgacgcctggtgtccttggaaagggaatacgcatgtgccaccgttctgccatattctggtcaatagcattaaatgtgatggcttcctttatactaatctgtgttacagttcttccacaacagcctttgcggaggcaacccacgtattgtcagtgaatcaaagcctacgatcattcaccacccacgcagcctcaaaagactagaaagatggtggcgatggcaaatgaggcaaatagtacgggaatggcctcacaacatgtcagaagggaaccacgccgtgcatgtgtttacctctggtatggagcgagccttttgtttctgttgtgaaccaccacgcgtccacatgggagttctacacttgctgatatctacctgacaggagtcattcagcactcgttatctaattttacagagttaaagccgtgaggttcccctgagtgtttgacacataacggtaaaacagcagaatcctgtcgaagcgctttccacccacagctacagcctacgagaaggcaaccagtagaatcggctctctagtcagcagacatacgttggcgaaaagaaacgcactgacgtacactgttgctaaagaacacaactagctgggccagcagggtaacacggatcagattgccaattgggaccgtggtgacccccctacgccacacaaccttgaggtatgagacggaactgcagaacacgtaacaagggtcaacagtgcaccagaaggattaaagggaagatatgcgaatgaagcaaaagtgcgcaaccgctgaatgtgaaggactagcctgtaacgcgagggatcagaagcagagccaacccaactcgacagcatgtccacagctggatagaccggcgagagtcctcaacgacattggtgggtggagctcttgtttcatcctacagacggtattcgagcgtcgatcctctatcacacaacactgattttgtaaaagcaccgttttcctttagtataactctgagtccccaggtcgatgctaccgagatccttgctagtctctgtgtgctgcatgcacgaagcatgcacctgcgtatgcgtgtcgattcacgagggtcattcgcatctttgggaattaccaaaattcttcgtccatgttcgtttctgaccccagtgttgatttactgttcatgaaattggagaaacggctttgtttcgacacgttcctttcggcaaaaaccgcggctcatgtgccctggttttcgtgcagttccgtaaatgagttgtgtggccgtacgagagacgttgagacgcagcattggtcgtttccttaaatcagaaggcaacatttcccgaattgctgtggcagttgcgattctgcgtagtgtaacttcaccaagtagtgtcgcatctcgcgtagtttggagcaacgtggttgcggaagacagtgtatttgaggcaagcaagctgccgatcgccgtcgcgtcaccgtggacttctgtcctgtctctcctgaacacacaagcagttccttgatgtataaaacctggtgggcatttggacgagatgccggtcttaagggcttcttgcagtgtgcgccaccgttgcgctaccagaggaaagtgttttgtgttcatttcctgatggcgtcttgtcattatttctatagtcgggcttctgtcggttgctgcaggcgaacttttgtgtcatcaaccacgctcgctgtccttcttccgaccactgtggctattcggtaccattctgaatgggtcttctcagcatcatcactcaaggacacggtagtttgttcttaatgacagttattcgtggaatgcgtttctgctggggttctgttaaaactgccacgcgttttgtgcctgtttttcactcctcgtacctacagtggatacaggggaagagggtgggaacgtgaaaggggtcgtgtctttggaggggttttctgcgaggtgtgataaggtatctcatccgtgtttcaaga

SEQ ID NO: 3652 - DNA, 2322 bp, Toxoplasma gondii
  source 1..2322: mol_type = genomic DNA
gccacatatccaacaagcatatgaacgacgtatatgaacgaaacacgaagcaatcgagtgagacgaccaaacgtgacatggaaacatcttgaagcgtccacgtgcttcctgggccctgagaccattttgattcgaacggggctggggaacttgccactgaaaccgtgccacgtctgcagcgagcgacccccgcaaactatgtttgccttcgctgacgtcggcgccatgtgcgaaacgggaaacgcagcgcaggaacagcatcacaatgcggcaaatcacggaactgccagagagaggcttcacgacgctgaggaggaaccgttccccgagtcaacccagacaattctggtactggcaactgtcaagcacatcggcatgcattcacacagaacgcgtcgttgatagacaccggcaatgttacacagtagagcggaagaaacctgagcagtggaaacaggcagcgtttcaacacgagtaggcgctgagcatgcaacctcgcaaccgctgtccacctgccgtctcccgaaacaggtcgccgcacacgccagaacctccgcgacaaaaaaacacaactgaacaacgggacaagagaaaatgctgcagtgtatgtacactctgtatcggcccgacgcagttgagggggtatgctaattgccgtcggccccgcatttctgacttcgtattgcccccagcagtcatccgctccagtcgcccgacaaaggtgcatcgccgaagtcctgggagagagatgcaccgcttacaggggccacagacacactcaataagctacagctccgaaagccatgcagttctacgcgacctgtcccgcctacgctgttgtgccgcaaccagaaaatgcagacgctgatgtcacgaaccgaaccaaggcaaattccaaccagaacacgcggtctcgatccaaaaaaacgggagcacccgacaactaaatccagttcagatccattggtagataaaaacaaaccagacggctgcgaatgctcgtgaattgccggagtctcttgtccccacaaaaaggggttctctgttgccgtcaattttgctgtcgaagccaccaaactgcgaaacaagtctgacgccactcacttgtaggctcccattttgtcgatccggaagagctcccgcaacaagagaagagaatctgccttcttttcactggattaaaaactcagggaagagagaagtaaccgcgagcctcgcggggcttctttccaaaacagtgggtcgtcctcccctcccagaaaaattggacacgctggcgcccgcggcaaccggaatataagccgattcgctttcctacttgcgcgcctttggaggtcccagctacgactacgcaaccgtgcatgcgttgtctcatccagacagattgcaacgaaccccacggttcttctttgcggcggcacggagagaaaaacgtgcgcagagcgtttcgccacagaaaggagggctgtctcgattgtcccagagacttccgttccttccaaacattgtttccagaggcgccttcagacttgccgaccatcgagagaccatcgccgctctcatattgtcaaaaagcccgactttcaaccagagattcgggagaaaggacagtgtctccggcctttctccgactgaagctgccttcttctctgatctgcccgcaggttgtgtgctgtttgcctgacgaccccaagaaaagcggagtgtctggggctggacagcttgctcttggcggtgttccaatgaaaggccgaagacggctttgcaggagtcactttgctgcgtttctaacgtgtttttctcaagacggaaagtctctgtaatttgaccctgatctccgcgtaacgtagtctcgtctcgtcggtaagggacataccctgccgtctccgagaaaagtcgacgcgagccatcgacagcgcggatgccctacgaggctgtcgctgtagtatccttcgaggcgtgggtatctctgcgcaggattccaccgttcttgcaattcgtttgcctctattgcttttctcttttccctttgtgaagcacgccgcggggtctactcccctggaccctgtctcgttgttccgctatctcgccgtgtccgctcgtctgggctcgacgacttcggggccctgccgggattgagtcccgtccgtctgccgccgaacagtggcctagactctccagtgcctctcaacttttcttcatctgctaggagcaataattgcctctccctttctaagacctgctcacctcggtgcccagagtcccccccccgtcttcgcgtcctctgcgtctccgccacgacagtcgctcactcacggaaga

SEQ ID NO: 3653 - DNA, 2450 bp, Toxoplasma gondii
  source 1..2450: mol_type = genomic DNA
gtgttacttggatcgcaagatgggatcggagctgcactgggcgtgaacagaagaacaaaattcagaaggtaactaacaaaggtagcccctgtagtcgtgattttgcaaatgtcaggcgtgtaagttacgtggtgccattctgcatactctcttccggcatgtccttccacgatgatcgaatctggtgataatacgggtcagagagtttgctccagctaagacagcgaaatgaagtgtcaattcgcggctaagtggagaaactcaaggagaaattcccacccactgttttaaccgcctttgagtagtggcagtcatgactttccccgtttgttaagcttcgacctctcgaatcaaaacgggcactcgtgttccactaccaaggatatttccgcagcgggggtatcagcttccagctgcagttcgcgttttcatgctgtacgctaccacaccaagacttctgcatctaatgaatactacacagtcacacggacgtaaattccgtataatgttatctgtgcatcccaagaggcatccgaactacgcacgaagaatacttaagatgccgaatattgcgactgccatgtcgcccgttctgcccgcagctcagcttcatccgcctattctgtagtccccgtttagtcttccgcaacagcgtcttccggctggactttagttcgccgggattcagcatttcagagttgcattcgtcagtcttagacttctcaggcaagcgtccaccaaatgctgtacagagttagaccgcgtatgcgcactacgaagccgacagcaccacacatctcgtgcgttaaaagtggcacctatgaaaccgcaggtttgtcatggaaaaaagcgttaaatctgttcagtccggccttgctctgtccacaacgccgattggtacggtaacttctcagatacaaccatccatagaacagacgccgtcctttcttacatgtttcagagaaccgttcgtgctatgatgtcttcggtagaaagatatgttgcgcggattcgtaagaagcacgtcaagttgttatcgagggaaaagtgcaattaaaccgctacgctactacgtcgggaatccagagtgcactgacagctgcataggacaataatgcgtttacccacataagtcaatcgcgaggatttgactgcacattctttttgtcaattgaaacgtacttgaagtacgactcgctctcctaaaagcagctggctgccacatgaagggaaccagacttgctaagcatctcccagacccgaaaagtgtaaagtaaagagctttgtcgcctgtcgttcatcacgatgaaaaactccaaggtggcggaaatcgaggccgcttactaaccgcccttaaacactcgcacgggcgcaattcagtgattgatgcacccacctggagaagctctgaggtgtccattgtcaacctgtgtggtccacgaatttgacgcaaaatctagttcgaagaaggaatgttttagagcagttctgtccgtgttactccagcatttgagatatctcccggagctgaggggctggctaggatccccagaaaagagcaaagtctctcgtgtgtcccggggtccgtagctcgctggtgtgctttccagctgggcacctctgacccgccacttagaagaatcgaggctggatctattaaaagacctgcatcgtttttatttgaacctaagaatcaagaattttattgtctggtcatcctttgccgttttggtgcgggtcttgccagcctgcatcggtgtgtcgaacacacgcgcgggcctacagctggcatattgagtcgcctcgacgtcaattgagcaattgagaagtcatcgccgtttttctctagactccccgtttgccaaaattgtggcttctgactcaaggggttctaccattgtgacgaagaccagaaacgaaaccggtccttcgtggtggccgacagagcatgcccggggcatttgagatgaacgagttttaaatctatcccagtacggcatgggaggcgaactgttgtttctggccataatttgcggcgttactctcgcattttcagagcaagaaactgctgagaattttcggtgatcctatagctgtgtagcgagtcggctcgttcccccgaagtttcgttttccctcgaaccgctattcaacctattattttcggttctcttttcacctccctttttcgccgccgcacgttacttgcctcgatcctctcctctttttcccatcagtcttgcacaaattctggcgagttctgtatctgaatcgtttggcttgctttcccccttcacacccgactcggtcacccagcccctgcttctcctgtatcttctatgtccctctctctgttctgcgtccccctcttcctctagctgttctgcatctcttcccgtcgtatccctttcccctgtctctccttatctccgcgatttcccgtatccacca

SEQ ID NO: 3654 - DNA, 1745 bp, Toxoplasma gondii
  source 1..1745: mol_type = genomic DNA
gctggactttgttgctgctgtggtgtactgacagccgtgtatgggcgtctctccagaaaatgtacgggaagaactattttctgatgtctctgtttcagtttaaaattcgtttgactagatgttgtaccgttgcgttggggcatacacggttacagacggtgagtctgtgtattcgcattggatgtagctcagatcgcacaagcgcagaggcactacgatacctagggtgcatcaccacctctctgaactgtctgagacaggtacatgtaatgaaacataatactcggcgaagctaacgtcattccacatcagttctgttctttgagcaacatactgattactgttaacacacgaatgaacagctacagaaaacaactattcagatgctagggcggcagtatcataccttcgggactgatagtcgctgagacagaattccgacgtggcgcgcatgctgcttgcacatcccatcagttttgtatagttgcaatcatgagaaaccggacttatacaaaatgcagtgcagataaccactttgatcactctgggttccacccagtgttcttctttctcagcacacccatactctcgaggccaccccgtaaccggggaatctgtcaacagcgccgttgactacactcaggttgtccgtgttcccccacatccgttttgggggttaatacgtttgtgcacgaaaggtaccgcctggtcactaaaggccagaaggctgcaaaaatgcaccgctcgtagcttagtcgtggcggagctgactgcgtctgttcttgtcacaagtgtgtgcggggtattctctaagagggaaatcccgcttcgccagcgacaggcagattggtgcattcggacgaaggactgccaacgagttgtccggcagaatgggccagtgttcttgactatttgtgggaaatctatcgtctccatgacgcattcgacgatgtagttaggccagggatacaagcgtatcgctttctgaagcagcaggaagattcccttgtcatttctcgcggccgctgcgctgtttttgccactgtcacgagcacccggcgaagccgtagacaacaatcacgcttgacaggagaccgagtgcatttgtgtctgcaaccagcgaaaggtgatctggaactttcacccaccgtcagcaagtctgtgcccgcggaactccctcacaacctcagaagagtgtgagatcttaaaaatcctagcccgatcttgatgtcaatcaaaaaactacattcactcaaacagttctcgtagtgaggtggcttacggtgacggtaagcatgcgagaaaaacgtgccgtcgtaggcgagactatcgcaacacctaccttctccattcggggtttccgtaagttcacctgcttcgtccactcactcttctaccgggcagttctgccgctaacaaaggaaaaggccacagaatgatggggttttggagcgctattcatgcgctgatggacactcgtgggatgattatcgacccgggcccattgtacatggcactgcctactgtcttggaatgggtaccatcaaaagaaaggccgtgtcaattgattaaatatgcggttcatcctgttggtgcagccctctggaccctcaccttcccacattcgcagcacatgtacgccacatttctttcatttgcaagcataaagtgtcacacgaagcaccttttgctctgccgtaattgcaattgagaattatgttgcccctttcgttgttgggcattga

SEQ ID NO: 3655 - DNA, 2988 bp, Toxoplasma gondii
  source 1..2988: mol_type = genomic DNA
atgtggttggaagcgagacaggttctaaagaagatgattcgaaaccggaagctaccagtggcacatgttgttgcatccttgcgacgacgtgtatttgccctccaattttcttttacccggtgccaaatcatagacgtaaagaacttcgcgaaggcaaggtgcaggtacgaagatgcgcggagccccttaatgtcgaaaaaacgtcgttcgcgaatggagaaaagttcgattaggctacacaaaattttgtctaatgagatcgtgacagcacagctcttatggtgtcatgctacccctcaggcagttggatggtcgtagatgagcaaacaacaccatgtgtctacctggaatattcaaaaatgattgtttgtgtggtgttctgcagaccgaacacttggagtcgtcgttttcgtacacagtccatcactggagacaaacgtggcaaggctcagttcgtcaggaaagtgagactgaatgctgacagtaacttttcaacttccctttgataccagtcgtcgaattaaaagatgcgatgcatccatcggtcttgattcaatcaacagttctttggcatagtacaagcttttctctctgtggggtgctgtaccggcggcagtaacgagacgcaacgtacaccgaagatgcgcaggattcatctaaattctctgatttcaccacaacagcagcaatactgatattctatggaccgtagggtcctcgttgcgtgcatcgaggtttttaggggaaaactaccagatgtctgtaagcaggagttatgtgggcagccacgattttccaagccaactagctggcaacacgttgtcgcggtacaagttgtcaacttctctataatattgtcgtacattcgcaagtcctgtcacaatataccttgctctgccgccttatatacaacatgttgcccataaagatttgggcgagcactaagacgcactgagttgcttgatccaggtgccgcaacggattaaggatagcctcacgctcgatgtattgtggcccacacaatgtaaatgaagcacgtgaaacggtggatatgtaaagaggtttaaggtcgccttcctactaaggcatgctggaagtggaggtgtcggtaagtcttgccgcgttatcgttcatgtcaatccctgagcctcttcgccaactgcgtggacgtgcatgcagccataatcgacggaaatcacatcccaatttaaatacctgcagacggcgtctgatgccgtcaacttttctttcggcgatggaacgcaagtattcctatagtgaaccgatcgagtgccagggatcactggcgtcgcacacctgcaacgtttcttacctttttttcgagttctatttctttttgttgcttcagctgattagcatcatgatggttcgtaacgattttccgtttatatcatgattcagacctcagcaagcagagctgacaaggtacaagtgcatcaatgccaccgagccacatatcaaatggacagtgattctcgtacttcctttgtcgtttgcttttgtgagagcgtttagcaagtctccctcgccatacactacagcgtggagacggtagatatgagcgaagaattagtgagcagaaagccaggaaagcgatgaccataccagggaccttgtagaagatatccacaggcatgggctcgcttgcctgccacgcgtcttgaaaatgtagtggatgaatgggtgagctgatggcagagacagagtttccatgcagttttatcgggatcctgtcttgacgcacttgcttggaaccagtgtagacagcacgtcgaacttctccatctgaccagagcctatccgttcagcaaagacagcatcgcctaacagctgtcgctcaggtcatgtttggctttgaaaatacgtacggtgtttcgcactcactgcaaggctccaggtgaagacaattcggacaacaggacacaagcttctcattttggatggcgttttagtttgtacgcaggatatcattaggcgatacttgctcgatagaggaaaaccatgcgaggagcgacaagagctgcgaaagacttggctgtacgtacgcgatgagctgcctattccttttaagctggcccatatgccggcaaaccccgctgaaatacgtcgactgtttttcacccgagcacaaggggaaattcacaatcaaaacctatggccataacagtttcttcgccctataacaagactttgtacacagtggattctcacaagtggatcgtgtgccactaacggtcgagaatcctggcttcgttttgtgacacactagattggccgatcatgtctgtgcgacatcagcaagaccacagcggcgaaggaaggatcgattcatgcagcaggaggcccaccaatgaaaaagtcaacactgttcagtcgtaaagttgatagcgactgggcacgatcctatcacccccagcaatgctgacaggcttcagaatctgcgcgccagagatagcactggccccgttaacatcacttcataattcgcgtttcatggaagttacccgtataacggcagtttctccacatcttcgttcagtcactgtgccagtctcctccctgcatcattcctacagtaaatgcggcggaatctgctacaaacaggctttatgtgaggcgcttaggcgacgaaagaagggcattttcaaaacacttcccaccaggaataattcagcaatttccaggatcgaagccagaaccagtgcgtgagtgtggtgggattgccccacatcaaacactagtaagatgcaagcagtctagccggagacacggcttgaggcagattagctatggagtattcgagctgggagacactcactggttgtgagatttctattcgtgctttgaagaagaagaagttggcggccataaaacaactctcccgcttgcactgcgtacatattgtacggtctagggacgatccgaagagccaaaacggctatactccaggaaaaacgttagcaaaga

SEQ ID NO: 3656 - DNA, 3913 bp, Toxoplasma gondii
  source 1..3913: mol_type = genomic DNA
ctgtgccaaccctatgcgtctacctgtatgtatgtatttatatgtacctgcaagtatattcatgaatatatatatatatatatatatatatgtatatatatctatgtatgcatatatctgtatatatttgtatgcatgtgtacatggaagtaacgaatgtgtgttgtggctggacatgcgttgtccatttctgtgcagaatgaagcagagcgttttttcgaggcgactccggcgtggaccgagaggtctctttttctttctcaagtttgctccggactcgttcgcctgcaagttcttcagcaccctgaggggtccaccgtctctcgacttctcgacttactcgggccggaggatctccaggaggcgaagaagtgccaggaaactggcaggccaaagtgcgtgtaaaccgtgacttcaaatccgttgttctctgaaacacagagagcctgaaaaaccaaatactcggaagtaaaatgttgtctcacggcttgcgacttttgcctttgacggcgcgtctcctcatgcggccccagaaggccgaacatcccccttttttggatatgttccaccatgaggagaggaggacaaatgagtttctgcggtcctacaggcattacacacctccttttcccagttccctatttcgtatctgggctcctgggaggacactacgtagatactgtcacatgcgaacgcttctttgtttttttaatcgtgcctatttgacgtcacagcaaagaggttctttgtgtttgatcttgcctctctgacgccacgttgaaaacttctgtagatcacgatttatcttgccttttatcggttgtgtggagtagctttctgtaccttccactgccgcgtgattggttgtagcacccctgcaggtattgaagccgcgaactccaccgtcggagatttccgtccgttgggaaaaagagagctgtcggggtggcttcagaaaagagaacgttttctttgttctctttctgcttcagtttacgagcaatgtttctcccggaaggcggaggcgccggcttctactgcagtagctgcgactgggcattccagcgagacatggaattcttctttccgtgtcgtaggcgaaagaaacgagaaacaacggttccgggaacaagggggtttctgtttgccaccgaagctgtggtcccaatcgtagcactctacacccttttttcttgctgttaggattggacattccttcttttcgtctcccctccgtggtgttcatggaaatcaaaggagagactccacgcgagccagcgcgcctgccgcgtcgttcaccataccgtcggccgaacctcacgcctgcgtacttcgcaccaagggactagagagcaagaaaaacttctacgatctctcgttgtgggttgtggtcgagcttgctttgttgccagtccagacgacgcagctgtagagggcggtgcatgtgcgtgtgcagatattcgaggtatcgacgcatgaaactgtttgacgccatcgttgttgtttgcgattctcacggggctcgatagacacctcaggcattcgcgctacacagcttgaagctgactcggcaagtccggaagaagccgcgtcagtctggtctgctggactcttctgttcactttcatatgcaagtcgtgccacaccaaaaaaccaaattgactggaaacgactctctcttttttccaagatgagatgcctgcgtgtgcacctaccacaccttccgaaagcgttcagtcacgaccttcgtatcccgatcctgaactcactctgaggatggatgcacctttctgtctctgagtgattgctcccgcggtagtctctccccttatgtgcgccgagcttcgaagatgctgctccatgcggtcctgcctcttcagttgtctcccttcgtttctcgagctctcttcccgttcctctctctatctgtatccacgtttgctgtccttctcttcgactccattctcctggtcgctccttcctctccgtttcccccgtcttctcggtttctccttcctctctgtttcctgtgttttttctgccttgtctctcgactcgattgagatggtggcaggaccccaacatgcaccggaaacgttcacgaaaaagatggaaaaggtgcactgttccgagtgcaagacagttgaggctgtagagcgacgcatatggttgtgtcaaacgcggctgtttcctcttcctgccttcttcagtcgacaaatgccctgtagagagaactttcgcgatgataaaacctgacgccgtgggcgctggagcctgtgagcagatccgagacgccatcctcgattctggacttgacatcattgggcagcgccacttgcgcctgtctgaaagcgccgtcgatgcagtgtacgaagaacataaagacaaagtaagcattaaacgaaacacatcaaaacaggcatgcgcggcctatgcgaacagaatgctccttcgcacctgccaatccatgcggttctaagctcagttccaagtgcacctgttgtcaatacaccacatacacaggcaggaacgtgtgtctatatatatatatatatatttgcagatgaatagatacttgtctatgtatgtgtatacgaataggtacttatacacacacatgcattatatatatatatatatgtatatatatgtatatatatatatataaatatctgaatagagacgcgtacacgtttgtgtatgtgtccacctatgtgcatgtgtaggggaatggcggtatacgtgcgagtcttctaagcatgtgaataggtagctgttgagcagcgacgtctgtctcaacagaggagacagctggaggcttttcgtctccggtatttctctgaaactctgtaggctccgagtgcagtgtgcctttcttcgcctttctacatttcttcgttctttctggctttctgtgacggtgaaaaccttcacaggtgttcgtccacagaggcgaacagaaaccttccggattcttgtcgtttctgggtttcgagtcttctgcagtgaaattctgttttctttctttcagcctttctacgacgatctccgcctgtttctcacaggctcggatggagtcggtacgacagcagctttcgttcctcgcgagaggccagcgaatcgctcggtagatttctacgaaactcgtttctctgttaacatcgtagaaccgccttctcggactttgcgttttgcatggcatttctttcagcaacgcgtccggtgctagcgacttccaatccagtacggtgtggcttgacgttgagcgttccttgagttcttcagttccctgggtgggagaggtccatcgagccacaaatggcagtctacgcctcccgtctcgtgtttatctccatctgtatgaatataaaggcttgcgagctcaccgaaacagtgtgaggtcgaagacggcttgttgcgtctccaggagttctcagtgaattatggtaacgagaggtcgcttctgcgtctccgccacaaaatgaaaacagtcgctcccctcgcttcggcagtgtatcgcggaaaaacagcaaacagagcacagaacctcaccacaggtgttgcaaagaacgacgcagatcagagacgctctccggagctcaccgggcgaccgtgtgctgaaaccgtttttacgatctctcgcgcttgagactaggtcgttgaaactaggtcgttgagactaggtcgttgaaactaggttgttgagactaggtcgttgaaactaggtcgttgagactaggtcgagatacgttccgcgtctctggggtacggaacaagcaagaagcaggggagaacctgcctagaaagcaactacgccgagggtgtcgcttgccgtttcttgcagtcgttttgattctcgaaggccaagcggcatgcagaagatggaagcttctctgtggaccccgagacagca

SEQ ID NO: 3657 - DNA, 2126 bp, Toxoplasma gondii
  source 1..2126: mol_type = genomic DNA
acttttccacgcgttttccctggcaaatcttgtctgcgaagctttttcctcggcgcaaggattccgtcggatttcaccaggcgacgaacgcctgtttcacattcccaggctgaacaaaatctcgttacaatgccactgctccaatggcggcgaacagcaggctgccgttgacgatgcgaggccctctgcgtcgcgcgcagctcatattttgtgaagttacttccgcagagttgtccgaaaaaaaccaacctctctcttgtgaggttcgtctttgaccagcttcccggttttacaatatcaatcggcactctctgcgagctctgtgccaaccagcacgcacaattctgcggatcagctgtttctggtgtttctacaccctccacgggatgttcgtgagacacgtcgatggaagaagatgcaaactcccatgtaaaggttaccgcgtctttcgaaacccactttctagcgaattttcagcgggcaaaagaggcgggcaacgacatgcttaatgacgcgtctggctgtgattcgaagctcttggagaatcacttgcaaggtcacaagcagcgttttaccccatgaaatttccgttatcttcctggtattccacctgtctaggagattttcgagttcccctcacataaatatgacattcaatcagtagttttcccccgtttttgcatacacgacccccaggaggctgctgaattggaacctgattccccgccgcttatttagacatcacatttgtagaggggcgcagctgtagagctgttctgtctaggcacagaaacgagctcgcctgtctgcgcaactgaatgaactgcataacaaacttcgaagcagcccactctaacccgaaccaccgacgcaatacgcggcatattgcggtggtggtgcgagagattgacgcattgctttggattagcaccttcgatatccaccagctactggcaaagggcaactcgaagaatcgttttcctcattagcggtaaaatcgtttctggggacttctaaccaagcgggccagtcctcctctagggacaactatcgtggtctggtgagcacgcgaacttcggtggaaaccggaaggtcgacagacgtatccctgggtgagtttttacctcggatctcaggaggctctgtccgtcacgctcttgtctttgtcgaacgctgcatttctgggagaaagggaacggcgttcgacgttatacggcgaccatttcttcctgtcgcacgctaatcgccgcagcaaagtgaacagtttgatttcttggggtgttcgtttgagagctcctcctgtcttccctggattgactcacgttattggttgtcgccagtgcgatgctgtctcgcgatcacatttttgccgcgttgcatgtgcgcatgcattcgcgagaaacctgcatctctgccgcaggggaaaggaatgtgcagccaacatcgaaaggagacatatgccgtttcttccttccatttttgtttggcaatacgcggggaggccgccctcttcgtggagccccctttcctctgcagacacaaaccggccggaacgcagaattgcctgtggtctctctgatagccgagggaaatcaggcgaatcgaggttctgaagttatactcttgactgagcggctggaagactagaatgctcatttcgacactcagcaggagaaaaacggcctttccatccctggcggttcttctcgactgcggtgtttgtacacctcagcacacggcgttcagccgtagtggtcaacttcagcaacggttgtttccccgagctgtttcactcttaatttctcgacccccttcgtcctgtccgaggtaactttcccacctgattctttgccgttgttgtttctctccgttttcactggcgtcgattcccgctgttacgtgctccaccgtccaaaaacacgactctcggcactgcccgtttgtcggccacaccgacccccgagagaaatctgtcacctcagctactgctgactatggtaggaactttgtttcggtagtttcacttctcaaggccaccgtgccgtcagcgacggtttctcaggtgaccgatcgggtcaccaggaacggccattttccagtaaactcgaaacggacgcggatcaaca

SEQ ID NO: 3658 - DNA, 3927 bp, Toxoplasma gondii
  source 1..3927: mol_type = genomic DNA
ctcagttctcttctgcttttcatgaccgccatgttgagtgcattgactattgtgatatccagcgtatacttgaaaagtcggctagagaccgatgcttgtgagtctgccttctgggatgctgagaagcaagtttcagagaaatctgggattttccttggcgccgcgtcgtgtcagatggtgctgatattcgttaagcagagcatgcgggcttgtttcactcaagtgtattgccaccagcgaaagaggttgctctatataagagaatgttctagagcgcatacgggcaaattgctagtcggccagaaacagctagatgattgagaagttgcccaagaccaccacactgccctggagcacagaaaccttaccgtgtcgtccgtgcaaagccaggaccgagaaccgcaaacgataacgaggtcatgtattgctactatcgcatatcaacgcaggtattgtctctgcgcaatttatcggcgtcgagaagagatatcactcaagcttcagcggttcgtctgcatccgagagcgaaaccggctgagagagagaaagggtacccggacagagcgataggcactcactactcatttcgtaccggctactctgcctctcgattgccccctctgggtctttagccttggagttatgtgtagcaaccacttccgtagtttcccatgtgttgataggatttatggacgcggggaaacgagagtcgaaaggttcggttgacttcgtcacagcttgtggatttcaggaaacaagtttggcattgcgtatttgcggtcaaatcacgagttgcaaaacttctgacgctacaagattctcactgcagatggtgaatgaggcactcctttcagtttccgtagtttgtactaggcatgcgggctcttgtccgaagtactgcgagtttgtcgttatagggcttacggtttaacaacgatcatgtcaactttttcgtggtcgccgattcgttgcgccgggccgacgtttctttggtgcaccctttggtttgccgtgatctcgttcacatatcgacatgtgaaggaaatgacaacgttttctgaagaacaccactcctcttttgcgaagataatgcggcatttctgtagcagttgctgctacgctctcagacacttcgaccgagttctctgtttcttgggcaacaggtcctgtcgggtggaaggtgccccacgtggcagttttagggaggcacggaagctggaatcagagagagaaagcaagagacgcagtacgctgggtaggggtggaaagccaccaggatcaaggtgtgggtgctaatggcagaaaaatcaagatagagtgcctcgtgcgcgtagacttcccgacctagtaaagagaactctgttgtgctgcatggtcgatgcacacagtgttgtagtgtattacatttttgtgtgtgtatcatgaatgaaagcgaagagtggagacaaggcggtttcgttttcgtgtgtgtggtgtcgtttgatggtgcatgcaacaccccaagagtctgcgttctttttagtgaaaattgacaaatacgttgggtccgcgtaccgttgcagagctctctctagagaataaactcgattttctaccggcgatacggcttgctcaaaggtcctctttcttgcttttatccacgtactttggagcaccaatcaaaacatccttttaaaggctcgccgtacacgaggttcctctcgtatctaccattgaaccgaacagagaaatagagggacaaaaactcgaggctcgcgtgtgtcaactttccccaaactttctttggtgcgctttttccgtgttcagaagcaccaacgttttccttggtcttgggtggcaacagccccggtcagcatcggcagagtgcttgaactgcagccgtctagtgaggaaacattgtcaagtactcttgccaaggactccgtaactttgaaaaatggtgacagaagtgcacaactcgaaggacgcttcccgttctttacgaaacggtaaagtttgcttcccacctcttgtcacatttaggcggaagcagtttgttggactcagcaaacacctggtagcgtaccaagttcgttttgcccacgaggaagctggaggaaggtcggttgctaaacttctggaaacatgctactgcttgcgaagcttgaaaaagtggaaagaatacgaaccgacagttatcacgggttacagtccactggctagtcaaggggaatcacagagtcacaaggagtccacaggctgctagcaatatacatcaaagtgacgaaaaagcaggtaatcataactgttactgcaaacgaatttctgtggcgaagcccgctcacataaactcggaaaactgcggctagtagcacaggaactcccatccgttaagtgcagtaataggattgtcgtatttagcgtatatttggagaaccagcatcgttatacaaaccgcgcaaatatcacactattcggctggatggagtccttcctaagcgctagagacaacgagatttagacgacttgtattcttccatgcaaatggacaccgttcgccgttttatcctctctctggacgggcagctaactatctagggttttccttataaaagaaatactaccggttgagtttataaagtaccagttacgtcgtatacttgaatctattcaagaattggtagtaaacgatagaggtggagtacaacgagttttgttacttgcaagtgaaatagaggcggctccttggagtctagaaaataagtccatctatttgaccggaatgccatcatgtcatgctcgtgacgaccgattccgcaacagagtgaaacagcaatgagcacatctctgtaaagttttccccggttctggttgtgccactgctgcttctcatctttcttcatagtccaaaggcgcaccagtgttcttggctggcggcaggcaagcctttcgccctctagtctgcagacgggactctctcaactgccaatgaagcgttcgcccagcctttcgtatcgcgagttcctttacgtttccaactagccgttcctttcgcgttttcctttatccccttctctccttgtcaggttccgcacacactgtagaccggtttcgaaacggaagcgtcgatttagccgacgaaacttctgagtcagataacgaaagtttgtcttcatgcgcgacgcctcggcctctgggcgatccgttgttttctgggtcagcaacacccagggctgcaccactccctgaacgaagttaccggttgagaggcgtaaacgaaggcgaagggatggcaaaagaacttgccagattctccacgtatgttggcaagtacgctccggcattcaggcaactccccgccctcttgaaaccgggtccgagacattttctgcccgcaattggagaggtggacgctctcctaaaaattgaccggccagacggtgaagacgacggagcaggtctggaacagccgagagaaaacacgagacgcacttgggcaggagctcaagtcttcgcattctgcgacagaaaggcggcagttgttttgattaacgtgaaactcagtgacgggttatccagtgcaggtttcacgtgacagtcaggattgtgtggcaaaggcagtgggggacgtggagaatccgggacgaccgcaactccaccccagcactttcgccctttgcacgatttgtaccaactagactcctgagtttaagttgaaaagttctttcttttcagcttgtgccggtatattcaggatcccaccgttatattcgatgatcctgtgtgttcacaaatgtaaaactcaaatcgattaaatagcgagaccactggtacccaggagaccgacgtatcggtgacaggcgagcacgtgtgtgtgcctagctgtacctgtggaagactcacccggaagtatcgagcaccaaagggcaacgaaatcgagattgctca

SEQ ID NO: 3659 - DNA, 4884 bp, Toxoplasma gondii
  source 1..4884: mol_type = genomic DNA
tgatatcgcgtctgattcataggcgtattctgagtctttcgatgcctcagtgtctgatgcagattctgagctgtctgatgttgctctgccaggtgctgatactgaaactgttggggttgtcctgtctgttgttgagtctgattctggtgcctaaactgctctgcctggtgttgcacccgatacgcgggaaaatagtgaatcttctggtgaggcaactgactgtgatgccgcatctgatccgcgggacgcatctcatacgacggaagataccgtagctgctggttttgcatatgataggagggaaggtactgatactgctggtgctgtcctgtctgaggccgcgcctgatagggatgtgggtactgaaactgctgatgcggttcttcccggtactgcacctcccggtcctgatactctggagtcccccgtggaatcgtaccatgccgtatgtgcgtaaccgacggaggagtactgctttgcgaagcgtacacttgacagggttgattcgcatccatcatcgccatgggttccttcaagtcgaagtggcggaaagagggcgaagcctcgcgctggatttgacttgtggtgcggggagcgtcttgccaagggctgaaagacagcacacgcagacatcgttggggaaggattacgagaaataggcacttcgaataaaactatttccggaggctctgagtgtgtcccttggctcacttttcgagacttgtgctcttccgtccttcaaaactttgagaaccgcctgctccggcaactgaccgcgcttgaacgcacggcgacgtcgtggtagctggcgcgggaagtggtgtcggtctacactcgtttgaaacagcaggtttggaatcagcgattggattattgtagtggttgggcaagcaataaccgtttgcccgttggccgtttggcatgccgcattgagacatccagggcacaccgatggccgtcgccggttggcggttcaggtgaaatgatgcgtggtcacccgagagaccagaatgttgcgggtaaaagggctgaaaactcccggctccgtttgtgcaaccatggaagggcagggaattctgggcctgcgtgtggtgttgctgagcccatacccgcggttcctggagaacggtcgcagctgccggtggtcccgcagcgcgttgctgctgcataaacaatcgcatctcttgggtgggaatgggcttctggacacccccagcgagcccgctgataaacgactgaacatccatcatcaagccaaacactaccagatcttcagataataacacaaaaggtgtggtttccgactatgttacacatcccaccgccagacaactctatgaagctccacggaaaacagcgatgacataagattgttcgttcagtgtctgaagaaaatcgaagtcatacagaagaaaaacacgggcaagtacatatatatatcgagtttggagaggcacgcctcagtgagcggaacttgacctgtgccagccctgccgaggcagtgcgggtgtcgttcggttgacggagacccagggcccaagaaagcgggtcaaacgccttgtcttgttgaaaacaaagaacgagataaaaatgcgcggcgttgtctttcaaatataacaccaggaggtgtgaaatgtaccagaaaggaaaagctctccgctgccttcagacactgcctcacggccagccactgcaccgcggtgcggctccaaatcatgagggatcgtgcgtaaaaagtgggaaagtgactcatttgcgaactaatgcttgtattttagacggcaaatttatcatttcgtaaataatgggaactttgtcgtcttgcgggtcagcggccaatcctccttaccagcatcccgcctccggctgtccgtgcacgctggcgggtgtcctgttggctttgtgtcctgcgagcacagtcgactcgaaaacatgctgtctcgcagacaccagtcacacggcaggtattatacttcttctagctcgaaacttttcacatattcgcagagcgaaggagataagcttcctcctgaagatatggagtcgagaagagtgcgcccctcttagacaaaccagtacgcaggcactgtctttccgctcctcgcgtaatggccacgcgtctggcaacgcgccaatccgtcagtcgttggacgcagaagttccatagcggtggacgttggcagcgttttgcggcgaacggactttcagaaaagttgttctagtgtgggagaataagtgtagcaaatggaaggtggcaagttctgtgtctgtgtggagatcgtcgattggagttaccaggggcgctcacagtacctaatattatatcgagtagcgtgactatctcgaatactggacagaaacgctcggtgcacgtgtcaggggaaatgacgtcaacatcgatgtcacgtctcacgtgtcgtccagccggcagagaacaatttggggcgaactccgccccggttgtgaaattgtcacagcaagcagaaaaagccctgcttagcctcgaagtatcaccctccgagcgttaggcttccatctagcgatggaaatcacgaccactacgggctcacagcgtactagagtaccgctctgtgcaaggataacttatggacccgtcctttaggggggtatacggggtttgtgtgcttgtcttttgatattttcgatacctctgcaggcctgactatgtatccatcgatggggtaggccgacacttctcttggcaaacgataccgtcgtcacttggctcctgtcgtgaggaaggctcatatgcatgctgttgcgtgtacgcgtacagtgccatgctagaggctgataagcaaaggccagtcatacgtaccgagttgctaggtgatttctgaaactctgtttggacggttcatcttctgtttctgtggtccactcgccggtgtgtccccttcacaagttggagagtctgtagggcttggtgaggtttgcacaaggcagcagtgggtaggcgacccacacaggcaccagacctatatgtaaacattctagtcgtaaacgaaggaagaaacgtgacgttataatggtgtgcagtgtgccatgctaatatgcctcgccgcggggggcagagctctgtccaacaatagttgcagagggagggcacccaggaaaaaacagggtacacgagaaagtcgaaaaactgcagaggttatcggaacggggcaccgaaatgaggggggaaagccgtcattcggatgagctccagtcttcaatttcccagttctcctcgatattacttgatcgatgtctacacatcctgcaggcacgtacaacggactatattacttttgtctcttactccctggaaccaactgggcccccatgctaaatttgttagatttgttgagtatctacggcagaattttcttcaccgctgactgtaacgctgaaggaagcgcgtcgagtcgatactggtatgggcggcaactgacggtggtccttccaaccttatgattttgttaactgaggcatgtacaaagactggaattacgtgatttttctatccccagaagcgttcttgaacttcgttccactgtggctcgagcgaacgacccagtttgatccgccgaacgaggttctgttatgagccttgcttttcgttgttacagtcggattgtggccacgcaggtggacaggccacagtgaacttttctgtgaaagtttgcagtagatcctgaagaactgtacccggtgacccttgtgctttcttttcagatgccagtgctacgtgtgatggggtatgatagatcatgaattcgaagaaacgttgttcctacggttactgcgagccagagactcgaagaaaagtccatattcacacgctagcaccggcccagcttgaattagctaatctttaacggatctaaccacgcgagagtacatggcgattcgatcttttctttagcactcgtccagcttccgttggttgatctaggttacggaactgacccgaatggagtactcggcgaggagactgtttgtcttcactgtacaaccttcgctgttcaagaagaagccaaaagactcgtggccccttgagggtaaaaatctgtccacatgagtctctggaagcaccagtcgtggcactcagttcggaatcgaataactttacgttcatgtctttataattgagtgacatacgacgggatgagcgcgtcaggttcccacaacatgcgaccgctgatgttcaaaaagtgacggaaaacgtcctaatttcgatagatcaacattaacgtgtgctgttcgcgaggcgcgacaaggatattcaggcggccgggcgggcccatagcggagcaaggataggcacgcacttttccgaaccgctcaggtcccgcatctctccgtcagccgttctacgggtgtggctcaggtgtcgtatcgcgaaaggttttcagcgaaccaagagactgcagtggcatagtatgtgaaacccattttctcgtctccaggaaaagcactctaaaacacattttttgccatgcaaaacggaaagcatccgtaataagggttgaacaggaatcatgtgtcatcgatgttaacttctgtgcgccctgccaagagttagcgttctctgctgccctgtttcatccagaagactttttgcaaggacaacagcctttgaaagggctacaggttgtcctacagccaggacagctccatcgttttatgcaggaaggtcatcttcattgcctttcaaacggaataccagtggtgaagctggccagtgaaagacgagtctcagcactgcacaggagtctacgctgttaaagtgacatcttcgtgggtcaacagcaacaaccaattcagttctttctttccttgaacgtctttgagtgtcagtgtgtcgccccaataaaa

SEQ ID NO: 3660 - DNA, 3229 bp, Toxoplasma gondii
  source 1..3229: mol_type = genomic DNA
taggtttactctctccagtcagtgtatctttgctttcccggcaaggggtcgcgagacgctttgtactagagcggctttctcggtcgttttccttgcgagccggcccccccccctccgcccccaggaggcgaccgcgtcgcttgacgtagctttccgtattttctgtatttgtctgcagctcgtgggtttccgccacttgttggaggcactttttcaggcagttgaagagatttccatggcgcttcagcgctcctcgccccaggactggaacgagtttctgcaggcgattattcggggtatcgagcgcgactcgccgcaccgcagagctgtgtgctgatagcgagcaagacagaaccactcgaggacgttccgcgaagcaatggttttgcgggcctcgaaagaactttgcccgacagacaacactcgtctcccggctgcggtgacacccgccagggacgatccttgtcgacacgccttctgtacagagaaactcgaaaatcctttttccggcaagggccgagcgatatgcattttcaggtatccatctgtatagcgttttgtcactttctgacgctgtagttcttggcgtaaccggcctcgcttttctcgaggtgcctcccgttgtcagtgtcgcgttcctctgcagttctagtgttgtggacctaaacttttctcgcagcgccgcccctcactccgcaggtttcggaggcgcagcgcttgttccgaccaccgacctccttttcccgggaagttgtttcgttttttcgttgctattccttgtttcgtctgcctcttgttcctaacgaaaatgtgcgaaaactgtcagcctcaacctactgccttgctcaacgcatacccatatgagaacggatcctgagacccgcagaaacgcaaggcgtttgcgggatttttgcgcgacaactactttgctgttgacacggacactttctaaacactcacgccagtgcatctgtttcgactctccatattatatttctctatcggacaaagtgcacgcgccaggggtatttgccacagccgtttgctcgcagatcagggtgataagttgctagaagccagtgcagaaacgaagacacgttaacagacgtttttcgcggacaggatggagtattcgtgtgacttcacgcgttggcctctgcaccagacgcaaaaatgaatttggttcagtgctgggcaagccgaacaatgccactgaacactgaactgtcgatgctcctcgccaaacagctttccatttcgtagccctccttgtaactgaagtcaccggggacccggcaatgtgatcaatgacaaaggcgaatttgtttaggttcttgaaaaaagaatcgctgccccaccggtgtcactataggacaagtgctatttctgacgcgtcgaaatccagcttctctgtgagattccggttccttcgaaggcttctctcggacacgaaacagtttctcaagacgtttctaatttacgcgtcattctgacgggacagttcgaaatacgtcttgaacagctcttcttttacgaaagaagccggtcagaaaaaccaaaaaaagggcgaaacatcctctacaagcaaactgctgatgtcactgtgcctaccatcgccctgcaacagaacccgccgcatgtcctagtgttttacattccttcaaacagattcgagattaccaggattgcctttgttgtatcaacacgcgccgcacggttggttctacttcacagcgattaccattttttttcttgggaggccacacagcttgttgacgacctgtttagttctttaatgcctttgttcgtcggatccaagttctgctgagcttttcgtggccaccgtggtgagtgtgaatttgaggaaccacataatcaaatcatcctcagttgagttgaaaaaatctcactgccacacgcattgtacgaagcaaggagtccaaaagagttgaattgagggctccacaccgagcctctgtcatacagacagcgaagaccaacagacagcggctgcgttattatgaaagctacactgtatcactagagataaactccggatatggattcatcttcagttgcggtaacaagtgtgttccagtagcagtcaaacctcctttttcctcacgcgctcagcgcctacactaccagacaccagctgaccgtcaccacatattgtaaatacagatttctaggtaacttgcgtgtaggttttttttcttagactcgcctccacttagcagcgcggtggttgggggtgggagggggggctctggtcacggcgttaaaacgattctcgcttgcctctgatttaattactctcgggaccttctatttttttgtccattgtgcctttcacaaggacgcttgtcccctgttgactcacaggactgcacagaagccgcagtgtgactgcacagaagccgcagtgtgactgcacagaagccacagtgtcaccagttccgagacaactatggtttttgccgggacccctgctgcgctgtttgtcgcgacgtcgttgtgcgctgcatgcaggccccgaattagtcgatgatgggcggttgtcgtacgcgttcttcgcagagacacagacttcctcaaaggacgcgaaaaaaatggctttgagcgtccaccgaggcttttcgctgcctcctttgcgcctctaggaggcactccagccttgatcaaaaggactcgactcttccgtagctgccgacatggtcggctgttacgcgcatgcgcccggtttaatccgtctgacagtggagtctctccttttccactctgatttaaacaccccacaggactgaactgcggaagcactcgttcgaggcggcggcagccgtctgtctttgctttggtcgtttttttttctcctctcctgcgctggcgagtttccacggcctcccgtgcgacccgcgcgactcgcgcgattccccagaacacactgcctctctgccttcaactgacatcgaggtcaacgactgcgggagctaaggacgcccaagtttgccgagaaaggatggaagtgatgaggcgacttgcggtcgcgaatggggaggttttcgtcaagccgagatcccatcttcaggtctcaccgctggtgcccggtccccagggcagggcactgtaagtcgcgcatctctcgtttcgacgaggaaaaaaagttcgagtcgcaaagactttcctcgccatttcaaaggcttcaccctccccccaaaagctctggaaa

SEQ ID NO: 3661 - DNA, 2043 bp, Toxoplasma gondii
  source 1..2043: mol_type = genomic DNA
aagagacccgtgtctttttcttggcatgtgtcgagaatagagaacaactgcattaaactgtgcgctgtaatacgtgagtcgttcaaagctccattgagtttgctacaagatagcaggagatagccaagtcttccagcgtgagacttgaaccgaacaaactgccagtcatatctgctggtcaatgcaaccccgcacactgagacacacacacttctatgcaagagcaactcgttatagggttaattttctagaggtatcgtcattccaagaaaaaggcaggaatagctgaggaagaaggaagttcaccgttcgactggacgaaagaactgagagggcaaggtctgagccaaacaacgaatttttggtgccacgccatggtggccccctcgcatttgctgcttcacgggtgcgtagttaaacagctcaacgaaacacgacgcgtttcgccatccagccacacgtggtagtccccgctacctgcaacagtttcggacagccgtttgccctggaagatgaggctgacggtcaggcagtatgtcaagcgcgacagtcggaagtgcgtggatgttctaaacgaatacgggaagttggcgtgacgttatctttctttgtcatcacactgtgttgccccaatcaacagatgaaggcgtttaacatagactctactgggcatacgtttgtactttcatgtttgcagcctcatagaaacaactgggaatactcgcataatggcatctcccgagaacatacacctacatgatgagccgccagctgaactctacgttttccggggccacaaatacttcaaagggacatctatggtgatccagccaaggcactgcagtaaggacatgactcccaaacagacttgctccaagcatcttcgagtgcttacgcgattccgttcttgagggtggatagggcacgctgtacccaagagccagctggcaaggcagaaacactgcagctggttggaaaacgatacctcaactaccgagtcgggatctcatgttcaagaccaacagtgttacagtgcacaagacaaaaaaagctcagcgacacttgggtagtattgagaagagtgaaggttcacacgattgcgattcatgctgtgtatgtaggatcgagcttcttccgtttacgattttagccgaaagaagtgtgttgttttgctctatagcgaaatctaattgtggcagctggtgctgagctagccaatcaagtttgagcgctttttttcgttttcttttcccggtgtgcatgcgcaaattgaaccgctgttgaattagcatgtggttgaaaaaaaggtgtgtttcgctggtttgcttccattgctctctcagttggcttccttctttcatttaaattctgtcatattgttcctggttatcttctcttcttcgaagtcttcaatctgctctttcgtcgcgcttgtctcgagcatcttcttgtcaggttcttcccactctgcgcaggagctttccccgctgttgtttatctgtcttcaccctccacttcttccctcctctcactttcgagttcttcgccgttcgaagagatcactccccactctcattggtgcattcgtttcgagcttcttatattccagccgcggaagcggctgtcaccattatggttcatcaagtgttcgtggtcgtggtgtcttgaagcaggtcttgtgtagtccccgatcacaatctcagatttgaggaaaagaaccgagcgcacggcattctagtgctttcgaacgggctgtctaaagttcctgttctctcaggcacaccttgcgtactggcatattagggtctttcgagttttccgcatcacggaaattgtgggcattacaaacgagcgctgttttcttttgtgtgccttcactggcgcttctgcaatccacactgtctgccttccctgctattcgccttctcggaaaactctttcgcttcacggaggttcgctggtcatgcactccgtgtcgggcgcagagctgcgcgcgcgtctccaccatctcccggtcttctcttggatgtttctacagaagca

SEQ ID NO: 3662 - DNA, 3394 bp, Toxoplasma gondii
  source 1..3394: mol_type = genomic DNA
aattctagaagtcgcactttacgggagcgcaaggaggctgcgtctgacactcagatacaccagaaggtcaccgttccttgaatgccatgatggaaatgtttcccttttaaggactgttccaccttgccgttcggtgggtaatcccttaaaaaggcggtcgctcggcaccacggaattatgcacggacttctatgtgcatacatttcatcaacgatcgtgtacttttttgtccgtggaaactagtcttgtatttttttcgtcgaaagcgtagttgaacatgcgatagggagcttttgaaacgttcttgttagcgcgacaaaagtggctgctgttctgcggtgaaaaagagacctagtattgcataataacatgtaatggggagtctagcgtcacttagtcatcttaatagtttaacacgccgtttgttcaagtgttctatgtttgctgcctagaccacgttcggtaaagatcacaagcacctggggctctcattctataatgttaaaaaaacttggtgtctagcttcagtagttatctgattggtactgcatgcctctgcgaattgatatccggtgcctagaaacagggtgtgaagataagcgactgaaatgcataactttctgaggagttttgaaattgcaggagcctgctcggtccgtctcgagcgacctcacagaagatgcgctacgtgtcatggaggaaaagaaacgcgctgccatagcgaaacgagaggcactattgcgggagaaacgacgcttggccgaaaaggaaaaggcgttggttttttgaagttcctcaagagacgcgatcgccagctaatggggtatctttttacggtgaaaacccttccccgaagcgtgtacatcaggttaagcgattctggaagcttttggtgtatgccagatttcgctaattaactgaagactctgcctctttcagtgataaaaacgttcactgttcgtctgcagcgtgtcgaacactctgtctatcacagtaactcgagatgtttgttgcgacacccctgacggaggacgaatccgagaactgattgcaaatttcgttggtcaattgggagcacttgtttttgacttgaagggaactcgacaagcgatgaggacgactttgaagctttcgcgactgacagcggttctcacgacgtccaacccaaaagaaactccctcgccatataactaaattcagttaggagcggtcatttgccgtcaggtgtagtatgtggcggggttgagaacatttgcagacaatttgttccccggctcttaagatcttctagcattgtgtgggtgatgtgttacttcgctaattaaggaacacacgcccagaattttcccctctttagggaaggccgacttattgatgtgcgccttcaagcgcgcagcgtggcttttgacgctggtggaaggtagtaacaagatattaacaaacgttacgcgagccatcgggctccgattagttgctgtgatcattttataagatacttgagattggatatcagttttcaaactgttctgaatatcggttcaaagagtaccgcatttatgtggagccgcggacagtgagagaatcggaaaaccccatgactttgtctgatacccgtatcatgagtactcccaatctcgaatttcctgaatatataacacacacactacctcctgaattgttatacaaccggcttgctttggagaaacacctgatcgccgccgacaacccagttgtctttcaaggatcccacctcagacgttttgtgcttttaaacgaggaagtcatggccactggctctttagattcttcatatctaacagatattctaaaacatctaaccgggtttttcgtcgaagttctctggtgacaaatctgaaagatgacacagaagaggttggatctggatttctgtcgtcatttccgctaatcgctgtgtagcggaaggaaatgcgacaagatgagaagctaggccttcgttcgtggaacgggtgtacatcccctcctccaactgttaaaaatgcagtaattgtggagcgattcctcagcggtttatttttacgcagctagacactgtttgccgccaaacagaagacatagtctttgccagctgttagtggagaggacggggtcgacggcgtggcattgagccggatgtttcttcgctggggagacgaagccactccgtacgaaagaaagcgctaatggatggactacgatgccacataagtttccattcccattttcccttgtgtgggaatcccactgctagtgttctggttctttctttctgcgacagggaccgtgttgctggtcttcagttgatgcggccagcgcctcaaacctaatcgagtgagctgcagaccagcgtgcacagacttcccagtgagtttttattctcctttttcctgtggtttggtaagttgtcttctctaaatgtttaccccgggcaattctgccactgaggtgccttttctttcaatgatgttgtctatctcttaggtggagctttcccgtacacctcagctccaggactgcagcggcccgacttccaactgagcgcttgcggctaaagtttctacccttggccaacccgcgttctgcgttacgaactctccgcggatgcacattcttcttgtgtatttctgctttgcctaaacgtatgttccaactcataccgaatgtcccatcgcgtccctgaagtttgatgcttgtagatacggaaaggtaggtgtgttcagcgaggccgctacacacatccgaaccggtgttcacatagtatgcatgcttaatcgtctgattgtttaagcaaacttcactttcactggtacttgtcaagctggtcgtagctgcgttcaggaactcctgctcactacaacttgctgcctgaggtttgcgctaaaaatatgacagagtccaagtctcatctctgtcttcaacgttagaaccactcgcatcgttcagacttaaccgcactctcggaatcttgaagagcgacagtctttttcttcccttttctggctgccgctgcttaccccagctaaaagacctgggtttcaatgttcgacggctgtcaggcatttcatctggggccgtgtcgcgagtctttacgtcttcgatgttcctcgacctgtggcaccgggattcgctgcgcatgtgaatatgcatgttcatgctttatctccacgtttttcttccacttgtgcgtccaaactttgttgcgcactccatcgtttgcagttctgccacagttccacattggctttgctccggacttgtcgtaccggttttttttcgggcgagttccggatcgcaacaagccctttatgactgcctaccaaagcattttggtcgtctttccaacctgtctgtacacgcgaagtttcagctgccacca

SEQ ID NO: 3663 - DNA, 1861 bp, Toxoplasma gondii
  source 1..1861: mol_type = genomic DNA
taggcgtctgtcgaggtacagcgaaccaaattcttcaaaggtttgcgaagtgtcaaggatccctccttcgcctttctttcgaatgactttgacgaccgaggacgaagaagcagagacggcagacatcggagaggcatcggcgggggagacggcgtacgcgcccgtgaggtcgctggactcttctgtgccagctgccggactctctcgagtttcctgggccttagtcgctccgctgctgttcgcctgcacagcttcttcactgtctgttgcggtagaggactcgtcgttttctctctgttcttcgccagatccacgctcctgtttcgcttctcccgcttctcctgtgccccttcgttttttcgccttcaccgccgcaggcccctcgccttccctcctcgccttctttctcttcccactgtctccagaagccgctgcatgcagagattcgcctttcgcctgactgctctgtgtctccacactctcggacatcgcgcgtaccgcctgggagacgctcttcgtccctgacttgcgcctccgttccttctcgacagctgaagaaggagaaagctcctctgtcgaagcagccggctgacgcgccatctcgggagcgaagagaggtagaacaaccaagtgggaggaaaggaacgaagaaaggaaaggaggaaagacctggtaggagggagaggagagagtcaagaaaaggacagaagatgtcagacagcggaagaagaaaagaagggaagaataaagcaactttttagatgtgccttgccgagagatgctcatacatctagacgaaaatccatgcgttatacgagcgaagtcacgctgcaggtacaagaaacaggcatcggaagcaaccttttccgacgtaaacagtgcagataacgaacgcagctacagaacacaacactgcacataaaaaaagagagaacagcgggcaattttttttctcgtcgacgaaagagagcccattgccgctctcttgtggggcgagagctgagagggcgtcgagcgccgacgggacaccgaggaagtcgaaagtctctatcgcatctatcttcgaagcttccagctaaagagaacttttcttggtcagcttcaaccttcttgaaaaataacgaaggaagtaagacccttttcgcgcctcgttcgtccacttttaccgccaattgactatctgtggccgttgcatgcactcggcgcgcctgcgcatgcagctgctaatgctgttacaaacggcaagtcgcgagagaaagacaaaacaagcctttctctctgctcagcctccgaaatctctgactgatgacgaacacagatttgcgcttcaattgtggccgtcgtcacatggcctcgagctccacatatccctgggaagcacccagcgacctttccctggctgaggtgtatgtacactcaaggcggcgcggacgaggccactcgagccgttgagtgttcgctgtgttcgaggaaatggaacgccgcgaaaaagatttcctcttttgtcagtgtggtttgtttctttgtctctgacggcttatgcttgtcgcctcctggtcatttttcttcgttcccctctgtcctcggaatgtgacgcgatccggccttccgggcctctctgttttccacgagtgtgaccctgcagcaggggtctgagatcctgttttcaatgcagctaaaaacggcagtctgtccattcttccttgcaaggaaaagtccccgagtcgatgtcgatttttaaggaacgccactttgcccgcgtcttccacctctgtcttccttcgcgggggttcccccgcatcgtcacctttcaccgagaggaacattctgatcttcgacgagcagttcagacacgcgacca

SEQ ID NO: 3664 - DNA, 2065 bp, Toxoplasma gondii
  source 1..2065: mol_type = genomic DNA
tagagcaggtcctctacgacatcgaacggctgctcagcgaggagctgcgggggaagcagggggacgacggcctcctcaatcaaagtccagtcgtagacctgaattgcagcgaagagagaagagagttctgcgggaagcagcgcgtctgccttcttcactcgatcgcggatgaagcgcctgagcgtggctgcgaggcgctgccgtctctgcgtgggcgacaggtgggcttcctgcaccgcacgcagatcgaacgttggctgtgcaaaggagacgaacgacgcgagcgcgccgacgtcaacctccttcagcagcgcgtacgcgtcgaaagacagacccgccgccgtcgcgcttccgcgctcgtacaaagagagcagacaccccggcgaatcgccaacatcgcaggcagactcactttgggacggagagaagaaaacgtcgccagacgtcgccagggtcgcggcggctgcggcgccctccaaactcgagcacccgggagaatcttggggaaacagcggcgagagagacaaccccctcgagaaccgcgagggcgggccggagtcggacctccgcggacagttttccaggggggcgacgaacagcagagccacgcagactcgcaggagaaacgcggtgtagggacgcgacaataaagactctccggttttcagcggccacatcgtacacaacacaccgcaagctggacagacgcgcgcggaggaagacaccggaaaagagaagaaacaagccgccagcagcaagagacgtggcgcgcgaggcgacacacgaggaaagggaagagagacaacgcagaaaggtgagctctgcaaagccctcgaggatgcaacagctacagatacccagaaaacacagaaaaaccgggcagctacaggtgcctaatcgctacactcgagcgtcacgtcctccccatgctgtggtgtgtgagaggccgaactcggccgccggcggcgctcggcgagtttcgagaaagcgaacagacacgcaatgtcgagacgcgagaaaaaagcgtcacccctcgcgaaataaaaactgttccgccgcgtctcctgaactccctactgtttcgtcgcggaccaaagccaagcgacggggagatacacagacagcccgacagcccgcgagaccgacagcacacaagacgagatcgagaaaggcgttcgaggcaacactctcgacacggacgcacacccctctctctctctttctgcgagtatatacatgtgtgccggactgcggccctggagagactctgaaaaggatgttgcgctcgctcgtgtctcgctgggttccgcagctacttcttctcccgggaaggcaggagtcgtgcagcgaaccgaggattcactcccaacgcggtttgcgacaggagaattcaaagcaagggaccgtttccccgccaggcgtcggctccagacactttgtttcctgaacacaactcgttgggaatgtgaggacattttcgcagcaagagccaagccgtctctgcaaaagtagtctgcgccgtccccccgtaccgcattcggagaccgactttccgcgtgcgtcgaaaaccggagacaaacgggcgggcttccctgcgaacctcggcgacagtgccttcttctctggctcggcgactggtggccaaagatacctcttttgaattttttcgcccgcgaaaaattcaacacacacggatctgcagggcagtttcccctggcgtacaacaggtgtcggggtcccactgtggcgccgctggcgtgctttacccgcggaaaagttgcgaagttgcgaagagtctgctcgctttggcgtgccggtttccatgctgttcttcgttcccggattcaacaccatctcacaagcttcagtacgcgttcgagcgtgtagaactggcaccacaaacctgaaggtctaggccgcaattcgcagcgggcgacggctggtccagttcgccgccctgaaaccccggattcctccgtttttcctccgtctcgaacacacgctttctctcctctctctcctgagcgaagagttctgcgttttccacccccaaacttcgcgaaaa

SEQ ID NO: 3665 - DNA, 2266 bp, Toxoplasma gondii
  source 1..2266: mol_type = genomic DNA
gtcgtccatgctcgagttgtctttctggaactcctccaacgagtaggaggcttccgccatcagcggtacgccttcgcctgtcgccggcctcagcgaggtgtacaccgtttcagccgtgagggccgccgagaggcgccgcgctgcgcctgggtcctggaatccagatgctccggaattcggcggcagatctcgccctgtctcacgcttctcactttcctccgcgcggctctgagcatcagcgaaggcctgagcggcggcctgctccacgtcgtctgtccgcttttctgtgctgcggtccgccttggctcgaacgcttttctccgcgcctccagcgtccgccggcgccgtcatttcgcagcacagacacttcttcggcggaacgtaagacaacagaggcggcgggggcatgctgctgcgatccaaagagccgctgcgcgaggaaatcgaaaggccgacgtaagaggaccgccccatcatcccgcgcgcgtcggtctccgggaggctcgcagggtcctgcggactccgagtgctcttcatgccctccatcaggatacacacaagccacggggtgctcgtacatctgaggaaggacgatatgcacaagtcaagaagtgtacgtacacctcgggaagaacgctggaaacaagtcacgaagtgtacatagacctgaggaagttatgtccgtgttttcattcaagcatttagcgctcgtatcgcgtaaagtcggttttccagagcggacactacacgggacgcatcgtagcaggggcagaggaaggccatgcagaaaaggaaaaacggcggtagcagaacacaggttaaccgggaattgagacaccaaacaaaacggtggccgagtgaaacagcgggcaaattcgcctgccgcgtagtgagtcaagcaacagggagaaggccactctttcatcacagcaggcattcctcaggttaagtgcgagacaaagaaacatacctaggaaagtcggtgacaaagcctaggcagatgcatcgtgtagtcagagccccaagcaaaggaacgtattcgtggttttcagcggaacacggcattaataagcaactgctttgctgttcccttcttttcgtgtataaatcgcgtcggccctccacaagttgtggcaagaaagggggggaagctagcggttgaaaaggcggctggacaacttttgtccgcgattttgagagagcgaaggcggaagttgaatgagctgaactgggggagagaggggatacaaaacgaagcatgtagattgacaaacaggcgccttgctggaacaccgacggcgcgccgtctctcactctgttcggttccgtttttcgtgacgggagacgggaagccgaagcggctgtggaggtctcatgcagaattacatctctgaagccgacgagcagcccgactaaacaaatggcggtacattagttgcagcctcttcgattgtccgctgcgcctctgaaccagcatggcaccgatgcggacagccacggagattcacgaagacggcaaaagcatggaacgttttcgggtctcgtcaatgaatgatgtacagtgcggcgacagctttgtcctccgtattcgctgccaaaactcagaacgctttccaaccaacatcgtcttgcgctgtgtctgcaaaggagttgtgtaccgttttgacacgcgagcctccggtgtactcgcacgagtcacgggagacggaccagttcggaaacgtcccctggagctgcggaaatctgagacaacatccgcatcagaatgacttcattcgcatcggcagtcacgagacaaagcgtcgttagcgttaactcttacgaaaaaagaaacggcgggacaatacgcagtaggggcagcgtcgattgagtgcatgcagcgaaaattcgagctggggtggcatcaggagacgcacgcaccgactcgttctcgtgtcggtgcaattttggagttcttcataagaggatgtatatctttctagttacatattaaccagtaaccagcaaactgtataactttgaggaagtgcagtgacactccgtctcgaaaccatatttagtgtgttcaacaatctccacatgtgtatatcaagaaaggtgtagctttggaaccatacacaaacccactgtccttcgtcgggccagtttctatgcgcagcgacatgtcatgactctaatggtagattagcgactaccacagacgtaactcctttgctggcttaactctgaaccaacatagttagtggctacatcttccaaacaagca

SEQ ID NO: 3666 - DNA, 1932 bp, Toxoplasma gondii
  source 1..1932: mol_type = genomic DNA
aaaaactggcgagatgtggagcagactctgcggagaaaagcctgcaggcgacaagaaggagatggtcgactctgtgtgaggagacgacagagcagagactctcgcacacggagagagaagcgagagaccggcgatgaagaaatccgaactgcgaaagagaggggaaacattcagaaaaaccgaactctcggaacggagcgcatgcagcctggaaatgcttgtttctctcccgtttgccgtaccgagacgaacaggctttccgccgcatttgtggaagttcgaagaaataattggctgaagaagaacagactccatcttcggtttctgaatgcctgcgttttcgagagcgggacgctgcaagggtgcatgcggacgaggcgtaacgaggcgtctccctcttccctggcaacggtgagagactgcaaacgctctggcttcgtcgcgaaaggctttttgcccagcgagacgagcagacgcagcatgcgacagggagagagagagtggaagggagagcgacgaagtgagatagaagaagagagtgagaatcaagcgcagcgaaaagggagagggaagactgaaacgagcaggaggtactttgcacaagagacaaacgaaacaaggactgagaggaaacaggagagaaaaaaacgaaaggaaatggggaccgggagagagacgaggagaacgagatcacagtggcggtgctggagacgagacaacggtcacacagagcgaggagacggggggagaggcggagagaaggaatcggacatcaaaaccagcagggaatgacgcgagacgacaaccggatgaaaggagaagtggaaacaggatatccttatacactccgagactgggaggaatcggctgtgaagactcgactcagaaattcgttcttcggagagctgaaggagactgggaaaaggtccgcagacctcttttcaagaaaggggtgagaacgagaagacccagacgcaagaaaaaaggattctgaaccgcgcgcgatgttccggctcagggcgcatggagaggcggtcgcgtctgcagtgaaagaaagagagagtgactcccgcagaggaaagaagcaatgtgtagaaaaagaaaaggaaatccagaagaaaaaaaacggagaagacacaggaaacaacgaaaaacgtagtgtgcaaccaccaggggggtgcatgcgcgagacaagcgcgcggtgtctctgtttttttctctcacgaaaacgaagagaacgaagagaatgctgttttctccttcgtgtctttctccttcttggccttgaaccgtcgcttcctcgacctttcacagaaaaacgaaagaaatactcttctccagcgactctcacgttccctcgaactcgctatgtctgcctcgcgacctttcgccagctttccaagctgctgtctttgagagagcgttccctccgtccttttggaacgaatttcttctctccaagaaatcgcctccgcgtccacaccccggacgcgtttcggcatacaaagacctgtgcgttacaaccgacgaggccgtccggcagagtcgaaaacaagaactttccctcaatccgcgagaccgtttctgcatgggcaacggaagtcgattttcagttgcactcgaaaggcttctcttcttgtctccgacccaggacgttccgctccccgcagaaaaatctgtttctcttcggcaatcaactgtggatattttggtgtgtaaccgagaaacgctgcgccctcaaaagaagctgtcctgaagctgtctttgaattcacctgagtaatgcagacgttttcgcgagcatgcggataacaaaaaaaaggagacgcatttctttcttctcctctaagaccagcgagaaaacgccggctgcttagggccgcctccaggaaaactggagaaactcgaggtctaccgagggcggcgaggaaga

SEQ ID NO: 3667 - DNA, 3806 bp, Toxoplasma gondii
  source 1..3806: mol_type = genomic DNA
tcttacaccttgaaagatgagtgtttctagttcatccgggtgtcttgctactttctctgtctctccttctccgtgctcctctgctgttcggcgttggccctcccagccagcctctgtctccgtctgtccctcactgggacccgaggcttttctccgcagctcgtggagcttctgctgacggcgcctctgttgctttacggcaacccgaagaaaatggagaagacggggcacacgcacaacgtcaggatagttagcaaacgcctcgacgagagacttgggaggtgggattgttgcagcgacccagaaggcgttttcgttctcttcgggtccctcgatctccgacatggacaacagctgtgctgccatctttaaaacagtagactacgaatgggaaacggctcgagtggagcgtctcttgtctatcaaaactgtatactattggtatcactttcgaggtacagtacataatccctgcccggtcagtaacacgcgaacggcggctgtattgtgggagcccagaggtaggaaaaagcgtctaaacaggtgaacacggtgacaactagggggacggagaggattcgataaaacatggagacaaaggggaaacagtggctggcgaacaggagacagacgacacaagacagaggagcacagagcggtgggaagagcacacgggaggaggggcttcgaagatcttgctgggggagtttgaaggaacgcaagacaaccgctggagctcctgagtacggcgcaccaaataagcagggcgagagtaagtaggcagccgaaaaagaataaagtggagggaccgaacaaagagtgaagagcagacagcggaagctgcctggaggggatcggcgggaattgccacgccaaaaaaaagcagacaaggcaagcggctgtcccacaagaaagactagacaaatcgatacgggaaaaatgttgatgagaggaaccgagaaaacgactcgatgaacaacaggggagatatttctgttcgtaaaagccaagctcgttctacggcaggtgatgcgggctttcctgggccgcgccagtggaggccctgacgattggatgatcagtttcaccaaaacagctggcaataaagggtaggcaaccaggcaagggcaaaaatcagcctcaggcggaagtgggttacagcagtgcaggaaaaaacatagaacgactaccacgataagggatcattcgctcgaattctcctatgtctaaagagaaaatacgtctcataggcggcgcccaggttgctatccgcaaatcgtgttaaaggagaatggaaaatagcggaaaagccacacctgggtaagttcacagcgatctcattttgtaaccgggaaatccggccatgtcgtgtgaccaggtataaagaacgactcagtagtctcatgtttcacatcgatgacggcatccaacacggaaactattcattccggttacgtcattttccactacagaacaacgggtcattttacctagcagagaatgggacgaaatatgttcctgagctgagaagaatctgcaacagtgtgaagcaaaacagactcagcagttcatttcctctgaagattcacgcattgacatcccagcaacttgggctaggtgtgtgtagctcgccaacaaacaatgcgaagttcccactccagacgggcaagtcgctgacgtctgtgacggtttccacagatcgagttaacagtaagcgaagaatgggaaaaggatgcagataacaagatccaccgcgacagaattggagaaaaaaagcgcttttttgttcgtggtcgtctgcgaaaacgggtgtgcagcgcttgcggtttttctgcatgccttgttgcgacaacgaatttattgtcccagacaccgacagtcacagatgccaaagctcggaaacataggctgaccgcctcagggatccactggctgaggaaacgacaggataagcttgaaaatcagtcctcttcaatctacaatatttttttcgcgcgtcattgtggcaaaccggttttatgggcccgtgggtgcctcgggacggtcgatcttgtgcgcagtctctgccacactagtccgttaggaatgaccagatgagcgtttgtgttccaatgaagcacgtgccaggtgtttgtggtgtaagattttcgttgcacatctgtttattcttgcgagacatactggaccgaattgcgaactcgattgtgctgactcacgactcgagatttaagcaaagaagtgatgcacttcccaagagataatcttgtgagcaatataagtagtacaagggaccaacttggagacgagacgggtcgtgattgtacgataccgtcagaaaaagtccgagacactggaatcattctcgagtgtcctgcgttgcccggatgtgtagcagccgtgcccacgtgcgttgaaacaacccgacggtttttgagctttccggatgacatgagaaagtctacgtcacgcaacactcatcagtagattggtgcttctctatcgaccgcgtctgcatcttcagcacccgcttggaacagaagacacacggcctgccatcactaggaggactagtaacagatattcaccggacaaggtaaaagacgatgaacaacgcaagtctttgaggagataggtttcacactggagacgaagaacgcagttctggtgccagcaacggagcctgtgtaacgcacgccgcttcgtgtgtcatgcgcatcataggatacgcggaactgtatatcgataatccccagctgtgaggtggagtagaaaaagtcgatctggccaagaaggagattgtggcatccaaatggtcacctatgctacggacaattcccccaaacatgtgtgtcctcgaaggggctctggatcacgacgcaagggtaaggctcttcgaacacgcaacactaccgcagcttgaaaaacaaagacacacttaatgtatacgatatagggcctcggcttttaggcgtgggatcttaaggataagctttgtctttctggtttcggtttagaatttctagcatcgaatttgtttgcggtgccgaagtttcacacataaatgccgaaaaccccccgttcttacgccaaatggcaggcagatgccgaaagcactcgttggctgtctcgtgagaaattgttgttacaaacataaatatgaaagactacgcggaagatgaggtgatgtccctgattcccattcaccatgacgatggctggatccggggccgcggagagcggaggaatgtctccaactttgtgcccggacgctctttcgactgcaccgtcttcgcaacgtttcccagcccccccaccccccacgacaaccaccactccgtccacacatacccgctgcgcgctgccctttacgcttcgatgctacccgaaactcaagctttgacagtttattgactttgatttggatacagtggccttgggtaggagtcatcctgcaccagtcttgcggagcttccccgttgatgctgtttcgatattagcctgccggaaaccccccccgaaagtcacatatcttgtgcgctaccgatagccaccgccgcccggagttggtcatgtcgacttgcactatcgggttagcgtgccgcttggtcttgccctttgtctgcttcgagcaggaccacttctactccaaccaacagtggacccagatagttcagactgtcaatttgaatactctctttttgtcgacaacacgccgtgaaacctttcagcagctcttccctgccggccgcagtgggtacatgcacataaactgcgttgttacgaaacgtagcactgtctgatcaaca

SEQ ID NO: 3668 - DNA, 4128 bp, Toxoplasma gondii
  source 1..4128: mol_type = genomic DNA
ggccaaggagttgccaggcgagagactttgattgtcgacacttcggcgcgtctcctgcaagtgggtgtgtcttcagaagcctcgctcgaggctgatcgtgcctgtcacggggggctcgtcgcgtggctgcgagccttgcctggatttgcgaaggcgcggaaagccgttggacaagtcgagagactttgtttccaaggagacgtagagagtccgcactactttgtgcttctcctcctgcttctcgtccacgtttttgccagctcgcttctgcacctgctcctcaaacacggagcaggccgcgccgcggcagtcgtcgccgcgctggcgctccttctaggggtgtctgtacagctcagactatccgtgctgatcttcagaaaacactttcccgcgggaactgcgccgccggcgccgacgcttcgcgaggttctctctgcggtttctgcaagtgtggcagcgctgtggagacatctgaagaaggtggggagagcggcaggtagggcggcatttgctgtcggtgaattggggaaaaacgcgctgcatagatcgggactctttgccgcggccccggcctctgtcgcgtttctcgagcacgactcggggcgcgattcgatcgaagttgcggaactcagtgtgcgcgggcggtttcgaaacgctggcgagaatccgttcctatgtgccgtcggggacattcaggaaattcgtttgtctgaagaaactggccaggaaaatctatctcatttgtctctcgatctgacgggggtaaggcagtctggcgacgaccaccgtgggcatttttcgaagaaaacctccggcgcaagaccgttcgacgacgcccggaaccgggactgtccctccggcgtggacgacgctgtccggctttcgtggacgtctctctgctttgaggggtacattgtttcgcccgttgctgcacttcccccgttgctgcttacgccttttatcggcttcttgactggtgtttttgcggggcttgtgggcataggcggcggcgtcgtcttctcgccgtttctcctgctcatggggaacgaccccgtgtccgctgtcgcgacagcatccgcgtgcgtcgttttcacttcttcgtccacctcgctccagtttctgctcataggccgactccccattctttacgcttcgctcttcggcctcgttgccgccgccgcggctgcatgtgccacctgtggaattcacagactgaggcgcgccgtcggcggcagaatgagcgtcattgctgggtgtgtagcctctgctgtcaccgtcgcttccgctctcaccgtgtggagatgcatagaagttggcatttatggcgagtgaagcggagcagaaacggtgaagtagcggtcgagtgtttgtgggatttctcccgcgataggtagtaggtacctcacaggaagacgaaacaaagagccgcttcaggttgatcacgactgttggttcactgactttccaagcacggggtagagacaaagtgtaaggcagaaaacgagttttgacgggaattagaatcttctatatcttcttggtggtaaagacggaggtttagtaaaattgaggggcgagccgctggcctcgaatggttcaggaaaacggccggggaaaatgccactctttctgctggagtccagtgagcggtgcagttgtgtagacggctgcggatgtgggaaaaaaatgactgcgggtaggttagtcgcgctgatcaagatcggggaacattttcgaggcaaatgcacaagagatcttgtggctgatctctttttcgaaagacggggaacaaagcaggcggtacacgcctgaacggatagaaacatatgtggaaagtctgctctcgcgacgcgcgtacgtatacatgtgctaggtagttcaactggatgtggcgtcggcggttcgcactcgtgtccctgcccgtgtaaagaaagaaacagcaaggcaggtgcgggaatcgcggaagtggagggatttgttttggctcatctcatggagacaccggcgtggctttttcccaggtgcggaagcatcaacaaaagatcactgagcgatctccagggtcaggttcgggggcgcggccgaacgctgtcgaagccgccttttcttatgaaacaaactctgtgattttcgtcagcgtaaaatacctctggcaagaggaactaaagggcacttgcccgggtgtaactttcttttcagtgaagagttaccaagatgacacggtgatcgctgtacagagacaacgagctgttaccgcaccgcgtacacatttctctgagaaaaaatccattccaacactggaaggctctaaccagtcacgaagtcaccgctgccgtcgcctctgacaggaaaatagaagggaaccgagagaacggaagaacggagaaatggcagtccgccggtaggcagggaggtgacaataatatagatgatcagggaccggggagcagactttgtgacgcttcttggctagtgcatcaaaaaagcgaatgtaaggtgcacaaaaagtgagagtatcttggctcacttaaagaacgatacgagatgcggtacactgaaatagtgaagaaagcggtttacgagcaatatgcttctgcatcccctcaacgtttacagccagtttactggtaagcatgtagcaacggagctatatatatcaacaaagagagatcacacaagatccgcagacagtgcgttagtttcgctgtattacacacacacagcagaatcagagttttcctgtgttacgtgggggcaaacaggatatctttcagatctaaagggtcaattcgctctgtttctttcttaccctacgtcaacactgccgtcacacccaaaacaggcagacaggtttttttcaaactgtgatcgcttgtcccagttaaaagaacgtctggcacaaggtcggttcaacaagggaacaacccgactcaactggtaatcaaccacaccaccagtattgtgaataatgtaacaacgaacacagagtgcgttccaccgatgagactcccgggtctcagctccgaggaactggtggtgcgcaatgtctccgtccgcctttgattcttaagaaatctaggtgaaggacagtgcgcaatgagtgtggctttttccagaatcactttcattctgttccgtacaacccgtcgaatgttgaagaccaatgcgcatgccactcggaaacttgcccgacgtgcgagtgatctgtttttttcctacgagatacaggttcccgtgaaaatgaagattctaaaagtgaccgcagggtaacccctcgaggtaacataccctgcaacactgaaaactcggcctttcttgtggcaagaaaggccgtttctcacccgctctggtaaaaccgcaagaatccctaaaccctacagcctagacgtcaataccaggaacgtgcgaggtctctaaacaaggaacaggaaggattcgcctgggggagggacggtttttccagagacctcgctggttccatctttgaaacaccggagacgagaaacaccctctcgcgatttgcagcgatccgcgtttcgtgctttgaagtgactgcagcgttttcgtgcacgttctcgtgacctccggggtaacttcgggcaagagtcggaagaccgcatggcccttgcgaggtgctgcagcgaagatggcgaaactagcaagttcgtctccctcctccgctggccgtaagaggagtggagcgtgtcgcaatcgaactagctgcgtggactgcaccggcgtttggttccgaaacttccgtttaatctcatctaggtgtttgcttgaatgacccccctcctctgtgtcattttatccttccgcattttcggtgtcgaccgaggaaaatcgagcagcgtgcacgagctgtgttccgcgcacggtgcgctgacgcgttccaagccccgaagtgaatcagaagaaactggattctgcgagtatattttggtaccttttggggccttagtttaacttggtaactctgatctgttctctcgggcgcgtggtgcaattagtaagcttcttttcgcgggaattcgcgatcccggatcttgcaacgcctggcagcttggcagtctgcgccttccttacggaagctgaccatccgacaggatggttcttcgaaactca

SEQ ID NO: 3669 - DNA, 1549 bp, Toxoplasma gondii
  source 1..1549: mol_type = genomic DNA
catgttcgtgtccaggagcaaatgtccttggtaccagtcgattatcaaactggtgttcctcagcacagagacgcagtatacatcgatatatatatatatatatatatatatatatatatatatatatatgcaggtatatctacatttacccatgtatgcatatacatatttatctatctatgtatatatataaatatatttatatgtgtatgtatacatgtatgcttctcacgcaggtaaatatgaatgtatgtgtacgtgtacatctatacatttatacgaagaaaagttcacgttgcgtgcgtgagaaatgtaacgatatgtgtttatcggagatgtaaaataagaggaacgccaagaaactccataactcaaataagagaaaagagacaacattgttctgtctcgtctggctttctcttatagagagaaccggaaaaggaagacagtttccgctctctcatcacatgttctttcgcctagctgaacgtccacatgaagacatcaagacgcgtcttctccccttctcttcactgctagtatggctcgtgcgtttcaacgtttcctgattaagtatacacatcatgttcctttccactctttctcccccttgttcgttctttctccctcgagttctctctgtctctccctcgagttcttccttccccgtttttttctctctcgcgcattttttctcttcttcacacgtttttttctcgatttctcgccctctcgatttctcgattttcgtgtatgtggtattcgcgtttggtccgctccatctgtgctctcgaacgaagactttttctgaatttccaaagacaacaatcgaagggcaacgacagaaacgaaaaactgggcctcgtcgatggaaggaccagtcaccgcagatgcgactttgcctgcatgcaaggccgaaaaggtctttccttttaaaaaaaacagtgtaacccagaagcgactgagaagtcttgcagatacttcttccttttctgatgaccgatatagaaagaagagaaggatgaagacacacaagcagatgcctttttcttcgtgtctctttctccgtcctcctggatctctcagggtcctttttcgcgtcccgcttctcgtttcttctttcctccgctcctgcgacttctccgtctctcgtttcttgccgtctctcagtctttagccttccattgtgtcttcctgtaccttcctcacctcggcgctctctcgtccttgtctttcttctccctcggttccgcccaactcctgtcgccatctcgggtgcatgcgcgctgcagcaccctcccgttttcgccgcctaccggcaaaaacagaggtgccaagctgctgcaaacgccagtgtcttcgtggatctccagacgcgcatgtggagacacgggcgtctccttcgtttcgctcctcgtcttctgtgttgccgcatgcagacggattttcgcgttcgctgcgaagtacaggctcagctttcccctccgaactctgttgcctgtcttcacgttgatgctccttgcttcgcgcgctcgtaacgcctgctgaa

SEQ ID NO: 3670 - DNA, 2333 bp, Toxoplasma gondii
  source 1..2333: mol_type = genomic DNA
tacgtgatcttgttcgatcttagtctgcccagttcggtgtataaacggaaggcatgtctccttatcacgcgttaattccaggttctcctcgagccgtcgatgccccgaacgccctcatggtacgggggctgtttctcgagggcctgacgcagacacaagagacaaagtggagatgacacagttctcttttcagcgtgtgccccactgcactgttttcgattttggatgcccggtaccagctgatttaaaagcgtccttttgtcgtctgcagagacggaagaatgttcgtcaagtccctgaggttcaccatctcgttgaaaaaggagcgcgacggacatttacgatgctgtacgtttcgctggcctctttcatttctttccacgctgtgcttcacctgactcgagcatagtggaaacgaataaggagttcttcgcctccagattggatgtctagttgaggtggacaatttccaggtcacggcaagagtttttactttctccggcggcctaggaaaaggaaacgccagttacacccccgacacagattgcttcccgacctctgcgacttgctcacgtcacgagcgcttgccctcaagaaaacggcttcgtctacaaataagcaaccacagagtttctagacaggcattctcgtcaactctacgtggtggggcagtaccgataaaagccactgtacggagaagaggtcggaactacagagagcgaacgccacaacccatacatgttacaacaaatgttcatatatttgtagaccagttcgaataccttgttgaacgtgtctgcaaagtgctcctgaatcgtgaatatatatacatatatatcatatatatatatatcatatatacatttatatattatgtacttgtatgcaaacatggatgtccccgcgtttctcttgttttcggagcttgtgaatgaaaaatgtagcggtcaggctgttgttatgtaaatggacgagaagacacaccttttgcggatcattaaatagggcaggcgtgcgaggaaaagagattttttggtgcaatttgaacgctgttcagcagacaacaggcggcccgtgactctctctctctctcttttggtgagtggtatcggcacccacaatatattcaggggaatcccgttcctccttgaaatgaatactattgtgtgtacacatgtcgtattttcctctgattttctctctatgcctctcttcgtggttcctcttgaacctttgtttttctcgctttccaacctccctctcctcgcgttttggttatcagcaggttgaagttccgacgagaagtgtgctgtctcttcttttcctttcgggaacccaggtgtcttctgacagtttctcccctttctcttgccgcgtttttttcgttttctctgtttttttgccctgagtttccggcgtcgctgcgcatgcacaagaaaccagctcttggcgcgagaccgccttgaaaaaacactcgcctgtcctctcgcgccccccaccctcccaccgctcgccgggaggctttttgtcttcctgtctctgcgtttccctctccctttttcctggctgagctttgcgacttttcgggcaactctggaccctgccaagaagccgcgaacggtctgctttcttctctgcgcgtcttcttcacgttctccccgtcttctctacgttctccgcgtcttctgacctcgtcgcatgcaccacccccctcaacagcggtttccccaggaggaggtcggctaaaccatctccctgggccaaccgggaagcgtttttcttcgttcctcgtttcttcctccacttctctctctcacgtgcaagaacgggtgcagattcgctctctttctctcttctctcgtctctctcaagggcacagtctcagcttgctgatacgcacctgctgctgctagctgcgcctcgtcttccaggccggtgtcctgcacagcttcgaggccgccctgagacgaaacgctttctctgcttcttttctgtttcaccctcggtctgcatgtcgctctttgcggtccatgcacacattcttcctgacggcttgtcaccagatgcagatgcgcattgaatttgaaagctgctcttcgcccctccgcagaaacgactgggaacactacggaatgacgcacagtttttcaagacacgcatacatacatatatatatgtatatatatgtatatatatgtgtgtgtatgtacataatccatatacatttacataaatatatgtatatatatgtatatgtatatatgtgtatatacacgttgtatccgatgagggaagcgggcagggggacaagttgcgcgtgagttgggggagaa

SEQ ID NO: 3671 - DNA, 4222 bp, Toxoplasma gondii
  source 1..4222: mol_type = genomic DNA
aaaacgttctgcaaaatggagagccttctcggaactcctagtcgctcccttcgccttcgagacgccgcccatggtgtcagtctcgccggtggcggaggagacgagcttgtgtacgcgaaacagctccacagttctcgctggaagagtcgcagtgatggaaggtcttgatccagaacttgtcctctctgttctcttcaagctggaggcagcgtcgagaaaggcggactctctgacgagaaagaaaaggcagagcgacaggaggcttcgagaggtgtcaggcgaacgcagagactgagtctcaccctttccggacagacgaagaacgctctgttgattcgagcaagaggcatgccgcgcgactgtcgtcggacacagcgcgcaacagggacgttttcacacgtacaaacaagtcgcctgagagggtgagagagagagggcaggtgcgcttcctcgattggattcgcagaaacagggaaacgcgcatgcatcgacgagtgtctcctctggcgacgagtgacgaagcgttcgcctcctgagtgcctacttcattccaccttgactggattctctaccagatccaaagacgcggctgtgacagaaacttcacttttccgccagcgcgacctttctcgcggtgaggaaaaggatttgacgtatgctttctctggatggccttcgagaggcgccagtcccttgaaacgcgccgcaaactggcaaaagaaacagcactatgtcgcttgcggacgcgcggcgcctatgaaaagcaagaggagcccagaacgtctacctggacagtcggaggattgtcgatgtgaagaggacatcgtcaaacgcgtgaagaaatgttttgcgagtccagccacgcacgagcacgtcgactgagaggcggccggcggcgagtcgttcgaaggagggtcacgacgatcggaacgacacaacatgcagcaaagctcgagaaacggaaacgcacgtcggtctgctgcgacgagagaaaagcagcgtgaggatgtgcaccgaagaaatccagaaaacgagagagcgcagagtttggtgttcgggacgcagcctgaggcagtccaaaaatgttcaacttctcggcgagaaggcgacttgtcgtttcaggcgacacccggcgcagaaaacggtctagcgaccgatcccgaatctgacagaaacgtttacggaagaagacacttttctattgcggaaaactggtggaaagcgccgcacgcgagctgctggcgggtgcatgctgctcggccgatttgacagcgaaaattcgcgtttctcacgcacagccactgctgttcccccgtgaaaagaagggtggtccgcgaaaacacgagaaaagtgcacatggaaacagaacttctagaaattcctggacgggaagagacgcggtacacaggaaatcgccacacacagaagtcgcgtgtccaagcaatacactcgaagaagtggatttctgcgtgggctgttaagtcccaacgcaatgctgtcgcctgttcagcagagtgacttcccgcctgttttgccctgcacagacgaaagtctttaatccagtgcgtcagaaacagagcccaatctggtctgcacacagctgtgccgtcagcgttgttaccgtgtctaccttatttgtgtgcaagctgtacaactaccattttcattgctggcgttgccttcctcatggaagtctgaacggatgtttataggtttagtttttggtgtcagcctggcacctggttgggaggtttgttccactgaagcaaccagtctaaaatcgtaatgtttctgctgtagaacgcacgtagggtttcgacatttgtctacaggtttcgttcacacctcatccgtctattcgtttctgacaaagggtcttttcgcagatacgctcgtagtgtgcgggtcgactagggggctggaaaaagctctttcctcgtagacaagcgtttctgtcacgaacagaggttcctcattctgcgacagaaacgcagcgttacagttttgatggatgaccaaagaacccgcttcttgttttttctctgagtggttcccgcgagctgcatgtgtagcattttgtagatcaaaatctgtgaaagctccaaaacacctacccggtcaatttgtgcctctgcggaaagcaacgctgtgaatcttccagtgcgtcatcctttgttccagatattatagtatctttgcaaaatataagactagtcattcgtttcaaaaaacgttgagcgagtttgcttcgcctgggtatgctgctgcctgataagctgagagtatagaaagcgctttatcaacttcaagagcgtcgacacactgctgattcaaatctcaatttgtgcggttgtcaaacgtttttttccctctgctgtggagaggcagagactacacctttttctccatggatagagggttttaagtgaactgggagatcacaaatgcaccattttttaccgttttggtgatacgacgacataaccctaacctaaaagcagaagacagatgcgttgcttttgtggactgagatgtctcatgtggtgtaccaaccacattcaagagaactctccactggtgaggtagttctttctcttgtttgtctggctcttggttggcggtgcgtaaatgcaggaatagcagttaaccagtgcgagcgtcactttctatcgtaccccccgtcgtgttgtctttttcaagagttgagaaacgtttttctgcttcgatagcccgaaagaggaaatgccccaatgcgattgccagttcttggtcacatatttgaattagaatcgatggtacggaacgcagatcaggtttcaaggatttgcattgtgcgtccgcagaaacaaactcctagggaggtgcagtcgcagtgaactctttctgtttgcaggcgttcgtctgctgctacgctgcgcatcccgttttctgcaaagaagcaccccaagcacacacttatgaagtctaactggtgcgtcccgttgcctcctgggtatgtgctttaagttaaaaagctttacatcagtaaagaacacctcagagtcttccccaaaggtcctgcggtctctgtcaagcacgggtgactccatttttactctgcctagcaaattgcccggacgtctagtcgacgtggagttatgtgcaaattggtgtgtgagcggtgggatcgtttgcagcactaagtgcgcgtttccgtctgcaggagcatttcctttctgtctgtgcatagacagccggaacatgtgacttgactaccgcaagtgcttgcgccatcagtgcggctgcgggtctctgacaggtagtttccagcagatagcctagaggctgagcaaagcgacgacgacttgttcagcgtgtttacacatgactttagaagtacgcaatgctgaacatggtggatttccacgtcatgggacattcaggttccttcaaatcggtgactccgattttactgccaggtgcatacaccagcgtttccgacctcatcaccattcacacacaccccgagtgtctgctgctgtgtgtttttctcggttttctctgaggaagtttcctttaaacgttccaacttcttttctcctcagaggcactagaccgccccttctgcaactgatatccaaatggcttctgacaaacgccgagaggtaccttttgcgccccatggccgagtctccccaaagttgctccatcacatcaatatgttacacgtaacgacgggcgatttcgatgaaaaaagttgcggggggtaagcgtctgagcttctttgtctttttctcgcaagcgccacttcgtcttttctacgagacgagaagccaccacgcgtggcggctgctagtcggctggcgaggcgggtgagcgtgggtgtgagacaaccttttcagtttttttctccccccctcctctcgtctgcctgttcgaacactgcacagcgttctttctgtctacttctcctttctctcgaactttttcggtgtctcttctatcctcaacttttgcctcaacaatttagctggttctgcaggaaaccggatctcggttgctgcccttctcaaccacacaaaaaagttcgagttttccgactctccaacgtggttgcttcggcggtgttcgttgtcttgccttttctcgtcctcttctcctcttcttctgatcttcttctcgtcgcgctctcgactgttccccccaatcaattctactttcgtcgcttatctcgagaaaacaa

SEQ ID NO: 3672 - DNA, 2709 bp, Toxoplasma gondii
  source 1..2709: mol_type = genomic DNA
tcttcgcacactgtctcttgaagtccagggaaactccgtcgcaagcgggggcagagggcgtcggcgtgcaggcccacagatgcgccggggggaactgcggaagccacgggggtatgtgcagaggcggctctgcgctccgggtcgaccccggcttcacgggacccaggtcgcccctcgcgggcgcgacgtctgcgtaccccggggcccctggaagagcccctgcgcctccagctgcgggccccaccgccggagaggccccacccgacaggtccacccggggagttcctccaggggcgcctccggggcctgcagctgaaggtgaagcgtcaggcggcgacgcagctgcccctggaaactgagggccagtcccagggccgaggggcccgctccgctgcgcgtcttcgcgccctaccggtgcgtcgtgcggggtgtcaagggtcgcgggccccgcggcgagaggcgcggatacgcctgagaccgcgttggactcctccgcgccgagggggtctgcgggctcccccacgaggcggcggtacacccaggagtcctccgtagtcaccacaagttctgcttcggtcccttcgagtggggggttggtgtccgcctctgcgccgcgggcgagggcggcctgacgcgcgcggcgtcctctgccgtctgcacccaagaggacctcctttggctgcgttccggccaccggctcgacccccgtggtgcggaagagagcggcgtaggaggcagggcagacgtcgaacaaagcttgcttcacgtcgaagtagttcgcgacgctggtgccgcggatgtttgcgtagatctttgcctggcgcccgatggccccgatccggaacgcaagccaagatgaaacgtactcgagacactgcggttccacgctctggacacccttgctgaacatcatccaggcggcactccgctgcagcaacgcatgcatgtaccgcctacgacttccacatacactggggacagtcacgagcgtccggccctgaggcgccccacccgggggccaagcgccggcccctctacccgatccagaccctggaggggcacgggtcccgctggagcctagagaggatccggagagggcagacccagctgcggcgctctcgagagtcaagggcgaggccgcagacgcggggtccagcaaaacggtctcggttctgggtcgaggcaaccctgggagcggccccgtcatgatgtaactagtggcggggcgagacgccggaccccccggggcctgggagtcgagcgcggaagattcggaagcacaccgaccatcttcctgatgttgaagagcagcggagggcgaggcagcaggcacagcctgtcctgagtcgtttccagcgtagggcgccgaaggagtaggtgaagagtggtgggaagaagctggccctgcggcactggagtccgaagacacgtgatcgtcagatgaaacaatggctgtggagtccgagcccccaacggcaccgctttggcaaggggaggcccctgaaaaagggggtgacggaggatacattgcaccacgtggaggggacgcgagacggagagagagggtggagggaaatgcaaaaggcaaacagagactcccgcggtgctcgggaaaaagtggggagaagccgaaacgctaatcttgttccccgcagtgcagaatgttgacccacttttccgaggggtgtgaagtactggggtccttcgggcggaggcagcgctcaggcgacgaagcgacccacgggagacacaccacgggcaggccttattgctgttaacatttcttgcctagaaatggtgaaccagcgaaaacaaacaagcattctacgggtctactccatccggaggtccaaacgaaaaatgccacactgacattgtccaacgatcacggacctagcctggggctcgggcgtacagacaccgccggaacgaattctgagatgagattctcgcggtcgtctgagagattcgtttcggtccgttactcgtcgaatttgaccttgaacggagattcccgcataagcgaattaaatgtagagctggcgggtacccgagcatgccttttggaataaatacggggctgcaggcacatcaacagagagtgtcccggtgtgccagtgtggcgttccgtcgtctctttcctcagcacccccccaagaagtgctgactgctgccttgaagagttcgctgaaacggccagtttgtcgctaaatgttagaccattcagtagaataggtgcattccggagaagagccgcggccgaaggaaaagcaacgaggtacggcaaaggatgtggtgcttgacgcgaggggtcagacggcagtttgtacacatctcaaacaaacattgactggaaaagtaatacacagcaagctggcggaaacagttgcttatgtttcttccagtggacaccgcgaggctcagattctccacaaacaaagcgaggagaaaagccacccgcggtctccagcggagtggcagcgagtacacaccgtgttaagtccagactcgggacagactccgagaggaaaaataggggctttgaaaaaaaagtactggacaagagattgccaacaccgggagaacaatcctgcatgcatgtgccaatgaaacttggacagggggggcaagcaggatggggaaaaactcgattccgtggcagctgcttccacagaatttggggggggcaccacaacagaggagtcccag

SEQ ID NO: 3673 - DNA, 3810 bp, Toxoplasma gondii
  source 1..3810: mol_type = genomic DNA
aaaactacaagatatacgcattgcacaaaatggaatttgagaggtggtcggcaagtgacagagtgacggttattagacacaagactgatcctcagcttggcatgtcgggcaggagactccaaatagatgaaagacgacacacgagaaaagaaacacgaaaaatactaaccgcagaacggaatttttcttaccggatgaaagtcgcttatggacaaacacagcctccggttgggcgcgaaacgcccgcttggtgtcatcatgtagatcgcagggggcgcaaaagggtacgacgaagggaaaaccttcagcaaaacagacacatcacacaaaactccactaatgcgtgttgactgaacaagcactacatgttaaagaaacgaaatacattgtaatcacgaattaacacccgaacggtttctttgctgctcagatatcagccttaccagtttcccgtggtataaaccacctcggtatggtgtatcatccggaaggtcgtgactggaaagaacacggaacgcaatcggtcgttttgatggtggttgtcaatacccaacaaaatgacatatggagaaaacatatacaaacaaactccgtcttgggactcagacgagcaggcaatcccctatacaaaatacgcgcacacgataacgccctttgagatgcactggcattggaggacacacaacgtaggtttccttgtagggataactgagctcatctggatgtgcggtcgagacggttaccacaaacttcggcaaggcctacgatccagtacattggatatacagatggaatggacactcacatacagtctatcatgacagtgtaccacctcgcaacaccattatcagtggggccatctattcacacttccagttgttcaccgtaaacctccacattaaagacatggtctatctccttcgtcattcgctgtacatcgtcattcgctgtacactacaacatcctaatgcaacacgggtaaattcaactttatgcgctggtatacttctttatgtccgcaaaacgtacaggacatagtgccatgtcaggatatcattgtcgtcgggtctgacaagaatatatgggatctgatcctgctgaatagcctggtactctctcatcagccttccgacagcaccaccagcaacgggcgacgctgaggcgaccgctacgcgtgcgctcattgtgtctgttgctcctgtagttttccgggtgatgctacatgacatagaaatccgtaagcgttcgacgttttctgtccattcctttttcctcgaacaatccagatctgcccctgtcttagtctgtcaagtacgtcatgtactcgaaacaagataaatatgacgaactctggttacactggtggcggctgacatgtgaccgcgatcgagagaagccgtttctgctgcaggataccctgcacgaacagcccacaatgaagggcttttgcccagttcctgcagctttgccgagctggagatgaaacacacggaagaagggaaaatcggcaacatgaattatagactcttgtgatttcagccggtgaaggggcacgcaatatgcgatgaatgcaggagataaagaaaccatgttaccactggaggaccaatggctgcctctcgttcctttttcccttgtctatcatctgaccatctttgttttaaggcatggtagcgacagcgaagaagcggacaatgccagaacacctggaatataccacagagataaacgaataaacaaacttgaaacgggagacctgacagcaaacaggtgggcgactgggattgacgtgaagaaaaccccgatgctaacaaggaaggaaagacacggcctccagagcgacggagacgcgcagtaataaatccgagcgtgtaagctcgtgaggcgagggcggaaagccgtgtctgtccggagaatgagggcaggatctcctctgactgaaacactctgccacacaattatttccaagacaaaacaataactgtcacataccatccagcgtcggattgtgcgtcgcacaaccgtggaaactggtgtgcgtctttttcaacccacggtgtagattgctactacttgggggaattttaaaggaaaagatagagcggtgcaacgcttcgaggcgatttaactcttagttttaaaagatcattctgcataaagcatgtatctttcaggatctagacgatggctagcggcaagtagacatcgtagtaataactcttgtctgcgtgggacatcaaaaagtagacaaacccagcaggcaagaggcgcacagcgcagggatggacatgactcgacttcctgtgtacccgttgtcatagactaggcacaattttttagcggcaaattttctgtaggtttatgcggaagaggtttcgtcacctttgcaaacacatttcgactgggtcagccatctcgatgctggaagccttgaggcgagatttaaaatgagcacgggtgacgtatctcgtgcatcgtgcgcgcaactgtttagctcttcgagggtcagtggaaaacccacttatttacggaatccatttatgtacaatgcgtagtgggcgtcggcacacgccgctgtacacggtcctcacccaaatctgcagttatcttgttctggagccacaggtccatccccacaaaaggcatgacgtctatccttagccagcgcctgcagacagacacctgacgttgtgccgcttctgcaaactccgaggcgaaatggaattcgtctttggctgtattctgtgcaatacctacactcacgcggtggcttgttggaacccaactatgctaaaaacgtgcaggcaccattcagtacatcatctagtcgtcatgcaacctgcagatccagttcaccgcgacttccctgtgatgggataggttagcacaacacacagtttggattccgataaagaattctagtggctttttccgaccgcggcttcatcgttttcgccagtaccgtgttacatgcagagggaagacggacaatccgtctgttcgcctcgctgtttactttctgcctttctttttgccgataatacccgtccagttacgttcttcaaagccgtggagttgcgatgcttgggtccctcgcctcaacgcagggaagacacttgttgctgaccagtctcgtctccaggcgtggcacgagtgcgccggcaaaacagcgggaggctctttcccttggtttcctgaagatggccggtgaattgttccacttcagcgtgaatatattagagaatccacagtgagtgcttctcatgggttccttgcgggcaagttggtagaaagggacaccagtcacggctctgtgtctgcattgtgaggttggaccgcgagaacaccgtccaccgcgcatgcgcgacagacgacccttcgagagagacaggattttctccgcgtccctagagacagtttttgtgtgtcaaacatctcaacctttccttggacgttttccgttgagtgagaagttccaggtgtgtggggcacctgcagcaaaaggagctgttacgggtgtcttcatgtatcccgaagcgcagacggtgtgctcgttaacgttgcccgtgtgtctctacactttcaaagctgcgaccgaggttgtcggactgtgtaccggaaacgtttgtgaggaaactccacacagttgagttgaatgcacccttgctgaaaaattgaactcggaagaggacgctgcactgctgtggacctcaattgaagtgcggacggccaatctccggacctctaggtcttcgagacagcgccgccgggaccctttttctgcggattgctgctcactcacttacacaa

SEQ ID NO: 3674 - DNA, 1587 bp, Toxoplasma gondii
  source 1..1587: mol_type = genomic DNA
gttagccacgtagcaaaaaggtatcacatttttagactgggtggtgctgaaatcaaaccaaatattccactaaaaaatcgaagttacacggtagatttgtcttagtggcaagacagagcgctgggcgtttttcgttctggcaggatccggtcgactaggaaaggcgctttacacattctctcttggggttgtgcatcgagaaacatggagagacagtgaagagacaggacagtttgcactgaacgtccaacggcgttttcactcgcatccagaccttgactgcttggtcttttcaccgcacgaagagtgattttcaagggtgcagaacaacttttctggcgcacatcgctggcggataaaccgtgcactccttaaccagctgttcctctggcgagcggacagtgatttcaacgaggtgtacctgcatttgtcgcggatttcttttccaatctgtttgcgaatggcgtcgttttccttcttctcgtagtgcgttgcctgcttggcctcgaaatactcgatgcggcggcgcgtactctggtgaatgtcgtcaggatgcagcacagtgcctgggatccacgaaccttctttggggcttggagaaggcggggctgacgaggagtccgcgcttgacttcacagcatccgagtgagggaagcgccccggctcttcacgagacgcaccattgaaggctggcatctcgagaccaggatacgaactctttttgacggagacgcgttaccgtggaaaaatgtttggatgagcgacaaaagagatgctttagagtttaccatgcgagacgggacagacgggagtaacttcgactactggagaaaaccatagcccctcatcagccgcaagggcaacttctgacacaacgcatgtttatacacaagcgtatacaaataggccgactcgaaagtccacaggtttacatacgcctgtagaaaagcatacatacgaacaaacagcgaccgcagatcgacggaaaggaactactggcaccgtagtggaagaaccgccagaattttcttttgttgcactgcgaagttctctgttgatcgttggccttcggccatggttaacaaaagtggccacagctgcgaaaaagcaactcctctagctgctttgtcgaatagatgcactgcaagcctttttgaaaactctcaccaagagatttgcatgcacgcccgccgacagcgcgaaaaacggaaatcggacgaggaatcgccaggcatcaatttctttgaaaacgcacgtcgggtttcgtctctgcagatcaccacatatcatcgcgcgctaaaaacatggggttttgcagtgttttgtgttgcggatggataaaacgtcaaattgcctcttctcgtctctgccgctgcgttgtttctgctttggcctcctagctgttgttttctcgtctgtctgcaactctggtcacattcgccttttcgaactctagaaaatcgtctccatatttgattgagtctcgcgctttccgcccgtctcgcaacccttaacatttcgtttcttcgggtgaatattcgggactggccagcaggaaaaagtgactcaagcaagctggttcgcgca

SEQ ID NO: 3675 - DNA, 2361 bp, Toxoplasma gondii
  source 1..2361: mol_type = genomic DNA
aaaagcttccagcaaaggagagaagtgatcggttgtcggagcggttccgctctgtgcgcagtgccagctccgggcgtcacacaaagttgccttttatcctcatatgttcctgacagatgctaaacgtttatcatatttacttggatttaagatccccgcgaacggcaccacacgagacaaacagagattcatgcggtgtcatcgggttgacgtcgtgtgtttacggaaggcacgtttcttttcggtacactgaatgctgggaaatcatcgaaatctccacgtcaaggagcccatgaagaagcctgtcagggtgcaagtttccaaggttcgggtatcaaagcttttttccgcgactgcctttgttttcctgtggggcgacaagtaatttaagcaggaacgagccgcctgaaaaccaggatttccatgactcgttgaccatacgaatgatgccgtgtatgtatagtgtcgcccacgccacggcgctgcccttctcactctagagcgaaaggtactttttcgaaaaagcgcttcccgtcaagaacagtgtctcatcctgaacgcttttttcgaggaagcgacctcgttaagaaggccctggcgccactccccggggtgcctgaagtacgcgtagcgtttatcgtctctggtggagcaaacaacggtgatggattccctcccacagttcgttccggagcgtctagccgcagattgtcactgttgtcgcacactcggcctgcacaaaatgtctgcatgattgtacctaccctgattcctggttttgtatggaagcagctttaacgcccgaccttgttggatggtaccccaatgactcccgccctagaactgattctgctgaatccagtctcaatcaactacagttctgccacccaaacctttgcagaatttattctcatgacccgtgctgcagcgccatggtcttctactttgaccatgctgcattaaactcacctcacactcgactacacaggtaacaactcctcgagaacggcgttagtccgtttatccagcgaaacaaacctcattgttttgcatgatcaccagttcaagtgccacagcgtttgcggtacttgcatgaagtcacgaagttgagttgtcaagcgatgcagtgacctaagtgaaatgcagacagcttcctctctagatttgaggattttcctgtagtctgcggttgggtcagtagttgggtgcagtgtgcatgatctctttgactcctgcgaatagtctagacagaattcactgcaatttccactcggatataactcacaatcgcttctaagaatcatccctatcatggtagtacgctcttctcaatgggaactaatcacttttccccccagttgtcttgccgccgctacctggcgaggccttgctttgcttctccacacaaagtaatgttgacgactgggaaatatagcactaagccagactgtccacatgcggcagttaagcttcaagaaatccctcttttcccctctcaaaactttgtaatacacggactatcgcgaggcagaaaatactgcgacagggttcttggccttttgccgcgtcaccccacgtcacgatttagccgactttcttccgcaaccgcctgagtctttccacgatattttgagttactggtacggaaatcgaattatactatgagagttgagcgaacaactgcgacagaagtttcgctagtttttatcctaaaaaggaaccgtgtcttgcctgccgctgctgtctcgcgcatgcatcggctcgggaaagttgcatgggggcgccagtcaagacgaaatgtggagttcttcgctacaaaaagagcaagatgcacatattttttgatagcaagagacaggtaaatgacaaggacgactattgccttgagagagaggcaagaccgggggacgaaacaagcaactgtcgtcgtgaaggcgaaaacaaagccccacgatgagtcgctgggctgctgcagccgccgctgttctgcattcgacttggtaaacatggagattcctaccccgtctgttgacgcttttctgtcgtgatgatatcacctgtatttttaaatgggttgtttcgaggatttttttcctagcgtccgttttgcccgttttctcccgttacgaaagatcgcagctctcaattgcaggtggctgatgaccatgtaacactcgaacggctgcgtttgccgtctacccccagaattttcggaagggttcccgtttccacttgtttttttaagccttctttatttcacccagttctccttgtcgcatctgtcacggtcttcttgcggacttccgcgacaacgcgcgaagcagccaccacctcgatgtcgagtatcttttgattgtacca

SEQ ID NO: 3676 - DNA, 4320 bp, Toxoplasma gondii
  source 1..4320: mol_type = genomic DNA
tcgagacgcatgcattcgaaacgctttgaaactcggaaaaccttactcgcttctggtcaacgaagaactgcggacccgcagggggccgaggaacaacgacatggtgtgttggcggcgggggaggaggagcagatggggacgcagctgccatcttttggaaatcgaaggagtcgacagagagcagagagctgcagagaggagacttctcttggcgacgtgagcgccttgttgacaccgctgcgtccggtgtatctcgcgtcttagaaatcaagaaaaacgcagaaactgcttctacaatatccagagaagcacacggagagcaagttcgaaagtggacagaaggcactgcgagagaggacgagagagaggcaaggaagggagacaggcagcaggaaacatggagagagaaaaagtggaaagccactgcggtgagagagacaacgggaactccagaagtttttttttcgcgaggtgcagacagagaggagaagaagacaaccgagagaagcacagaaagaagaggaaggagaggagggaggcctctttcagaggtcacgagcggccttcagttctgacttgaaaatacgacggcggcggaaacagtgaacgcaatcgagagagtcgaacattttccctgtgaacctgccttcctcaaatgaaaagacaaacgagcgccgtttctgcgtctttcgctcctcacaacgccacggcatctcccggaacgcggagaaaaaacgttccgggaagtgcgacagacctgcgtggactcggtggtggaaacacagcgagaaaaaactggcagcttcggtcaacgaggcgcgtagtcagcacaaaagcacggctgcatgcgctaaatacgactagacaagacagcgcggacggagttcgcacgttgctcctctgtcgaagaggagttgcgtcgcggaaatgtggagagaaaggagatcggcgaaaaagtgaagagggcgacaggaaagagcgccgggcaccggacagaaggaactcgagagcctgcgaaaaaagagctcagcagcgtcggcgtgaaggtcgaggcagcggcagagaaaacctaggaacgaccggagtaaaccggtgccttcataatgaggaaccgacccggaagtgaaggctttcgtggagacatacagccggagtctctgagagtgagaggtgctgcaaaaactcggagaaaatcgagaccatttagcaccgtccttggttctgtccatgcatgcagtgtggtggtcgaccccgagcagcagaccgcgagacacacacagacacctaaggcttgcagggcgagaaaagatactgaatgaggtaaaaacctttcgcagtcaggtataaacgtagcccagttctagaaatccaggaaaatcttcttttctggagtcttcaccgcagacacacagcgcccgccagctgtccgacagacacctcgtttccctggaaacttgcgcaagcgtcgcaggcctgaagagcggatggcgggcagcttttcgtcggcagaaaaggcaaaggaggcacgtttctccgagttcttcactcgtttctgtctacctaaacacggtgggattgtgatccacctatgcaacccaagacaaggcggcgcatgcgcacaggtcgaaaccaggtgacccgtttcacagcgtaggtacttcgtggcagacaagtcgtcgagatagaccaaaacgcattgtccaccgagtgcacactcctcccttcttgccgctacgatgtccgcaacgtgctagccgccatgttgtccatctactctatatcgggacgccaaaccacccctgcggcagatcgaagtgtgttggacgataatatagaggacctcaagtggcaaacgcggtagcacctggatcccgtaaacaacaagcttcaagaactgaccaggagtgtgcgagagtcgatctcacatacgactaagcggttccatcttcactggatgttctgcagcgaaacagcgtcttgacggctaccgtggagctgcagaagttcgacttcaagtctcgtgtcgaagtgtgcgcgaaagtagcagtgcgacgaagtcgaaacaaagtcgtggctagcaaacaactgttgaacaaacctttcaacgctgccgacgaatgtcccggtaaactacagttgtgctgaaaccggaatgtcaagtagggaaacatcgcacaaggattctctccaattgaccatgttgaaatccgacactttcagctatcacaagcggttctttatggcgtcaatgtatatagcgaaaagtgtagggagaatccgggaacgcgtcctgcagaggcttttgctgaaaagggaggccgtcgacagctctcgaggaacagaactcgctgaggcccgtagtgtgctcgcctccctgcttgaaggaagaggctttcgaaagcaacaattggcggtaaatcctcactgacgaccattgctacgtttgtcgtcgaagggaatgagcttgctaggtggcctgaggcgtcggagaaaagttccaaaacgcctcacccgtgtttgcggtgtaagttgacacaggtctgctcgtttgttcgtggctgtgacccactttctgtctctggaagttgagtcagttcgtttttcttgaccgaacgctttgacggtctggtgaaacgccggcccttaccattagagggttctgactcctggtgcagatgacggcgtcggcacgagacttccgacagcgagatggctcgacagtctagctgacaggaatgaaaacaagaaaggtctggctttcagccgtatctggagtagagttcattacgcttgagccaaagaaagtccgccacaagctccagcacgatccgcgctttctgactgctcttcgtggtctgaggcaaaccgtggttttctcggcgaatcttacctcgcaatttcaaagtcaaatactgacatgttgaagcaaatcagggggtacaggtcacgactgagttgcttctgttctctccgttgcaatcggagactagttcacaaatcccacgcaacacaagaggaattcggatcgtttgccgtagctgctgctagtacgcccttgaagtggaagcgcacacatcaggaaggctcctgcgtagtgttccttccgacagcggctgtcacggaaatgagaaagtcttcctgtcacatggagaagaacttctgagcggttctgttcctccccggtttacatgcgtctgtacatgcatcacgttgccggcggagtgaacgcaaaactgcactcttctgctaatttctgcacggtcgggttacgccagtttgccaatacacagctgcgacgaactatctcagctcggtctgcaagcgatctgctctacagtgcggtttcgaaagaatgggaaggtcgcagacaacatgtgcgtcgactgagaaacattaccgattgtcgaacggctgaaagaaggccgttgtcttgcacgacgcaaacgtcgtcgagtcgagctgtcattttcacatttagccaaagcaagcgttttcctgagtcgaattacgggtcgcctgtctttttcgcaagaattccttgtcaaacttggatgcttgttgtccgtttctccacaagggaaacgctgctttctgcgctgaagttcttctgggccccttgcgtgagcagcgcgaaaacgggtgtccgagtaacaagccgaccaccttggcggtcttgagtcacgggatgctccacgcggcaagacaagactccgttgttttgtctcagaacaaatcttttccattggagggtgtcgccgatttgaaaccctctgtctagcgttaattttgtgcgttcgaaagcacacacttttacgtggaacagcgggtgaagtctcccggtcagaagcttcccgcgactttttttgagagagtcttctggccgatctgagcacaggtagatgattgtgcggtagatctcaccttgaaactgtctcgaactttctttttttccgacgaaaagaagcgtttctctttgttcttttacgcaccgaacacagttcctctccacgttgcttccccatatccacaagacacgccgtgggtattcccgtggcgccaccaagccccgcgcgtttgtgtgagagagtcgctgctgcgaagaactccgttctcgcacctgcctttttgcagtgttctgcgggaaactgagaattttcctgaagccaccaagggaacccttcccttgctagcgtcgtttctgcgcagatatctcggctacacgtctaccacccaccgggcgtcttgcaaggtcaggaccgtacactgcctgcagttctcagagcctcgcagaactagctgtttccagaatcgtcctcacca

SEQ ID NO: 3677 - DNA, 3972 bp, Toxoplasma gondii
  source 1..3972: mol_type = genomic DNA
gaatgtgcgtgccagtgggatcaagggatccgtcgcatcgctgtctccacgtaggaggctgtagagatatcgccaagtgtgttcgtcttcgagcctcgctttggaatgtcttgcctctgtcagtgtaggcagacgcgtccggcgtcatctgcggttccgaagagcacttccggtggtgaaaataggaaaacaggagagcgtcttgtggagattgacgagacgataccggaagaggcctaggtcgccaggagggccacagggagagtaacggacttcgaagggagagcgtgcatcgttttctgtacggcaacagcgatgcattcgagtgattgtgttcgtttctatgcagacgattccggaacaactgtgtgatatctcacgcggtgtgcacctaaagttcgcgcaggctgctccttcggcctctacgagcggcagtgctagtcttgacggcggcctggcgcttcttcagttgcttctcttttggatttttccgtcgatgtctttgcggcctgccattgctgccctctctgtgcaccggggacggagcaacacggccgtttgcttttgccaccacaagcccgttgaggtctgctgcatctgctcctgctgtctcgcaagtaggctatcgaaaatcactggcgctgccacgccggtgtctagggtggcgacaaacaaggtctctaaaaccccagatattccgcgcgcgacgtttgctccagcctgtctgcgacttgctctgtcctccactcgtcggcggtgaggcgcctcaggaggcactctgagcaaaatattctgattctggagaacctggcaatgcggagagaagcggccatattggctccacgcgcggttgtggacaacaggcacgtccacccgggtttgggtcactccgtaaactggcgtgatttcgtcagtcgaaagtggaggcaaatgagtgaatttgtgttcatgctcgtacacatgtgtgtatcttctcccgcagtatactgctccgaaaaggacgcacagacgggcaaagagagaatctcctgcgacgtgtgcaagtgagttcggggtacagcaggtctcaatgaatcctagagctgttcggtctatggtgaaggctccccgcagactgttcgatatgtagcaaatgtcagtgcaggagtacgtgcttaggccactactagtattcgtgtctcaattcgtgctcgcgggggagcagtccttttgtggcgtctccgccgcccactccccccacttgcaattgtggaaggaaccaaacaatcaagggacttccagctattcatcttatctgtgtctctctgcgtgttactcgtgctgtaggtcacgcttttctcgaggacttttaaagaataaaatggcaggtggagtggatcttccaaactattaacagcgagaggcggataacgttcccggttactttgcgtgagaggacagtttcgacacatgagcggccgcctcgcacctgagcgtagaacgctcgctgtcgcgtctgtctccgcgagactggcatgggtgtaacactgttgctacacgaggccatgcagtcatttagctcgagatagcttgactgcggtccatgcccgaacggctatccggatgccgctgtgtttctgtgtggtggccagtcaattgccacacgccagcacctggatgtggggccgtgtcagggtggttgtctcatcttgagctgcgacaattccgtgtgttactctcggattcggaaatatcgaatccttgctgcacacggcatccattactagtagatggttatattggtttctttccacggaaaacacgactgtcgtccaatgaatgaagctgaacttacgggagaaaaagcggctgacaattgaggtgcactcatgaacgagttagacgacagatctccttgcagggctgagttagttacggctcacacactaaactcgttggccatttgtcgaagcggactttcactggtacgatttatcacgccctttttgaccctctgcctgtctctctgtaagcttcgatgttagatatccggcttctgacagcatcttaccgttgaatacgcactcaaaaccattactagagtttccttaggaggtaggtcgctctcttcacgtattggtagagccgtacgttcgcggtcgaagttcaggtcggattcgccgttcacgcttgacccgccgcgacttgctggcgagaatgcgtgaattcctggtttatgtaactgcaggaactctgcgcgatacggatgagcgagatcttcggaaacggaagtgacagaagaacctgtagtggagacacctattccgtattgtgtatcactttggcgtgtcagcgtggggggcggctgacgggctacagccgatgtttcccaacatgtactttcttttggcgccagtttcatgattcaaatgctttcagtattcatttagtcgcgcaggtagccctctgctgccctagtgcttcgaagtaggaagctagttatcggcggcccacagaagtctttccacagggacaagctcagcgagttgagccaagtccaggttttctgccagcttcgtagcgtcaggtgtgcagttagactatatacccgtccacaaaacggaggaagaaatgcaatggaagataatgggccttcagctatctacgtagtcgctgcgactgaccgaggtcagtcgccagcgttggcggtcgtgtcgcattgttacaacacagtgactgcttcatccgcgagggggggagtccaccttcaacacatgggagcaagttcttgatgaggcgtgtgatccccgcaagcacatctcttccaagtggcatagaaagaggggtactgatcttcacaattaagagagcttgcatgggaatgagtattctgtagagcccggagacttgttcccctgctccacggacgcaccagttgcccagtgatgcgcgggaatcacctgatgatggtaggcactgactggacgcaatgaacttcaaaaacgatgccgccttgaaggagaaactcaaaatgcgtgaagtttttctaagctcatgacgtgggaaaattgcagttgccgtgtgaactgaaacacccaagcgcagtgtcagcagcgaccggttcgaagtgacacataaagtagagcgcaggtgtgctttcggcccgttccgtcacaaacgcgtttccggcgccttggtccggatatcattacggtaatcgagtgccctaccagacctggcttattttgctgcccacgtcagaaggggcttgcccgcccgaagagattcaacacgataaaaagtggtcaaaatacgccatcatgagagtcatgtggacgccgcctgatgctcgagcacaagtgaggaacagaggcgagaagctcctgaccgagggtagcaggactcgagacgcgtagactgacgacgctcaccgttgtagacacatgttacgctggttttggtgtggcaggtgacatcgcgaacttgaatacacctcaggtagtttgtcaaggagcaagaagaagaagaccgttccacatgaatcgctttcctgaacgagaaatatgtgccgcttcactcggagcatgccttcgtgctgcgtcaaaaacggtgctccactcggtggtccatcggtcaacttcggtgatgcattggcttccattactcgacaagtgagccaaaggattttcgttattggtgttcgtcacaatcttgatcattctgcatccaagtgggagaatctcttaacagaccgtgcgatggcaaacgatttacggtcggccttccgatgtttcggcagcatcaggaagcgcgtctggccaacttatggggccagatcaacttttttactagtttcttgcggtttgtttaactagggatgcctattgttttttcggctcccgtggcccgcgtagagtgtttggttgggttcaagcacattctacgtatggtggttacgaacccgctggggcgtagcatggcatatccagacaa

SEQ ID NO: 3678 - DNA, 1827 bp, Toxoplasma gondii
  source 1..1827: mol_type = genomic DNA
gggaaggaactgagagaggcttcgaactccatcttcagacgaagaaggcgagaaacgtctctcggaaaacgagcacagacaagcaagcagctgccgttcagcttggagtatcgcttcgtctcttgttccctcgccttccagctctctgcgccgctgcccagttcacagacgcgccatgtctcccctccaccacaacttgctctttcacagagagaaacgaactcgaaaaagcgtcacatgagatacatacagacacagctacacatacgtatatatatatatatatatatatatatatataaagagagagggaggtaactgtcttggtgcagagatacaaagatcagtatagatcggtttctagagctaaagagcttggcagatatgtgcgtctgtttgcgagggcgagtgagcacccttctcgggtattcccttgaagacaggtgccgctcttccgacgttttggcggagaagttgccatggaaagctggagaggagacggcgaggagagtgaggacgaagccagcgctgctggtggaggctgtcaagcagaaaaccggcaggcgagcaggctcctggtctcccgcggcttcacctgacgcgcgaggtccaggcgtggacagcgggggagagaaggcggcgagctgcgactccgagccggcgaagaaaagaaggagccgacttaagtggaggatcctcccgagacgaagaaccctgcaagagagagaggaaggaagaaaagacgaagatcgcagagagcgaaagcgacaagggagaagaggagacaaggaaaaaccttgtctctttcctctgtgatacgagcatcaactcagccgctgaattcgcgaccgcgtgcatgcacgaaaaaaatgtgctcatgcaacagagagaggcatcgtgaaaagaagaagaaaccttcgtcgttctcggcctgtgattgggtttgattctcttcggcttttagttgctgcgtcttgggcgtttaacggactaaaaggcggaggtctgtcgacctgcatgcccgaggaaagctctcggcctctgcggcctctctccagttccgcaagtctaagctcgaaggactttttgtgacaaatgcgtcgctccctgttgatgctacggtagcacactgaatcctgaaattatcggaattgtgtataagcagtccgcgaatgctgcaaaaggcttatggaagtccccagcgacgccctttcccaaattcgtttctctcgattcgtgtctccttccccatcgtccttttctctctttctttctttttttcttcctttctttctttttgtctccatcgtcgtcgcttctccttcgcgctgtctctgtctctttgcagtttctgttctcttctacgtcgcttcgccttttccttcgtctcgctctctcggctgctgcgcgtcgttggctgtgtacagctcgtctactgggagtcggtcggaagcaggcagatgccgattcagaggtgcagactcgaaatgcgttgcccttgtcggcgacgtcccttgcctcgtctcgcgcgcgttgccgcgagcagcgagaacagaccggctgctgcatgcggagaaaagcgaagaaatctatactcgccgaaaaggggaaagccgcgcctgtcagtggacttcgtccattggtaagcaagcgcgcgtttttcggtctccaccacgacaacttctctgcgcgctttgcaagggagtttttcatcctcatcttccttctttttaaacgctggagacaggtggatcgtccttcctcccgcgtcttccttctcggaggctctctccggcctattttcttctgtctcctttctcaccacca

SEQ ID NO: 3679 - DNA, 4486 bp, Toxoplasma gondii
  source 1..4486: mol_type = genomic DNA
cttttgttctttgatatggtcgaaagggcaaccctctttttcacgctaccacaaccgtgcagttgaagcagctcccgagttacagccttggtgacgtgtgcccgttgttggttgacaccagtggaaaggccgtcagcaacacgaaatcaatcttctaacaggagctggtgctgaagctgccgccatcaggttcacaaccagcctacaaccgtcagcattatcgagagcaaatatattcagagcgtcggttctgcgccaaacgccccccccctccctgactcagtgcgtgctcgatactgcaagcatggttctagcttgcttgaaactacgaaaaacgaacctctgtggagacatgcgataattgcagaagtcaacctacatagacacgacgtcgggatatcactggaaagcgctgtatgagcacaatagcttcgcttcgcctgcaacctcgcgcagtacaggttacataagaaacgtcgtgtgccttcagtttccagttaccgatacctctcttattcgccagttgccctcgatcagccttcagagcaatcttctacagaaaaaggcgacactctcaattcccttgctgtgctaccccacacagaacgttgtcgcacgacgtcaccacgctaaagttctgcaacaatgatccattgatggcacgaaaaaaaatccagcacattgtctgtatttactggcttccatgcttctgttcgcagaaatccgaccacactgtacaaaagcatcaacgatacacggagcacggaagaacactcctacggcgttaaacgattcgcaagagttcgcacccacgccaacaaattcacccaagctggaacaaacatgggtgacaaattgtttgtgcccggcacaacgacactgtcaatgacttctcgtgacacccgaaatctccttcggaaaggcgttataggagttacaaaaatacaatgccagcatatcaaacagcccctctcccggaatttctgtacgaccccttcgaacccctgcctgtcatgcgggaaccccgcgaattttatctgattacaaaacaggtttcaccaaaatacagcaaaggagtcgcacaacaaaccatggaacactgaaaccggcgagcattgcgagaggacaatcgccagcgccttgcggacgactttttgtgccgaaactgaagcagggagacccattatcccattagagacgacagtagaacgcagtcacaacggcgatttggggaacggcctactatgcgaaacatgatacttgtattctaatcaggtataaaaacgtggaacaggcgcgtgaagttttattctagagtttcgaaggtatagctaagccctcagcgtaacaacgtttgctgacgctcacctgtgtaaagctgcgtcgcatctgcgtgcccatggggtaacacgcaactgctgctaccaggaaagtgtcgctactgtgaaatcgctgcttgtttacctgctttccccctgctgacatttgtttcagacaggagagagagagaggtgtccactgggatggacgcgcagcgttcaagtcgattccagcaggtcaaagcatcgatcattcaactcgtctattggtgcctactgaatgctaccatggtgcttccgatattttgtgtagttgtatgtatggtaatcgccaataatgtcgccggaatggacgcaggcgacaagatccggccttctggagaaggggccgggaataaagtcactcactcgcaaagcgaaccccattttggcgggccgcatgccattgaggcaccactacaggccgcgagaagagatgacagaaagacatcgaatgaggagatacacaaacaatcagcgagtgatgacacaacccatttggaacttgtccgccttcgaacagaaaagaagaagcaaccggggggcgtcacgccatggctaagacgacgctggatttatgccgccggtgttgctacggctgtgctactgggagcttacggattccgacaatttcgtgagcggcggcagcgacgcgaccaggaggccagaactcttgcaatggctgcaagatacttgcagggccgcgcggaagcatcgaggaggattgagagagaacttcagaagaaggaacgagatgctagttggtttcttccgaatgctaggaacgccgagatcgtctccaagggcacgccacgacacgagaaagagaaggcagacaagcaagcattagaacggattgtcgaaatgttagagacccagcgaatgagagttgctaaaagcgaagaggaattacgtgctgcacgcagtctcctcatcagggaaaatcctcaactagccacaatttctttgaccgaacaggaagaagcagacgccgccgaacgtggacgagtgactgaagcaagaggtttcttgaattattaccttccagagaccgagaagttggaagacgatttagtacctgaaatgcgtgagttcgcgggtgcagcgttgcaagcaccgaggggcacgtctgaacgacgcgagtttttaaagaaggcattgagtactgctaaggagaggacatctagaagggtgtggatttacgtttcgggagtagccaatgacctaccgacaactgtgggtgtacaggcctctcgtttagaagagcgccttgggacgagtcaggaacttcaaccggagtacgtcgctgtggccgaacggaaattagaccagctgagcgagccggaaatttcacactcagatactcaataagacagacgttgaagcctgttgtttgcggtcgttttcacatgtaccataaagagtcaacataaggcatgtgctatcccttgtcgtttttggtgccaatctttgaacgttggtgtatttcctcgaaatatctctttgagtcttcaaaggaagcagtcgctggtgaaagggcgtgggtaggggaattacaaaaaaccttcctcgtctcgtgggagaggtgtaatgcatattttccaaggcaaacagtgattcgcagtttcaaggattcacttaagagtatgcgaatgctactgctggcattcattcgtccctggaaggaaatctatggggtcgaccggatgtgacttgcctcttcagagcctacgacaacgtacgtcaacgtcttcagatgaaaaggctcgcttccagcatgacaactcttgtatattggaaattattctttgtagacactcgtaggtttcatgctgcacatcttgtccacgcgtagtaccgccatatgctactcagatgacgcagctctcctccttcagcctgtatctgttttgtgaataaggaacgctacttgcctatgataaatgtatcttgcaacacgctctgtgtctcgcataccaatttgggtttgtagaggtaactcattcagcagacgaaactctcttgatttatcctcgactgctaggtattcacactgaacgctcattcatctcgccgttcaatgccattgaaccgttgccttcgataagcacatcacaccaacaacagcatgtactggccgtgcaactcacgcactgactgacgggttcgaaggtcaaggtatgagtgaccctacgggcacaggaacgcagtggtcaatacgagtgttcatagctctaatgctttcccagtccgtctttgtctgttacttcgtgtctctatacacagcaaaggcctcgtcagtggacagtggcaggggtaccgccaccctttgtacgctgatggcaaacgttaaagtggcttcaccacaaaattggcaccagactggatttgtgtttcatagaaacgggccctcttcgtctcaacgctgattcagacgtttggcaacaactcatccgttaacgcggcttgcagttcgtcagctcgtttcgctcgaggcgtcctgacaaatcgcgtggttctctctggccttcccgacgacttcctccccatgaaagcaaaattcgtcaagttaaaaagagatttctgtacatactgaatgaagtagactttcttgtgagaacagggaacaagactgtgcgagataagaaatttcatcaaggcttcttattcagcgtgaacagaatcccggatcatgcatatggaaatgtcttctaacgcacagtccactgcatgtcgtactcgtcgaatcctagagttgtggcggtgtctcgcggccagctgcgggtcgcagctgctgctagccagcaacaacagaattggtgttttgttgatattgcgacaaaaggagcacagtattgggtggcttgagcaggggttttttattatggacttcccgcgtccttttgttggtttaaatctgaagatggacattgttttggagtagtcaatgcttgaggcggagtattgcctacggcggctgagttcgtgtccggagaagattaccatgtggcaggcggtcgcctcactcaggtgtaacccgcttttgagcttcgattacagatcgtcgatccacatattcgtttagcggttatgagcaccatctccctctcccaaggcaattgttaata

SEQ ID NO: 3680 - DNA, 1747 bp, Toxoplasma gondii
  source 1..1747: mol_type = genomic DNA
gtcgtcgccggacgtcaagctcctcattccatttgacgaagagcacgcagcgccggcctcgcgttgtttcggcgcggctacacacgaaacgaagcggccgcgagggcctcgagagtcgctcggctccacggaggactctcgggaagccgctctccagagatacggcggcgtcacacgcggtgcatgcatcgagggggcgtctgccgcacgggcagacgcagaggagacgaatcgagcgacgccgttcagaagcgaaggcggagcaggcacgcaggcaacggcgtcagagggagggagaagacagcgggcgtcgaaaagaagccgcagagacagcacaggacgccaggacgcagagactcggttcgcgccacgcagtcaaagatgcgacgggaggcgaagacgagcagaacgcgaccccacaacaagggaagacgcgacagaagaaacgtcactccaagttgacgcaagagagagcgtccccggcctcagcgtccccggcctcagcgaaggtggaaagaagatctgagtcgcgcagatgcttgccgcgaccaaccaacttgacacaggtacgctgagatgtcgcctaggaccgtagcgcagagacttgagttgacttgacagatgaggatgaaggacgacctgagagagagagagactggagctgtctcatccgcggctttgctgtctcgcacagaagcggtgagagcactgccttccccgtttctccactagaaaaacgcaaggcgtaggcgcgaccgcgactgcagggtatcgtcaggtcgagctggcatgcagtcgcaatttctacgggaagaggacgaattcgaaacatatacagggacgctggaaagagaaccacgcgcaaggagaacgccgcccaaggcctcaagagaacgggggcactgtccgtcgacaccgtcgccgtacgcaagtctttcctgcgcgggaaggagagagaagaaaaggggaggctgtcggcacagcagcggacccccacgtggagcgacaccgcaacgttctcggatgtttcagtcgcacagctgtactcacacacttgagcagtccactggggcggtggtgaaaggaaaggaagaacttcgtctttcgagtcctcttcagtttcctccgaagaagcgactcggctgagatccacaggtcgccgtggacgtcgactccgagaggatagtctgcaagggcagagggaacttctcggtcgattcgacctgcctcagatggaagaagaagactgcgagttcggtgaaaagagactctctcgagcgcggcgttgcgtgcatgagagcgaaggaaaagaaggtcatgcgaggggcggcctttggcggctttgcggcgggaaggaactgtctcgtctctggccaccaagacgaaggcgctcaggaggaccgcgagaggtccaggaagcagacgctgtcgcgaagaaatacgaaacggaaaactttaggtggagagacgcagcgactccggaagagagaattcgacacgggagaccgcgggtgaacgatatacccttcggcggagaagcgtcagaggaaggaaccgctacggagcatgaggcgaagaagactcgaggagcgggcagaagcgtcgggtccgcagacggtttcaaaaaggacgtctggcaaccgtggcaacttgtacgtctctcgattcttccgctgttctcgctgggtgtctaagaagcgttttctgggcgccgcccgtgctcgtccgcggcgccgaactgctgaga

SEQ ID NO: 3681 - DNA, 1657 bp, Toxoplasma gondii
  source 1..1657: mol_type = genomic DNA
aaaaaacatgtttccgtgggctgccttccgttctgtcggtcgcactgaggcttacctatgccaagttcttcctctgtgtagatccgtaagccatcggccgttcggttgatcgcgcgctggttgaggcccatgtcctcatcaaaggtcaatggtcgtcgcttcttcttctgcccagccttgctgtgcgctgtctcttttctcttttcccttttctgtccatcttgtttcttccccgcttgcatcacatctgcaaagaggtcgtcgatttcttttctagagtccttagatttcttcccttcttcagaaacgtctgccgtcttgtggtctgcaggcccttcagcagcctgtgtgtgaggagcggccaacttgtttttccgagatttctttgtcacggaggaagcagccagagaacgtggctgatccgaaggggagctggaagaggtaggagactgagggggctgtctcgcgtttgtgactccagggagacctccccgggtgtcggaccccaatttccgcttcttctttgaggcagaaggaagaaaaacagatgcgctacgagatacagtagacacagcagacgacgaatcctgtgcagaagctgtcccctgctcccgatacttccttttgactttctgtacgagactggttttctctgtgcgttccgctctaggacagagaattgcagctttcttatgtttctccttctgcgtcatcttcgtctattctttcaaacggttccccacttttctgtcgacgcccaaaccttctctggtgtgaagcaacgtaaaggacggcaaaacagtcagaaacgcgcttctgggggaaagaaatgtaacgcgtttttcggagggaacaggacggcgagtcaggtgaggcgaaacgcgactgaccaaccaaagaaggagacagagaggaacgagagacgcatgggtaaacccccaactggagacaagtcgtcgatcagaagaagctcctacgcgcgaacaggaagaaaaaacggcgatagaaacaggagaaaaggcgagcaggtggcgaagcgagaatcatgggcacttcggagggaagggagagagaggaaaggaagaggagaaagacgagaaagacaacagttgagcgtacgggtcgcgggctcaagagcgagatgctcggctggctggggacggggcctgcagcggttcgctggagcaaaggaatgacacggatttttgcggatcggcagagaatatgcggaaacataatactgcctcgctttttcagtgacggggacttgctttcctttctcttccgtcaatgaagctacaaacaacgagcccgcttcttccgccttttcgcgtacttctggagacccgagcgcacgcatgcgatggggatcgacatctcgtcgctctcttcttcccccccacctcaagtcctttctttctttgtttctcttttgcctcgagtttgcaagacaaagatagccaagacgaacgaggacgcatcagtcagctctgctcttccctccggagtctgtattcagtccttttcgtctgccacctcttaggccgtccaactctcacagtggcgcgacagcggcagtctccagttccgtctgaacagagaaaagagacctgaaactcacttttcaattgtttttcctcgccttgtcctcccctga

SEQ ID NO: 3682 - DNA, 1400 bp, Toxoplasma gondii
  source 1..1400: mol_type = genomic DNA
gtcttaacatcacatctagatctgcagatgtccggctgtggagctgaatcaactgcgttgtccggcgtagaaaactgactggtcagacagcgactgagtcacagcagcatcaccagttgagatgtggagtgtattcgacgctccgatgccacaggtgcagcttctcaacgacacagcggggggaaaggtggaacggaaagaagtccagcttcgcattttcggccgcctcttctgcgtcgtcgtgcctccaccccaggcaagcgaggagaaagaacagatgtggagacgaaaagttcagttgctccccagaaaaaaaaaagcgaattcaaaggaggagctccgctcgcagatcggtccacgacgcgaccgcccgcctcctcgaatcgcgacgaccgaaagacgagtgtgtgcgtctcctcatttccgctccagtcgaaccagccgcaactgcctagaccgagtctctcgtcttctagggacaaccgagaggctcgctgaaaaactacaggaaagaccaagtacgaaaaaagcgacaaggtacgcataagcacaagaggatctaagcgaatgcaatggcgtgtgccatgacagattgaaatgctcctatgcacatttaaatacctggctcagttctcctgcatattttcatggaagggatgctcaagaggaatgtggtggaagaagacagcactgggagatcaggcaatctgcagctgcagcggctctcggagggggcgaacgcatgcagcaaaggaaatggagacgtccaaggaaaccgtgggcgtcttcgattcagtggaacaggtgggaacgagatcgagacagaaagatccgagtggagagaagaaatcgtcgcggtacgggcgcgtttctgcgacgaagtcgatctaagaaagcgagaaacatagctgcacaccgcagaaagaaacgacttggaagaaaggaataaaacgggcaaacgttatggatgaaaaatggaagacacagccgagaggagcgagagttgacaggaaaaatcttgaagacaagatgctttggcagagcagtcgcatgcatgcaagctgacgagactccagtggtgagagggagatacttcttggggtattgtctcttctcagaagaaagaggatgtagaaacaaaggcggggaaagattggttcttgaggcagaggaaacctatcaacgagatgatggggaaaacgcaggtgaatcaaagcatgcatgtggcgacgacggccaggcacagagaccacgctgaaaatccaaggtgacatcgaaagacccacgctggagaaaaagacgcaagatttgcctatctggcaaaaaagaggacgaaaaagccggcgtatacgcttcaaagagcagtggaaatgtttctgtatcgaaggagatctccgata

SEQ ID NO: 3683 - DNA, 1509 bp, Toxoplasma gondii
  source 1..1509: mol_type = genomic DNA
ttcgctgttccctacaggacgtctcataaaccaggaacttcgctacgttgtctgcatccgtttcgcttcacgagtcgtctgatagggactgtggcgcgacgagctggacgcctggcttagttttcgaaggtctttgctcagcgcatcctaattttagtttgttcgagcatcgatacggcgacgatccctgtcgacctagaacgcattccacactgtgcatagtgtaaccacgagggccggggcgatctaagttccttctcggcacagctgtgaatcctgttaggtgtaaggcaagaaggcgaacgctgtgatagccgagaatccagcgaagcgaacacttgagtatgaggtgacgagcgcgttggtgctgtgtgtgtggagatagacagtcgacgaagcctagggagcccaactgacaagaagcgaactggctttttcgttttgcttacatagaaagaccgcctcatggaggaacagatgagaaggagactctgaatccttggggaagccgagaaaaaacgcaagacttccacactgtctcagggggctcgcacaacgcgttttatgagagacgactgagaaaacagcgacagaccttttcctggaggagacgacagacgcaagttcgtcatggtgaaagacaatacgaagccgagaagtcaaaaggactctcggttccctgcagtcacgcatctaaacttttcaagttcgtccccatctgtcttcagccactgtccatgctttttttttctttttgctgttgttgtgtcttctcttttgcacatcaaatgctgcgagagaaattgcgctgaccagtctccttcagctccttcatccagagatttacaaagatatttcacctacacaccgccatacccagtgagatctggaaaacaggcaaaacagtcaaaaaaaacgcgacatgccctgcagacttctttaaagaacagagagagacatcacgatttcaattcgtttggagcaacatgtcgaacgatttctctgaagcgcataccaaggttgtttatactttttgacagacgtccgtatttgtaaataaacatccatttttatgtgtctgtaaatgaacatacttttttatttgtcaatgcggcagaaagtcctgttgtgcatgcgaccgactgcatgcggcaactgaacttttttttcgagtttcttgcttcacttttctgcgttctgtggagcctcttaccctaacctacctgccagtcttaggctttgtctttctttcgtggaggctttccttttcgtcgcgtttcctccctggaagtcgaagagacccccgcgtatccgccgtcatctcaacgagctgaaaggaacacacgggcagcagccgacgacctcatttcttcttcgatttctgccctcttctccgacatttttatgcgtatcttcttgccctctgttgctctgctttccaggggggctggcgcgctctttttctcatcgacaagccgtctttgttcgtcactattttagatttcaaga

SEQ ID NO: 3684 - DNA, 1450 bp, Toxoplasma gondii
  source 1..1450: mol_type = genomic DNA
gcaaaggagcttcgctgcagcaatgtcggtgaaaacctcctctgaaccgctttccgtcttctgcacgctgagcaaagagtcctgaagactgttgtcggggacgcatgccgcgaggcctctctccagaagagccgagacgcacagcgtgacgagaggaggatgttggggagagtaacgcacgcgcaacatcgtggctcctcaagacatgcgagaaaacgaagaaagaaaacgaagaaagaaaatgcgcgcgcgccgtcgaaagttacctgaaaacaaaagataaaagagtcttatgcatagaagatacacaaggctgcacatgcatctctgcacatatgtataaataaatatatatgtatatgtataaacgtatacatatatagatagatacataatagtaaatgcatatgtgtatctacgtacgtagaagttttctatatatacaaatagtatatgttgtagtgatgtaggagaagatggctgtcctaggcatacgtacttaaacgcatatgtaaatatatatttgaataaatgagctgattttcaggcatgtataggaggatgtatggctgtagagacatgtgtgtgtggagactttgccgacaggttcgggaagaagttgaggaaggaacgaggaactggggcgcctcttcttgcaacgcgggggagagatcgacaattgaggactttgactcgaggctaaagagaggagagaccgtctccaaagcgaagactttgaaaagcgaacatggcgcgtttgttctcttactgcagtgtctcgacacctagtgagagactcgactctccgtttccttgcggggcgaagtgtgctcgtaggcgacgcgacaagaagcggatttctgaggagctcctgctctggccagacagaaacccccaactcgaacgtcaacagagagttcagagaaaagttgtggcgagacacggcagcataaagccggttttctgcgttggcgacgcctcggtgtcggcgcccgcgtcttttttgtcccggggttccccgactgtgcatacaccgcagtgcgcatgcattttgacatgcggaaaaatcgttgaggacaaaggccttttctgtgtcgacctcgaagctaaaacttgtttctttcaccttcttgttcttgagcgtttcttcttctcaggcgtctgaggttgcgctcgaaccgcgtccggtttttctcacaacgcgtcggcgtctgacgaggcgttcggcggttccggaggttcacaatatctgcatcgaaaaaaagcgcctctctccactttcttcctcctcctctgaacatctttgctgacggtcgagggggcggagacgcgccgcctgaagggagcgtggaggcggacccgttttaggagtttgcataggtttcagaaggagtctcggcttggctggtgcggtgcgaaatttgcgtttgccacaggcgaaccgcaacga

SEQ ID NO: 3685 - DNA, 2154 bp, Toxoplasma gondii
  source 1..2154: mol_type = genomic DNA
gaacaagaagtgtggaagtgttgtgatttcaaagccgttgtttgcctctgtgtctgatgttggtttcgtggcgcaggcctcacaaatcgaactctgtttcgctggttcttctcccagaaaaaggctgtttttatcaaaagtgttacgatccagactgccaaggatttcggtcgcctcccgttgcctttccgccgcaccttcatggcttgcatgaggcggtggaagacttggcgtctgtcgtcgtccttgaagacaaagacgaatctgaagtcagtgacgcttttcttcgaaactgggattcgtctcgcatcgaaaaggacgaccgttttggactcgcggatacctcttctctacacgaagaagtcgaaggtgttggaatagacagcggaacgcgacaaacacatcgaactgtgagcgaccaggaaacagccagagcgccagaaggggggacagcacacgcgagacaaaccagcgagacgaggggattcttacaagacgggaaacacgcgttgggatgtacggaacggaaagacggcgatttagacttagacgacattttggccgcggtaccagtgtgaagagaggatggtgagaacgcgtgcaagaagacgatccggtaaacaatgaccgtgatggtgtaactcaggactccaactcgtcgcactcactcccgaaacatggggtctaaaatcgagtttcttgattgaaaacgttccacttttccccaccgcggaagcagacttcttagctatgcagaagcgcccgcaaaaaaacagccgttctttttcactcgatctcgatatttgacccaaataatttagggaagactggtttttagtttttaaaatatgatttaccagatttcagaatctgttcgttccttttctgctgttagactgccagagtgtttcgggaaccacaacgcacaactacgccgcgaccagacacatccaccacggtgaaaaaaatcgctcagtaccgctattgagtgctttgactcgtgagcctgctcttgtgaggccgtgcgcagtcaggctggcttctttggtctaccgtgaagctggtgaggaggcactgtaaatgtattcattcgaatccttgtcgcgagtagaacggacgacagaaaactactactcagaagcaagaccacggatacgcgccattgtaaaagtattcattagaatccttgtagcgagtagaaaggacgacagaaaactactactcagaagcaagaccacggatacgcaccattgttctaagcgtcattatatggcgtctacaaatagaagcttcgacataagtcccgtcttctgcgtgagctttgccgcgggtgagctgaacgaatgtccaagaagatatcgacaaggctgacacaggggaacttggaagcggaaaaaaaagagactgcagatgcccaacagttgttcgattccgtgtgacacccataaacgcgttgagacagctgcttttccgatacacgaatcgtcacattggcatgaatagagcagtccgctttccaaatgctcttgaattttcctatttcggcgggtgtctaaacaccgggccgcagctcccgaaaccgactcgcaccgttcaggcgtctgacgagaggacattacaagtgatcttctgcagcaaggctgaggggcatcggagcacaattttcgtcttactcgcagtgatcgcgtgttccattcttttttatagccacgaagcagcaaagttcagcgttctatcctcgaaaattcgtctttctcgcgtggaccccctcacctcgagacgttatggccaccttcctaccgttttgacttctgactttcaccttgaatttcaggtttctgctctcgggctcgacgcttcttgcagccccgcgagtctcaggtttctcgaatccagcatgtcaggcccaaccgccatccaacgatcagctgggaaactctacctcgcattcagacgcaaagactttcaacagtcccgctggtaatccttcaagaacgttcaacgacggctggttggggtggtccgcatttcctgtcggtattcattggtgcttgaaagctgcagtcgtggatcagtagaagcgtcgatatagtccggtagtaaggtttaagatcgtacagactctactgtagaaggtatgtgttgcttgtgaaa

SEQ ID NO: 3686 - DNA, 3164 bp, Toxoplasma gondii
  source 1..3164: mol_type = genomic DNA
gacgtctcttgcgaacctctactcggttggacctcatcctttgtcagttgccgtcgcagtcagcatgcaacgcgcgctgagaattccgacagagaacgaggtgattctcaaagaatgcggaaaattctcttcgggtggtttttcagaccagacggaaaaaacgttcgacgtcgatatggagtccgacacgggtatgttggatgagggtgtgagcgacggggtgccgagcataattcctatgaaagctgaaccaagtcttgggtgaaacagaattggtctggaaacgaaagtcagtggaagaagaggggcgtcaggcttgagaagcagacacggtctacaggcctcaaggggaagccgcaggaaaccggtttaacctctggtgacaaagggcccttactatgtctagggttgttttccggtttctcttttgttgcgtgctctaaaacgaacgagcggttttttttcgctgccactatctttagtcgtcagacagtggaagtggacgtagaaagcgccgcccaattcaaattgccgcgtactatactttccatgaacaaaggagattcgtgatgtcatggaattcctcggtaaatgtgcgcctctgccaaaggagcggccgacgagagctgcagtcacgttccgggcttctgctgccgtgcagtggattcaggtccctagcttccgcggcgtccactgtgtcttctatgtctttaacagcagagggaattaggcaggacagagaggaacaagtttagtctgagaacactggtgccgtttctcgtcacatgtccactctggactaaagagcgttcgctttttgatgtccctatgaggagttcgcgcacagtgtgaagcagcctttccttcagatgcgcgaccgtcctcagatcctactctgaaaacaatcgccagcatactgggctcgtacaatgcgtctacgcagtcgccgcccgctagggctttaactgattcgttcagcgtattgaatgccaggatttcgtgattctagaaacgtctgagactatcgcatgtcaccggtttgctgcgtgagaacggtcagacaaaaaattcgggtctctccaacatactctgacacaaacgtaccccatccagttgctgcagtcaatgcacacaggaagttgcaggtgatttccggagaatgtttcgttcgatgaaatgaatatgcgacgcaagatgccaagaaaaaaatcccgtattatttttaggtgaaactctggaacagcgacttgtaccttggaagtttgcatacggaaaagctgctagacaccgctttgcgaaacaatgctcagaaactgcttaactgaaaaaaaacgtcgacggaggtttgcataggtccgatgttcaatttcagcgaactgatacatggacatatgttgcatccactcaccagccaagattcggaacctcaagggcagcacagcactgattctcctaactatagtgctccaaatacgcaaattatggaaaggaagatactaaaggcatgtactgatttgtttttcttttccccccggtcagcaaaaaacgatatacacccttacccaacggcatgtattagtttgtttccatcttcccttatgtcttctcaacaccagacggcctttcgtttggcgttccgccagctcccagggaaaataagtcacaagcatttatttgtacacccaaggctgtccgccttgacaggccatgggtctatcagaaaatctctgagtatatacaagggtacatcctgtaactcggaccatttgcaatctaatatccactgtgcgttgaaacgatgccacccatcctgagagatacagactgacagaggaaggcatatgctgttgaaatctacaatttacctgatattaaaacctcggacaacgacagacaccttcgaccccctcattctcttagccgaaagttgcgggcagcggcgccgttgctgtgacgcgtggcaaagatcgccaacttggtcccgggccagagacagttcgggagaaggaaggctaggtgcgagaattggagaacattctgtactgagaaatcgcttttctgtgtgcatgcaccgaagttggactctaaagaaagtacgggcacacacactctattcccgagctgtctgtgcagctgctgcatgcgatgcagcagccgccgacagctgtgttacctgtgtttccagagtttctttgtcacaattgtctgtgttttcgcataaatttagattctttatgggccaccagagtgtcattttgctggcttctcctcggttctttttccatgttttccccccgttccttaattcacgtcgcggacgggctcacagtatgcttgaagaaggcatctagctcgggagataccgtttctgcgtggttcgttgctcggaccttcatagcacgcgctcggttgtgtgtgcgcgcgactttctggagcaggaaagtaccgaagagtcctcgtctgcgagtgttgtgtctcaaaattatcgaaacggttgctggcggctgaaccgtccatttgcttcttcagtttcacgtgcgactctgcgccgagcccggatcgcgggggcaccgtcctgcttggtggacagcttgcttcgacgcgttgtcttgctaataacttctaccgtattccccctctgtgtggctacaatcgtcgtatgccaatctgtcttgcaaaaaccttccgtagtcctctctgtctagataaacaccacggcactccactcttgctaacgaatataccatactctcctctgcctgcctaaagtcatcgtatgccagtctgcgttgctccattctatcgtattcccgtctgtctcactaactccaccgtattcctttctgttttgctagactatgttcgcttctactctgaagctcccctctggcgaacgtcgtctgtattccactttgccagttggagttttttatccagatcgacactgaggcacgaccgtgtggctggagagcaaccttgtttctggtcttttccggcgtttatatgagacgggtgggttcccgccctcgactcgctccgggcggcagaccgtcgttcgtcaacgttttcggggcctgtttcggaggtgtgactcgatgactgcctgactgaagctatcgttctttgcgtctcgctaggacgtctcgtttgctcttcgctcaaaa

SEQ ID NO: 3687 - DNA, 2001 bp, Toxoplasma gondii
  source 1..2001: mol_type = genomic DNA
cagcgggtggttgttatgtagaatcgagtagaatgttggcattctctgaagaggcgaattaagagagaaaacgtctgctttgtctaggagaaggggcatgaagtgcccagacagcgtccccatattattggcagaagacttcgaagcgtcgcgctgcacgcacagagcctgtctctgagtctttcaacttcaagacgggagcatctttttgactcgcgtacgcgttcttttgtgaggccaaagcgtcgagacacagagctggactttgtgctcaactcccgcggtacacgcagtcagcgagcagcgtcgcgggcgatacactcacacacagtagttcacgttcgtctgcaggcacagcagttgatgaagcaggaaaattcttttctcagcgtccagtccatgcagtggcaaacagcccgtggaggctcgattcctgttgcacatcgtggagtgcgactcctcggtttctgcccagttttctttctggggtgtgcactccgagtgaacgctcctctggggagattctgaaggccttcgttcgccatctccaagttccacgtcgcactagcagagcatggataatgcgaaggttcgtgcagaaagacgccactcgaaaagctgcgtgcactcgtagagcagaggaaaccatactcatttttgactgtcacctgaggcccaggatttgctgcgcaaacgcgtcgcccgaccaagttcctcatttgtgtacaactgtcttcgtggaaccaatacgaatcgttgacctccgcaaaaagagggagaaacagacttgcacaccgcgtgcgattcctcctttgcagcgacgagagctctcgttggacgcgaattcgacgtactgtgcgctgggttcgtttcggtctacagtgatgtgtgtcgccctgaactaccccccctgtagatttttcatacgcctttagacgtatcttcacgtatcttctgttcgaggaaatctgtgaacaagtacagccaacggacggctaacaggtgcgctgatctcaaatgttgattgtctcgggaaaacctcccgggcgtcccgagtgaatccgcaggttctgccaggtaggaacgaaggcagttctcggctgcagagcctcagccgcttcactggataaaaaccctttgcaaacggagaactgaactcagtgcggctcttctgatcgggtgtctggggaactttttcgcgttgcgtttcgagaacttcgcctgcatgcagttggactttccagcgtccgcattttgggtccccacgacgcatgcagcaatcgccggcgtttttttcttcaattctttccgacagcttcctgctacgtcttcgcagaaggttttcctgtccgcggcagagcacttgaaaacataaggaaaggggagtcttctcacgaacctcgttccttgtctctcctcaactcacaggctcacaaccccatcactggtgagctcgtggcgaacactctgctagcgtcgtctgcatttctctccggtttctatccgcgcgcgccttccgtcaaccacccgtcaaccactgtctgcgagcttccttgtctctgtccggttttactttgccgccccgcttctgtcttcgtctaaagtctgctttccacctttgtcttttgctcttctctcctctcggccttcacagcctgctgcatcctcaaccaaaatcgtgtcgaaagaagtcctttttctaagggatctgcagcccatttctccttcatttccctcagcattaccttcttcctctcagcgtcttcgtgcctgcaccggacacccagctgcgccgctgctgcttcaccttcacacgctttctctcagccgacattcccttcctactctctcctctcatctcctccttgttctacgttctacgttttctcgctgacaccgtcgcttctcttttcgtcttcttcctcgcctccctcgccgtcgcttcacgacttctcgggtgtctctgcgcccgcccctggggtgtacgtacacctgacacca

SEQ ID NO: 3688 - DNA, 3042 bp, Toxoplasma gondii
  source 1..3042: mol_type = genomic DNA
tgcgccgacgatcattgcagcatttggtcggatcagttggtcttcacgaagacgtgtggcgcttacgtgacgtgctatttcctgaatttgctcggcgacaaagtcgctttgctgaagatcggaacagagcacagcataaacgatagggaccatcggtcactgcccacttgttgttgttcagagaagcgaaactttattaactgatttcggttgcgcgtgccaatgggctttaaggggatcagtgcccttgtacaaaacttatattagctaatctcaggaacagctcttccaacctgagaagatcagtactgcccagagacgggaaggcaacacaacgaggcccattttcacaaaaccgctgctgacgtaggaatgtgactggacgacatggccactacttagcgcttcgcagaaagggataatccagtatcctatgatgaaaaggatatgaaccgcgttcgtggcttcggcaaagggaaatgcagtggtggatttggcactgtatcgcgtatttctttatgctgaagactagggcttctgttaagcacaggagagacgaatatgtaagctgcaataatagcttgggactcaaatccgaagcatgccgccatttctcacatgctccaacgtcagctgttgtatcattttcagccactacttccaggcaacctcacgggtccattgcggtgaggaatcaatcaatgcaggttaattctacttcatcggcaaggctgccggaaaattctgacgatagtttggaggctacatggtgacacgtcgtctcagaagtcagaaaacagagcagagcaccttctggtaggcgagcggaccagacgcagtagagtactatgatcgtcaggcaatcggcgattccctgttcgctttttaagagcgcagccgggttcggtctccgtacctcgtcatcttcgtgtgacatcatgaaccccgttattcagataatagcgacctagcaatagatcgcctctacgaatagtacgggtcttcagagaaaaactgcggcgctgagagagagagatctagttgacagaaacccagctgcttctcgattccagcaattgagcgtgctgccttgttttctatgttttgtacgcagtggcagatgctgcgtcacgagcgtagagattccgaacagctacagtgccttcggcacctactgaattgcatttattcaaggaaattaaggaggttgtgcacggtcgttaaaaatgacacctgcgattttctcacagggacaacccgaatatataattacgagtcagattgcatgcgcttgcgaatagcatgcaatcttcagaatattagtacctctcccctacgggtaagcctcatcgatatcatcaaggtgattagtgcaccagtcgctcggagtcgcgtgatgtggtttgtctgggtgcagtaacgcttcagcgggggcagtcgaattggcagacagaagcatggaatcaatgagaatacggatttcgattgtttttgcctgaaggagccgacacccttcgtttatctgagtaagttttgccagggccactatcaagattttagcagccattccacgagtaaattttctccgggggcccgaagtcctgagaacgtcctaaatttgggtgatgcacttcactaggcgcatccattatgtcaaatcacacgactcgcgcggcgtcagagcacaaacccagactacgacgtatgcaccaaggcactgcggagaagcgatagcgtcgcagctcaggccgaactaggatatgttgccacacacccttcttgaaagtgaatggcccggttcttcccgaacaattttttcccttagttcctggatgccgtgggtgacaacgtggcgtctctggatgtgctgtgttttccgagagactaggaaaaagtggtattcattgcacaaaagaaggttcggggagttcgtcgctgtgaatccgaagtggacgtaaatgcacatctacaagggctgacgctcctgcagtggtctgccagatttgctacagagctgagtatgcttctactccaggatgtaagactagggaacccaaaggggtaccagcttttgcagcctgccaactgaggaaggatcacctgtgatggtagttgttgccgtcagttgctggctcattaactcgatttgccagtacgctgttgacagtggcgttttgtggttgttgacttgtgacatcgtctaatcttcaaagagttgtgagagtcttcgctggtctacgtcttctttctgtctgaggcgcggtctgcagtcaaacgaacgcgaaatgacctgcaccccttcagtctatgctccgctaccggaactgactaggttgccatgtaactatcgacccgttcgcctgaaaatgcaaatgcaacatgagaaaccgaaatggaacttcatactccgcagccacttccgtaggagctcgcttagtcacttctttgaacagcgaaggcggtggaaccgtacatcgcaaaagcctcgaacggcttctcacgtcaagccacttcccacccgttacatagaactgcaggaatctcaaaagttcacctcaaacaggtgcaagaacgagtcgtttttgtttgggttatttgcaagcgcgaattgtccaagatcacaccattaagagaggccaccaacatctaaaagcactcgctgcgagacggcttatattcggtcccgtcaagcataatctagtcaggttgctggtgcgtgtgggggatgcattcgaggaggtgcgagaaaaattcgcggggccctttgagaggtcctagtagggaggagaaaagtttcatggatatcggagttgagtcaaaaacgctcgtgggtgcagcagtgtcaccgagcagcatctccggcgcacgctccgtttctgtcaagaaaactcgcttgcggggggacagcagagactgtctccgaacagtgtctatgcactggcacgaaaacggcatgtccttgtagttcacatctattctgtgccccttggcctcctttcttctctgctcttttttttgtcacccgctccatcctggacaaaa

SEQ ID NO: 3689 - DNA, 3870 bp, Toxoplasma gondii
  source 1..3870: mol_type = genomic DNA
gattcacgttctggctcactgcagcagcgtgtgttgttgcggctgtccgaaactcgcgacctctgtttcggctgacgataccaagtctttcgcgggccttcgcggctcggcacctgagcgagaggggccgcacgcaaggaatttgtgttgtcgggtttgctcaggtgtctctgaaaaggtttcaccggaagcggatgcagaacaacttcagatgtgcgtgcgaccggcactacgcattgttggtcaagtggcaacgggcagcgttcgccagacgcaggttcttttggactgctgtgtcactgatcaaaagggtctgtacggaaactcggacgcttcccacgcttcctcagctcccaacacaggcgtgagtggccagccttccatcttgctgttgcacattttgcggattttgctccaccacgagcggaaaacagttagaaaggactgtggctggtgcatcagcaacatcgccgttgggtcgcttcaccagctgcagcaacttttaggcctgggcgttctggaggcagtgctgatgcagctctcccctcgcggagaggaagaagaggaagtccgccgcgaacttctctgggtggtcgtaaacgcatgcaccacagccgaccgagcggtcttgagtcgtctcctcgagctcggtgccattcgccccgtatgtgaaatgctgcgcgtcgcggctcgcactgctgatccgaaggccgcggccgctgcagctgatgccgtcatgtccattcttgagaagtctgcgcctgtggcggagccgcgcacgctcgacagagattgctcagagcgctctgaggctggctggctggcaaaaggcgccggcttccagaagttcacgggaaacctcgtttgctgggatggaaagggcgggaaaactttagattctaccggcctcaccaccgccagctgcggctgctgcagtggagagaacagcggcattagacacgtgtgtgtgtgcacgtgccaccaccttttgctcctgtctagtgcactgcttctcgaagaggactgtcctctgctgctgcagctgctggtccagcaactccagcagcagccggcggatttgtgtccagacttggttgctcgcatcgggcgaactggcgaggcgcttgttgaggtcgcctccgtcgtctctcgacaccaggtaattgttcggcagttgatccaacactaccagcagagccatgaacaggctgctatgaactacttggttaggaaaagcctggcgaaggaaagtcgctgcggatctcgtctgatcccgcgagaaaacggacttgacggggacctgccatggcaagggggcgccgcatttccgcctcagtctttgcctgccactcttgagtgctcgatggaaagtcaccattccgtgcaggtgtcgactgaagaaaaacggcttttcagacggtagccaccagcagtttctttctccatgtgaatctgcctcaacccccttagaatttgtgtatcatcttggcaagtggagagtgttttccgctgacccgagggaagtgtcaaacccaggtgctttcttgtctttccgctcttcgatatcttgggacaaaacgttcagcggagcaacacagtgaacggcacctcgactgacaagccacgtggacacgataacaggcggaaaacggctgcgttgcattttagccaaagatcgggaaccacttcaggagtcaacgtctatatatggattcagaaaagacgttttataccaaaacaaaatggtcgtataagtgtttatatgcagcttttatagctgcggtctgtccgtgcaccacgagggaacaggaggaacaggagcgcaaggagccgatctcagtatgttcctgcctccactctggagtgcgtccttgcttcatttctgtgaaatggtaacaaagaagtcagagtgcccttgtaaatgagagaaatctcacttttttgccactactgggacgcaattccccctgagacggcacatccacctgacgtgtgcgggcgacatcaggctgtgctctatggatatgagataacatgcgggagcgacagatgacctaggatacaggattgtttccagaagtggagcaacataaaaaatcttccttgcagtttgcacaacctccccctcactgcagacctgccatttaaggaaagcatcgcagctgcccgctctatttagacccacaatatgcagcacctccagataagctgccgccatccacagtttcaaaaacgaaaaatggataaaaaggggaccatcttattcaaactgacacttttcagtcttcgtcgcagcccaggagacgtcagaaaaaatcgtggcccaaggaaccagctttcctgcacgatgctgaaaagaagctgtgaagacgagttgccgcacctaaaacgtcgatacaatcacgcctctcaacttttctgaatgtgttttgactccgaggaggctcatggatcgaggcaaaaagagagcgaagaaagtgtaaaaaacacggtatctctgggagattggggattcgtcaaatgccagtttgtgggttgtctattcatcccacggggtcccgccatagttttggtgccattacatccggaaacaatattgttaggctcaaatttcgttaggcagtgcctatggaattatttctcggaaaaaaatatgagaaccaaaaacaaacctgtctccaataccattttttgtatcttagctacttacagggtacttcgtacaaggcttgaatatgtctctgcgtccatctagtctggtgctcggttacacatatgttagaagcgaactctccgcctcaatttttcttttctttggacttcggtggtcggcactgacgctttgctagccctcgcctttggcgacattcagcacccttgtctggaccaagccctttccccacgagcacagccgactggcaccagacgagtgtatggtatctctacgaaacacagcacgccgttactcctcgaggaaagagacacttttaaagaacagagaaaacgtctcgagaagattctgcgggcggcttcaccgctgctgcctttctgcgccatttagaacaaggtgttcgccacctcgtttatggcttatccggccttctgcttcaaaaggaaaggcgacccctgctagcgaccagtcttgtttctttgccaagaggcacctgcacgtcaaaacccaaacatcatttgctcggggtaaaatctgtcgcggactgtctacagcaaatacgctgctttctctgaaacaccagcgaccttgacaagccacacgcgggtcgccctagaccggctgtctgcgagtctgcaaacggcagttagccgaagcgaaaaaccaatcaggcacagcgctggactcggggcaccggtttcggtcagggccccgaaagaacccgtttcgtggcctgtgtcttttctctgctcgaagacgctagctgtgcttgtgtcttgcgctacctgcggcccctctaaatgtctgcccgcaactgctagctgctggtctcgttgaccgttgccgacaagatccacgagagcggcgacaacgagcataccagacccgaaggcaggagcggaatccgagcaaagacacctgtcaaaaaataatccttttttatcttggactcggccggatctgtgtgtcttgcaaccactgcttcgcatagcgctgtcccgacatcccgcagcgccaaccgtaccacagtgttacttctgccagctagttattgcgcagtctcggccaggagccgcaaacagcgcgctggcggattcgcatttctatttccgggaattccaagtcaagacgcatgtcaagtgaccaaggcgtcgacgcgtcgaactctgtgaaagccttccacttgtaaccggtcaaca

SEQ ID NO: 3690 - DNA, 3980 bp, Toxoplasma gondii
  source 1..3980: mol_type = genomic DNA
ctctgaactgtttttgctcggcagcagctgaaaagaacacagacgtataagcccagagaacggtcaatgcagacggacggggagtgacaggacgatgtctctcgtgtcgcttcgaaaacaaaggaaagcgaaagtgaatggaaaaatgaaaaaactcaagacatccgtccagtcctgctgcgcgttccggaacggctgaacgcaaacgctgcttttaagcaaaacgtcagactcccttctcgcgtttctcttcgtcactcttcacacgagtgcctctccgcaaatgcaaaggtgaagagaccttcggagacgcctggcgcctcctgagagttgcttgaccgtccccgccttccacgttgcgagtgttcaacgaagaaaaaagtccttttagcttgagaagctcgaaatcccctactcgattcgtcgccatcgaaagaagctgcttcttgcgacttttctgtctcacgcgtctctccttttgcccctcgtcgctggcgcaactcagaagcgccagcggaggcaatacagcctgcagagccttcgtccgcgaggacttctacttcaggacttgcgcccagcatgttgactcgagtcaaaagagaaggaaacggaggtggagagagggacggaactaggaggaaataaaaaaggaaagagaagagggaaggagaaatgagtcgggagacgaaggtgtatagaatatctcggaagaagtgaaagaggaagcggcacaccggagacagctagcaggagggagagcagaaggagatgagaaaaaatgggtatacatgtttgtaaatatcgatggactgaggcagggaacggaagacaagagaaagaagaaggaaggaaatgcaagaaaagagcaaaccggcgcaaaacagcgagaaaaaacagttcggaaagttgtccgactcaacgatgaagaggggggggcagctctcagaggctgtgaaggcgcccgcgagaaaaacggagatcttcccaaaaagaaaagacacataaaacagatatagaaaaagagaaaataaaggactttcgacctttcttgttcggctcatgctccgcgtgttgtgtcttctgtcacagcgagaaggtcgtctttgcgatgtgcagcacgttcgacggtggacttgagcacacactccagagagcattttactgtctgttcttatgtttcatctctgaagatggatagctgtggattgctttctttcatcgctttcactctggagaggcatgcaggtcttctgcgtgtttttcgtcttcttcagtaatctcatacactctgcagcgcatagtgaacctgtaactaacgccacgtactgtttacgacaaagatactcaggatgagattctccagtcaccacttgacatccgtggaggtcttcctctaattcgttttacttcaggaaagaaacgcctgtgctcgtaaatgcaacgtatgctcagagaactgagaaaacgtggagactggccgtgacacacttttccttcctctctgttttgcctctgcgagaccactctgaaatcccgtgatcctcacagaactaaacccgatttaatttgccagtttaggaacaggttcgttgctttcattctgtgtaccgcccctggtaagatcgtgattttttctctcaatacaagtctcgcgttgcttgtcaagctccttgtgtctactgagattggcacagattagtctggcattgtttatcccagttgagtggaatattagcattgacgtttccattctgtgtaccccccttgtgagatcgtgatgttttctgtcaatatgagtctcgcgttgcttgtatctactgagactcgcacagattagtctggcattgtttatcccagttaagtggaatattagcattgacgtttccattctgtgtagagcccatgtaaaatcgtgatgtcttctctcaatatgagtctagcgttgcttgtctcgccccattcgcacgcgtccatgttgctaggtagtcactttaagagctgaacagtggaacttctattaagatgcacgcagttgagtttgaggctgaactggcagaatgaacggaaaatgaaagccgcctccttgttgagtcggttcctgtttttctttcagatgatttctttgacggaacaaaacgcagctgaatcagaagcccagacatccggcggcactcctgcaagtgattgaagacttatgagatgaaaatgtgttaacacttgtggtcgcctcccttgtgcatcgaacacgttccttgggaatgtatattggtggagagaaatctcattttctctaagtttgcgcaacgagcgcattaaaaaagtcgcactgacagaaggcgtgagcgaactccttccagcttcactgcacactagacgaggagaagagaaagaaaggaggcagctagagcagacaacaatctgaattaccttagttatgagtggatttttacttgccttcgatgcctaggttccccatatctgagatgtggctttaacgcatgcatattgcccgttggaacacgtggaggagagcgatcgtggcagcgccactctcggcgagaaggcaaagaatggagacggtagaagtacaaggaaaagagcctcgagaaaacaggcgtgaactgtaaagtacgaggaggaaagacatagaagacaggtgggactagaatgaaaaggaagaaatgcagaattccttcaactcccagctgagagacttgctaggcgacctagagattttcgtgaacagatggccgcaaaaggcatcgagggaggagcattgcggcacaccaagaaaagaaaaaaccgagaggaaagtgcctcgcgttcggtttcttccccggtgtctcatatgagggtcgctccctcgagtaggcgtgaaacaagctacaagacagatagagatggagccttcttcggcaacttgtgactgtgcatcaatctcctttttcttcggggtttttctcttatccaaccctagaatattctcccctttcttcttccttcctgtttctctttcgactactcagacttccccgcccctcgcaatgtctcattgtcaccacgaggcctccctccccccccccccaccaccaccgaccgtcaagcaatcttttcgctagcttttcccgacctacgttttatgctgcgtcgcggagcaccggttgtcttccactttttcctgcaagatgcaagacaaccatgaggttcctgtttgaacagctggaacacggccgaagtgtatctgggcggaatccagtccactctgaaacgtgcgcttttttttccgaaaaaagaacggcacagtgaagtcggtctgctgtacccgaagagatttgccagcggcaagttgcaagggaaccgcttcatcatcccgttcacccgaagcgaagcccggttctttctgtgaacccgagtccccaaaatccaggacacccgacgacgcggcggcggactctctttgcttcctaatccctcccgtgtctgctgtgtggagcttccggaaagccgtgcgtcccgcaaagatcgcgtgaaacggcggatgcaacttcttgaaggcttcgctttctgtggtggttctctccgccgcgtgttctggcgcgtagccgattgtacatacaccccagaagaccggagaagactcctactggccccggctcgtcgctttcctcggtttacctccctctctgcccaacgtgtttccattccaaaattgtcctccgtccaaggttccaacctcttcgatcgagagtcgaagcagcgtctgcctctgcgtctcttcacaggtgtcgttgtttccgtgaaagtcttccgaacgcagaacccaccggaagcgagcgtccgactgcaccctcggtcggcacttgcagagagaccttcccctccggtctttttttccctcgtctgaagaaggcatcgcaggcgtgtctggtggcgaagaagagccgcttttctccgaacttttttttgagcagcaggggaca

SEQ ID NO: 3691 - DNA, 2963 bp, Toxoplasma gondii
  source 1..2963: mol_type = genomic DNA
tatccgtcataaaggtgcgatgatctttacacaggaaggtttcgtttcagacagcaaacccatcaaagactgcagcagactctggtgtcaaatggtttgcttcggagcctcaaggctctcgcgctttgggtgccttgtgcccccacatgttgacgtagaatgcgtaatgttgaaagcctactttttctctgaagcctttctcaagtttagcgtcatcaattcattttcaaagatgcacagacttcatcctaggactatccatttcgaaatagaacaaacgcgctacctgaaacgcctcacgttccaaaaacgtgagtttgaaggaagttgaaggtttccgagtaggcgccgaataccagtttactcagtgcacttagcgtgacgatcgcgaacagtgcagtggaacacggatacaaaaaaaagaccctcgagagtaccgcgactagcagctctacagcacccagtttacatcttgcatgcggccttcacagctgcattcttctgtctacttcatgcggtaggtactcagacaagagagcgtgggctcttaaggcagccaaaagtgagcttatttcagattgaggtttctcaactgcagtggtgtgtgcccataggaaggtccacttataaggcgcttctgacaagggtgctggcgcgctgacgagatcttgtgcaggggaaccccattttggagtgcgcgacagggccgcgaagaaactgtaaatggttttcataacagtaaactccaaattgtcaatacgttttcgtgacccgaagacattcaactaaagcttttatttatgtgcatggagggtaatacaccgcaaaccttttcgtcttttcacgtgaagatttgaacttacatatgctctgcgttgcttccacagaacttagaggcaagttgggcttccacgtgtcttgtttctctggagaaccggaagagaaatgaacaaagaatctccaaagatgccagagtgccatgcgtcgctcgcgtaagaagaaagtacgcaggaatcacacattttttgtgcacgtaaagcactacggccgtcaagggcgccagcgaattctcgcgagataaagcccttcaagattggaacgagtagtcgaacttacggtcactttcgatatgctcgagagagaaaaggagtttgccagaaccgaggaactccaatggagagtgcctaacagggtgtcgaccaaggctctgcacctacgtctgtgtgtgtcatcgttcacaagcagacagcaactgcggcgcgtgcgaccccgcgtaaagttttgtagtaactgtcgtacaagcatttcaactagaagagagacacgagcttgaaagcatacacaacttggtgatctcactgttttgctgtagccgcatagcgctatttccgtcctacaacagactctcacctgcctttgacgttgcctcccattacatgtgtgttacaaaatacacacgcatacatattatatgtatatatttatacatggatgcatggacatctgtctgaagaagaaccttccagtcaacaaagccgacccgattgccccgtttcttcctcagagttgtccctttcttccggaattcaatgcgtctgttccagttcgtttcctcggcctggcagcaactctcgatcgagcgactcgaggtgtgggcgtttcgtggtcagctgacctttctgtgagttcgtcgttctgtccttctcgaagaaaatgagagatttgcaccttggcttctcgaattctccggccattcctctccagggaggaaaacagtctaggtttcgccgggacaacaggggaaacatgccccccctgttctctgttcgtaggatacgctggaagccgacggtcgaggctcgcggctggtatatttgtccgcgctcattcacgaagttgtcgcgcgtacacacacgcagttctgttcttgtcagaggtgttttcgttctttgcgtctggacagcagaagccaagacggaatcgctgaagtgctgaataagcgtcgttttaatcaaacatcagatacggagactccacgtaccacggctggcttttccccagtcgccaacaaacgcgacgaaggcgctgtttccgctgctttcgacgaggggcgaatttcgacttttccatggtccctctgtgcaataaaaagcttggtagttctaccacaagtccatacgatgtcagcaggtggtgagcaatacaaacccagcagcagcagcggctaaatcgcagtgtttttacccgccaatgttcatttatgtccgcaagtgaaggcgtttccattcaccgactccttgtgtgtgtaaacaggtgacttttgagttgggtacgagtcctattcagaggcagtgcttgccctccttgtctgaatgtcctttctcgaatgaaatacaagtcgtccacaggaacggttgcttttcgggagtcaaacagaaagtcgtcgtctgcatctcatcactggaccgccgtttccaaatccttgactagactgtgtcgtctgccggtgaagtttgtgagacagtgccgtcactttgagttggggaagcggctctgtttctcgcgttcaaatagggtgtgcttcaaaagaaagaccttcccgactagagaggatttctcgatctgtcgaagtccttttcgcagcacaccccgtggcgccaaaaaaatcattttaaccattttttttcactttttctcctgcttgcacatgtacgcatctgcagtctctcctcttgggatgcaagcagtcatttcgcgaaaagagtggagtgttcggcattcgtgtttagcgagttctcagcggcgtgtttcttcctccgttcctgcccgctcgattttcgttttgcgtctctctccccctccatttttctctcctctcctcctcttccgcctttctgcgccttcccttctctgtgtccactaaagcaaacgggtggtttctcagacgagtctgacgagcacaa

SEQ ID NO: 3692 - DNA, 1684 bp, Toxoplasma gondii
  source 1..1684: mol_type = genomic DNA
agtatttcgccgacggctgagctgtgttcattaacggaaagatatcgatacctgcagcaatggtggaccaacactattactcaaaaaaccgtcacaacaatgtcacacttgagacccgatgtgcgcatgctccctggagccgggagagccaggagctgatacgatgcggaaagaaaaagatcttaccggtggaggggtcgtatttgattcccaaatcgatgtgctcctgaataccgaacccgaagttgccggagtccgagaagttcttcttcttcaactcgtactccttgaccttaagacccttctccaggatatcttcggccttcttgccacggacggtgacatagcacgcaatcttttcattacggcggataccgaaagaacggatggtaaagcgggccttggagaactgaggtcgctgtcctgtcaactgttccaacacacgcgcagcgcgagtcagtctgtcgccggactgcaaatcaagcaaatagaaaacggaaggcgttcattcaggcacaagggtagcatgcgtattcctgtacggcctctctgaaacgcagctgcatcacatggagcccatcagaatggtagaaaaaggccgacatcaccgctttccggcgaggagtttccatccggagccccctccgtcgtcagccctgaagagcacagcgacacacccccttcggccttgctatctgcaccgcagaaacagaggtaatcgttgcaacatccttcataagtaagacaggggaagtagactgcgtttacccgttcttccctaccagaaccccacaggttttctgccagggagcttgggtaacccttagagggaatcgcaatgtcactggcactttcccctcccccccccgcctcctggcacaaataccgttttcctcgttacgcccggaaaaactggagtcgacgccgacacagaaggaggcaccaccccgagcgaagaaaaagagctcacttctccgacacagatgttgagggtcagcttttcaatgcggatcttccgcatgggattctcttctcccttcttcaccatcttgattgtggtagtctaccgggcgaaccaaagagacagatccacgtgcaggatttcgcccctacaccgttcagtacaaatgacaatgaaaaaggtgacaggcgggcagcgctggactttttcaccgggggtcgactttttcgtcttcgcttgcaacgtccccgcttttcgcctctcgagcactgtcaaccacgacgaaatcctgtcgcgttgccccgcaggagggccagcaggcgaagccccttttattagccgaatcccaggaaagacagtcttctgctgcgcctggaaaaaaaacgctttccaacgcagcgcatgcaaccgtaatagaggggaccgaaaagcgcttattacatgcgccaggcttttgtgggggacccggaagaatgtgctcgtggggctttgacagcagagagctcgcatgcgctcttgacgatcgatacgaaatttcttccaggataacctggccgtgagggggagtcgcacttcctagcattttcttcagtggttaaagtgattgagcaggccttgcgcactgtcagtctccacgccatttcttgctgcggaagctctcctgtcgtctcctgacttacccggaatattccagtttcgcgcgtcccgtttccacggacaaaa

SEQ ID NO: 3693 - DNA, 4852 bp, Toxoplasma gondii
  source 1..4852: mol_type = genomic DNA
aattggtcatcagttcaaatgctcgcggtttcgcctggttaagtgcattatatatacatatatatatatatatacatatgtatatatgtatatatatatgtatatatgtaggtatgcatgcgaggttgaagggaggaggtctctggaggatttatcgtattttggggaaggttcgattgcctcacctctccctttttgaaggaccggcgcgcaagcagtcctcggcctacaaggtggttgacgaaggcaatttccactgaggaaaacggcgtttcgaccttctcttcctcacactctgttcgatctctctgctgcccttgagagtccctgatgcagttctccggttcagaaacggactcgcaaggcaagtttcctcgccttctgtcaccctcgccagcgggtgccgacgcggaaggcgacggttcttcgttcctcatgtcatcgatcgaatccaagaaaagcggaaggagaaggacgccaggacggcggaaagaaacatgatgggtggagggcagagctaagcgcttacaggagcattgcaccagataggagaaatgaactgtttttaaccttcgtcgcttcccaaggcatgggagagaaacgcggggagtttctcccgtcggtgtattttaacggagggaaagtaaggacccggcagccgttcgctaggggctcgtgacctcgaggtctttgccttgtgtttaccttgatgaaaagtggagtgcgtttttagtgaagaaagccgtcgcaggaacgaacatacgcacacacttgccgggggacaggacgccgctggaagagagatgcccgcgatcatcgatggaaatcagcgggtgagttcgatgtccccttttgagacaaacagacggcgtagaggacaaaagacactccggaaaagcgaacgcgaagaaacatgtctcgaagaaggcggcgagaggtcttgtgtcagaaacaagacatccgcggtgagtggattgagctcgtgaagcgcatgcaccgcagcggcttgttggcagtgttggctgctctcaacagtcggatttgtcgtaaaggtctcggcttttatccagttcttgacaagggattcggatcgccactcagttcgaaagaagaggaaacggggtagaaggcctgcgactccaagaaacggaacggacggttttcaggagtgtgcagttcctacactttgcgaaaagcgactctcgacatcaccgcagtcatgcccagaatggaaatcctcaccattcgtttcctttacttagttcgacattcttgtgcgctttgaggcgaattattatcgatgcagggtcaaacggttgatgttccagagtacaacttaattgaacaatccgcgtacggtctgtgtttctacttttgacgcctcagtgcaaaagaactgtcagagtcctctgtgcttgtactcttaccttcagaagcagaccgttactattgttgatgagctgacgtgctcacattggtatgcctgacctgaggtatcgaatatgacacagacaacaagagatgcacaagttcttcctgactgcgagcttgggagcggcggagtggaaggaggaatccaccgcacaagagggaaaggaaaagcgggagaaactgagggacttgtcctggatggcttcgttgtgacttttaagcagcattctcagaaaggcggtatttcactgaaaaagccacggtgtctttgcgcgagacatgttttctagtttcttccattcggtagactcagcctcgctgctagggaaacagatcacgcgtttcaacatgggagaaatcgcgtgccgatcgctttcttccgtcttcttaccggactaaaagtctttccgttcgaaggagaagttcatcagaattctcctgtgcaccagaactacagataactgagaaaactccgcgcattcgccttctgctcatcttgaacggggcggcgctgcctcggtcagtagcctccattcgtgtgaaagacgacctgtagacacatgatctgtgccgaacgttgttcgtgtttaagcctacgtgaagtcacgcatatacatatatatatatatatatatgcaactgcaaagggaaaaattgttggtggttcccaaaaggggggtttgtatctgggtcagtcgtttcctagaaagcgtaggacggcaagtctgtgctcatcacaatcgcatcaagatatatacaaatgcatataccacaatgaagtcgtgaatatgtgtacacaatttaaaaaagtgcttttccccaggttgagcgtcgacccttcacttgtgtctgcatctgcttcgctgagcgagcaaacaaatgactctgttgtcattcagcctctagaggtgccaccgcattcaaaaacgcagcgtcgcttcctgctccgtaataagggtctagcgttgaggattttgagattgatgttaagtatgcggtctctacgcttttctagtgaccggcaacagtttccagggtacggcggccaagactacctactctgtgcagtgctgtgtcgcccggggagccttcgagtgttgctgcatccctaccggtttgtttctcgtaggaattcgacatcagagtaaataggcacacagcaagctggcacacgtgtattattctcttgtcatcgcccttgagattcgaaaaagagtggactacgcgccagcaacgcccgtctgcgacatgcttgacagggtggaaacccacgcggtgaaagcagcgaggtacggcggactggaggcgatcccctggcatgcgctttcttgtctcgtccacatttgaagaaacgtactttcttctgtagcgagcgggtctccaaggaaatttcactcagggcgacaaggatatgcaaacgacactgttagttattcgagacaagcgactcgtccactctacccggcatctccgtttctgcgaggaggcatttttcctttgaagtcgagatgctagtccacacagacgctctggcgcagtgactccatcatacgctcgacgtataaatcagctaggtctgaaagtgtcggtcaagtcctacggtagagtcgaaaactctccgctgtccggtgggtttgctcctcttcaaaatacatgttcgttgctgctaaaagtcctcccttttctgacttgttggtaaattcacatacgatacggcctctactgacacttttattatggcaagattctctgtcttctcttgcaagagttgtcacagcattcttccgttctctccagaaactccacactttgcgaaagggcgacgacacctcctaagcaagatcttccgaggattaaagcttgaaagaagttatcttgaacttgattgtttacgttttgaacgtatttgtagaccttttcttttcggaaagtgcagaagtggaaccagtatgataagaaattcatcttcagagagtgtctgtaaaagtgcagagcgaaagggaagagagcccacttctagccgtgtggtgttgaacggcacaagggtacaaaacgcctctgtcacgaaagctcgagatgcacggcacttcagtcgatggcttttttttacatgtatgtggtgtcgatgagtctatttacgaatggcagcgagtctctgtttaccacgaatgtgcaagatttcttcatcggacatgctgtctctttcagtttctttggcagcctagctgctccccatccaaaactgcttgctgcctcgctttttcctatgaaagagtgggcctaacccccggagcagaacccccgttgtaagaagctcacgtttggtatgctcgtgttgctttacagtgagatcgaggggatggcgaggcgggcgggatcgatattgaggtggaaaccggagagtctcgggctgttcgaacctgagaaggaaatggatgtgatttttgtctcttctgcagatctctactgttcctttccaccctggcggtggtttttgcggcttcctttttcacttgcccagcgtctacccgatcctcaactcagcccagaagacacggggactcggggggtcgcgcgtagctggacagcgagcaagcagtctcgggccgggacggttccgccgtgtttccttgtcaaaaacgaagaatctaaagctttttacaccgcttactctgttatttctctgccctactctctaaaagacacatcttccgcgaagaccgtgagacccgtcgcgacctcgcactcgctgcctcggactatgtggctacacctccgctccctggcttcgaaactgtaaaccgtcgaaagttgtcatcgacgttctggaagtcgcgcactccgtcaagtcttctcttgctatttcaaagttcaaattgaatgtcggatttttccagaaaacaagacggcttgggctctggcgccgctcttccccccccccccattccccaattcgcgtctgaaacactagcattgtcttgacgctgtcgtctgtctgcttcccgggctgttccggacaccctttcgaagtcatatcaaccttgaaactcaggaatttgtgcgtgtattctgtttactagttcaaatcggtcagaaaagaccctttctcgtccatccactcgccacttcatctcgtccgccctgttacaaagacctcaccctggacgttttagatcgtgcttgcgattcgccgctctcgcgtccgctgcctcggaggtccttcctttccttcttcttgcgaagttcttccttctcccttcttccacaccagttggcctctgccacattcgcgcgacagcgcaaatctgtccgatatcgcgtctaagaaagagtcatcagcttccagagcggtatgttccagccgactatgcggcgttgagttccgcagtcgcgtcttcttcgttcttttgcctcctcaaga

SEQ ID NO: 3694 - DNA, 2801 bp, Toxoplasma gondii
  source 1..2801: mol_type = genomic DNA
cttcgagtgacatgtatgacccgaggttgttcaccacctcggacgacgccgaaactgcgcttgcgctgtcggtgctgaagaagtcaccgagacctgacagatagcgggaaaatccatggttgatcagtggcggtggatctttggagttttcatcttgggtgggtgcttccacagatgcttgtgcgggcaccgcttctttggggggctcgctgagtccagtctccgtattcgggacctgttctgagacgcaaaaggtaaacacaagacgccatcacagtatgtctcaacagtgggcgcatctcgatccgaaagacctcgcccaccggcaccatgtaagggttgtacatgacctgtgtcgcacaccatgaatgcgtgggaaagcaaggatgctgaatatccgcatatgcacatgccgacaagctgggtaaagcttcctgctcacgcctcttcagtctcatttgacactagggttgcctaccaggtctttgaccctccgcttccgagctttgttcgttccccatggtaccaagcgggacacttgccaggcactgcctctgctattggtagctctgagcgaatatgcggcaggtattcgccacttccgctcgaccgcctaaggcacaacaagcctgccagtcgcaacgatgacgcatcttaaagaaagggcgcactcaccaggctcaaatgcagtttcaagtcaccttcatcgcgcttggttaagtccacagcagcagcataacatttttgttctttaaaggcaggactccgatacaagcaatcaagttttagagctcgaattgccgcccctttataaacaacagcgagttctatcggcttggcagcgtggcgttccccacgcactcatagcaaatacagacatggatgcttatacaaacggtatggcgaatcacattggggacgtcgaagatgtacgtgtaccagctgccagtacctccccgcgttggcaccacttgtatgaagaccttgttccattctgaacaaggcccacattatatcaaaaaagaacatgtgttgtgcggggaaatcatcaatggagcatacactgcgcaatcatgcgtttcatttgtatgatggtggatatcatctgcgttcgttgactgcctatctctgccgaacacgccggccccgtcctcctcctcctagcgttgtctaactaggcgcgtccccgtgttgtttatttgatagtttttcaatcaatacttgttctaggctcagaaaattactcgcctacctggaagcaaccgagaagcgaccacgaaacgttggtcaagaagcacgtgagacggaaggtaaatcaatctctaccaatagcccagcgacaccgcctttgcagggctggtttccacttcagggtaccttgaaaaagcgtgcagaaaatcttgaaatatactgtgttttgcgaagctgatgtttccttcgcatagagaccactttgccggaaagcgtttgaaacgataacagtactaacaacatgcgctcgctgacgccaggcagctgcgcactgctcgcgacccctgcggctgtgccttcgcttagggccgtctaatgcttcacgagtcacaactaagaccccaacaaaagtgttcacagtgcacaaaaactggacaaaaatgtaaccatatacaagcgttgttccacaggtgggcaggtttcttttacaagcgatccaaaacggcaccgcgcgctaacgacacactgatagcatctagggggaggctgtccagcactgtgcgctgagggaggttctgcaccgtttttttttgcggttgagtcacgcagatggctcttctgaggaggctgacaaccctgagcaagggaaaaagattctgacctagacgtgcatacctgtattacatgacgagataagagctatacacacgaacttgcatgtagtacaaggacgtgcaatgacacatcgttatgatgctttggctttggctacttcagcagcgctgctggcctgcatggggggtagatgcggggggtcgtagagatcaaatgttgctgtcatgcactgaactagatttcgcggctaactggacgaatcgacgatgccacagcgaaccaggtcaccacgtggaatcgatgtgaagtgtccgtcaactgctggccacttgaaaggatttttcgaagctcttcttcaccataatcggcattttaccgttcgttttttcttccgttggaatctgacacaggatccccttttcctccttttccgtagattttgtccattagttcggtagactagcattgaacccgaagcgactaagccaattttggtcgtgtaggcgagtttgccggtgcagggcatgcgcttccctgttgcgtaaaagccagttgtctacctctcttcacatttagaccttgcggttcctgtgtcgtctgaccgtttgatgggctttcttgtcgttgtccggttggcctccagcaagtctggcgctacaggaccttttcgcgaaaggaagggatgagctggacctagtcagctcgacacgttttcttaccagtgcgcgactcatgatgtgttaaatggcgacagaacattgtacagaagcgggaacagagctgcatattttcagtccaatttgcctccatgtcactctcgccggccgatgccgtggaccccatgagtaggggtggtacaccgggggactcttcatgtattctttaggtttgatgaaccagcgtcgatgagcctgactcatttgcatcgaattcacttcctttcgagcttctttagaagagacgtatttctctcagtgctgtgttgttgaagatca

SEQ ID NO: 3695 - DNA, 3267 bp, Toxoplasma gondii
  source 1..3267: mol_type = genomic DNA
ttactgttcattcgtattgatagcgacagaaaactacaggtagctgtgatgttaaggagcataggaactgctacacaccttggattgcaatgcacttgacataattatcggataagcactcagctagttattgagagacactcagcagacccttcgtaatctcaatagtttgcgatagaaggcccgcagggtggtggtgtacagcaagcgtaaagaacttgattgtttgtgcctcactgctggagtcttcttcagcaccataggtactattcttcctccgaatgtcggttgcgggaattctacgcgtgtgcctcgatgcccggcccatccccgatgctgccgaggagacattgatcaaaccgttttcagccactgatgacgtacgcaaccactgctgtataaaaccgcaaacgtcatccatcttttgagtgggacattctggagacaagaacatcgcaatgatgttgctatatattctccggttgtttcccctctgaacattccatgtgtcacgattacgaatcgctaaccgatgtgtaacgtcgcgggaggataggcgaagggtggacttcagaactcaggtgtcgtaagagagatgacacaatatagaattgctgcgatcttcgatcgcttttccacagtttggtcgcttccagtcgggcatgcggtttcactatgtcagagcgataagcggaaaaggggtctgtcacagcggtcgcttgcttttggttgcgttcgcacagcagtatggctgccaacgtgggatgagcgttacacgtcacatgaaggccccacggtgaggcattgctttccaacattcgcgatacgtcaaaaattggaagttttctttgcccctcagtatagagccacaactcaaggtggtaaaaaccggtgtcgcccgaacgaacatgatgtaggggtccccaaagaacctgtccgcaggagtgctgtttaagcctagtcaggtttgcgacgaacgaagaccgcagccaaggataacttcgctatctgcacatccgcatactgcagttatccaccccccgctccctcctagcgcagacggctagaggcgttgctcctacagaatatgcatgagcaacacaccaggttgctaggggaactgtaacccacggggcctcgatgacttggctgaacaccctgcagcaaccatcgacaggcgtggtttcttctcggtctcgcgcctttgttttgaggagagcctgcatttccagtagtaacggacacatacataaccccgaccagtacgtggtcgtgtcctttgaatcgaccccctctcagcaatgttccacaggaactagatatcttcgagagccccgagttggctgactcatggtttcgaatcgctccttctttgtccattatgagaaaattagatggtacttatagttttggtatgaatatggctccagtttcgaaatacagacagcaagtaatgtcttgccagtctccagaactgactcggcccgcttggcctaaactcgctccagcaatgaatctgttggaagcttgtcacacttgttgacgcatctctcatttcgttccagatcagttatacgtgttcttcgaaacctggcgtgtagtgaagaagcattccgaatgtagtgctataaagcagcccttctttgttgtgatcccctcgagcgttgcgctcccggtgcctctccgggaaacagcctcgcccgcaaagtgaatggacggtgccgtctctttcgtcccgccaggaccttttgtttgtaggttgggcgactcgtggctcgacgccgatgcatatctatgagcgaaggtcgtgttttctcccactatccttgcagatttcccccctgaagcagatggctgctgtcacttgcctccgaatcggtaacactccgcacaacaggcgagagagtggcagcccaatccccctgccattcaggtggttcacgaaactccagtgtttgcgtcgcgcatgcatctgtatatggtaggattttccacttgagtatgcttaattccagttggaaagaccgccagggtagcgattcacacgttcttttcgggtttctttcatggctactgggactgacggtcctgcccgtcccccagtcgacaaggaatcgacgaagggagagcagaaccctgggggggagctgcgcgacagacgcgaggttgagggggcgacggctccgtgcatcccgatcgacgaccgtcgaaaactcgcccgaacgtcgaacgcggagactgggaaattaagaggacgcaggttgtggagagggtcacgggtgcgtggtgtttccgggggacagctggagcggtctgtttctccgtaactctgtttcgattccgcagtttttcttggatgcagtcatgggcgaagagaattggtggagaacgcaccccgaacaaacggcatcttcacccgtctccgtggcgaaggctatagatcgtcattccgtgcagtgtggagactctactttttctttgccattcttttgcacgagccacgtgcattccgagtagagctactaagttactacctcccccaaacattaaaaatgcgttttcaagggttctggcgctgtgcactgattcgcaaagcatcctcgcccgaactctgaactctatctatgattcgaaggaccccgtggccggcccccatgaaaacgacagttcgcgtctgccatcaccaacgtgaaaaagcacccgctctacagtggactttctgcttttcgaactcttcgtttactgttccgcggtaggaagggttgcagggggaaaacccatctttcgaatctcgcttcgtctcccgctgagcgggcccccgcaggataccctccggtcaccgattgccggccgtttgtctctctttggatgcttgtcgcacatgcgactctcgcgtccttcttttttgtgacggggcggagcctgcaagcgaagatgtccaactaaatttcggtgtacatgtctgaggacattctacagtattgaggacgtgttttcccggatgtctctgtatgcctttggggccactccttgtttgagacttgacattctctcgatcctccgctccacgctgccccgcaaactcgtgcaaacatctcgcgacttcaggcggaactgtgatccagtgtggtacacccttgtgaggattcgggccacctcttcctcttcgagggggtccgtaggtccagcacctcgctgcctcgcttcgcttacttcagttgcgtaaacgcgttccgctcaaagtttcttgacaagttgtcagcacaa

SEQ ID NO: 3696 - DNA, 4556 bp, Toxoplasma gondii
  source 1..4556: mol_type = genomic DNA
agaactccacggcgaataagatgagaatggaatagacaggacagaaggggtctaacaaaaaaggaatcagcatgaaaaatatgctgatgagcgagcggggtatcgctaccaaggcatgctccgtgacgcaacagccacctttactacgcgtcaggtacaatggccacggtccatcgttcctctcttttcatcgatgtcagagaaaaacttcatgcgatgaatctcgctatgctgatactgtaggacaccatatacccaccaccctgaaaaagcctacaccacaagaaaaaaggtgactcctttcctgggctctctgtgctgagacactttttcctgcgcgtcgccctgcatcccattgttggcgttccgctcccgaagaagacagcaaagacaacgcgtcgaaccgaaggcgcctatcccacacgtcaacgcggctcttgccgcgtcatcgcttagcatagggaacggtccatgattcagaaatcaaaacgcgacaatagtgagaccgacgtcagtgcacgattctcgcactcacaagcgacaaaactactcacgggtttcctagcgactgaagatccgcagcgatgaaccccaaacaggaagacatacaaaagtgcagttgtccgctttacagccgagacacgaaatccagcaagagtgataccagagcacacactacagttccggatgttctagacagcgaaaagctgcagtctcactcggacgaagcacctgaactgtcttcctagctttggtcggattggcgggccgttgcctacgaccctagcagcaaaacacggttgaagcccacaaaaaactgtatgcaagacgtcaatggctacacacagatgaaactgtattggaaatggggaaggtttcacggtcgaaggaaagagtttgcgatgcgcatgcactcgtgactagaactggtagtgaggacgaggtgagataactggcttataaccctgggccgcaaaagagaaaacgggaagaaaggagcaaaaaagcaaaaggagacgacaacagtaggttgttaaaggatacatttcgttgttgagagactttcgatgcctcgtgttggtccacggaatgattcacgcatgcaatgcaacaagcccgctggatagcagagaaaaagcgagtggcttgtgcagctgcttcacaaggcggccagcaacgagaacgatgtgcaaatggcaggcgccaaaatacgtttttctcatgcagtaattagtgaacatacgtataaagctgaatgatcgagcgccatccttcttgttgcagaagaatcactcatctgacgggagatgcttggcaaccgcgcaatagcagtacaattgccggtggttggcggtgacatgttcggcgtcatcgaagaaccagacactcgtatccgtgtgaagttagtaaacacaaggagctacgtatagaggctgaaattagggggacaaaggggaagactcagtctttatctgtgcattcgaactcggcgccgtctgtgcaataccccttctacattggacaacctaggtaaccgccgaactcacaacgtccactgataaaaacagcatagagtcttccaagtgtccattgcgtcaaatatgccattggagaaagaaagcaaagcccacggtgaaccagctgggtgctgtgggtttggaacttcgtaataaccttgctgtattccgtctaacgacataaaactcgtgagatgcccacgagcaagttcttaccgacttctgtacacatccacaaggtcagcgcaatacacacggatgcaggcgatctttttagtttatgggcgatatgtgcaacgtgaaactcatgcgccgcttggtgacacgttctttaaaaaggcaccacggtcgtaggctagcgtggcgtaacactaccattgactgcagttattgttctcgcattcagtttcttgggtcaactctcatcgctgctaactaaatactttaagcgttcccttatagctgcaggatgatgcttgagaaattcgttgcgaacagtttgtacgtctctgaaacagccgcatcagcttgcttacgaaaataacagccaccacacatgtctcaagagggtccttctccttaagaacacgttcgtgccatcccacacggaccctgtttagtgaattcatcactcgctcgccattccactgtctgctgttttaggcaggatatgccacatgcaatgtcgaggaagatactggttcggtggcagcgcggttacttgccgcaacatatagctcaggggcccaattatatatggactcaagctttacgggatttgccgttcttttagagaacgacagacgcgaggtgccttccccgcgtcaattcaacggggtactctactgttcttacacagcgcaccggactgaaaagctcaccgaaacactaaaaccatgccacacttgcttgacgtctactctgcatctatgcagtgtttcatgcacagccaatgacgagtgctgaaagtgaagtggcattcgcaaagcggcgacttacgtgcctacagcgtcaagccaggtgacggatcgtatcgtacgtgactaacggtaaaagcattatgcgaaacagaactggtgccactactttaaacgtggtggaatacttccttctgagcgtctcgcgtaacgtcgttttgagaggatagacccattccgtaattgtgtcagagaaattcatgattccttactaaaccaataaaacagcacggttcaggcaaactaatccctcgcccgaacaacggaggtgacactgtttctgaggctgcagtgtcatccgttcagtacaaagcaggcggtgagcagatgagccagcaccacgctatatccgcttgggtaattatgtacactgtcgtacgatagacacaagacaagtagtcgcacaacactgtccgttgaaatggcagcacgttgtcgttacacaccctgataagttgactcttactacatagaaaatgaaaagagaggacgtcgtcaaacattgtgtggtcgcgttcggccacctcagtaagcatagttgaagccacagattcaactctaattttgggagtgtatcagatatccggccaaatacattaaatcgccacttacaagggcgaggtcagcagatgtcagccaaggatcggtgcgagcacaggtggtcaaaataaacaaatcaaacgacatttttacttcgctgtatacgaagctactggaagcgctaccacgattcactgggtgcaacagcttgatgacgaggcgtctctatctggatgtttatcaaacgagatgacccttgagttactcggcgtcagtcacagtgaacagccgaaaggatctcgacaggtgacacagtaagcggactgctcattaggaatattattgtttttcttgcgtcgaacaggaagtgctgaaccaactacgtagcccgacgtgtagaaggctgaacgcacaaccatcgtcagaggcgtgctgagtgctgtcgctaacgagtgtccttcaagttcggacggataccggaactggcgcaccgccactgcaatcgattcaccatcgcgtctcaaatagcagtagagacaggtgggaaggaatttcgttgctgtcaaatcaatcatgaaccccatattccttcccttcatttttttcccactgggtgtcctcagagggaaagttgttgcttcccgtgttccattagaatggtttagtgcctgtcgcgcaaccgcgaggcacgtgctggtcactagcggtctgagatgctgaacggcaggataccaccgggcagtcacgcggtttccttcgagtttgtgttttttggcgttgatggactttgtgtctctgtctctcattaagcagcgtatctaagctttgtcaaaggtgtgtagtcgtcctcgtcacggttgcggaatgcctctgaaaggctgtagtgaaactgcgcctggcgctagagacgcagtttcgatttccggtcgatcagttttccggttgctttacccagcaggttttctttggattccgtaggaattgcgtacagcctcattacgtaatcaccacaggtacggcagtttgttactgtctgcagaggagagttactacgcctgtccgcgatctgcgaaatcagacaccgaggagcgttcgtcgtttgatcgccttacgctttatggaactgtgttactgcttgccgatctatggtgtgtttttgtcgctaatacgtcacatacagcgtttcgcgctacagcagggaccacgaggctttcggcctctacagagctggcttttccgttttcactgaactgctcgttgcacccgaggcagtctttcttagtattcgactcttgccatagttgccgtgatgttttgattggtacggatgtccgcgcgaagtgtgttgctgattcctatacgggaaaactctaatatcggtttcgtgtttttagtagtagagcattaggttgtcaggtggtattctttgcgcattgtgccgcaggtttttagggaactgtgcttagcggagaatatctcgggaagtcgtcgtgcaggcttgctaacatctgattgggtctca

SEQ ID NO: 3697 - DNA, 2104 bp, Toxoplasma gondii
  source 1..2104: mol_type = genomic DNA
agagaagcagagggaggtggaagcagaaacgaggtctctaaaaagggaacgacggaggtgaacttgcagcagatctttccgagacaaacacaggagacggaaagagacaggatcctttcacggtaaaaaacataaaagagaagaagaccttcctccgacgagaccgcgatttgacacgctccgccttgctctccctctgcgcgttgaaaagaggcctccattcgctctgaggaccggcagttgtctctcgatgaacgtggaagcagccgacaaccccaatgcctgagagtctttgagtggcgactcaggtcttctggactccttgcgtcctgtagttttctcactaaaagaagatctgctattggtcgcataagattagctttgcttgtgcgactgcgccaacaaagaggtccggcctccgttgcaacgctcgagaagactcgcggcagcttgcgtttcttctctgaaagagggagaaagagctctccacgagaatggtcgtcgacgcacctgtgtactgaaagagagtggggaccgtggtagctttcgcatctcctgcgtcactctggacttgcgcctgagccgttgaaaagctgcgcgttttgtctgctcctccacggaccgcggagcgagccgagagcgccagtggctgcgagaagagcggcacagagctcgcacacgaagagagagaggagacagaggaaacgggagagacacgaagaggcaggtatctgttgcggaggagagttgaagaggcagctgtccgcgcgcagacgagcagcggggcaacaggcttcatgttgaagaggaaggcttcactcccgaaggcgggagaggagagcgttgaggagagacgtgaagtcaaagacgttgtcatcttgtctctaaagacgaaacgtgaaaaggatcgcaggtgcagtgctcgagggtcgacttcgagtctttgttgccaaagagccggagagagacaggggagagaatgcggcgacaggaaacaacaaggaacctgtgggaaacaagtgcaaggagaactcaacttgcgtctgcggagacagtgagaagcgccagcgaaacgctcttggacctgccacaaagtgccgcggactcgccaaaagaagaactgcatgcaggtggacccaccgctcgctcagctgtacgtacacccgagagcggtgtcggaaattcgcttcttccgccgacttgtctcttctcaggctttctttgacggcgccacagacaccggggaagaacgcgtcaccacgcggcagccactgcgactggctcccgttcctctcgcagcttttggaagtcgacgcacaaaggcaacaacgcgctcgccgttcaacctgcaaggaacgcgcaaaagcgtttaacatctcgcgcctccgggcacagactcaaagcgccgcacaccgcccagcacagaagagttcgagagttctatcgagagaagatagcagaaaagtgaaggatagaagggaggaaacgaagaaaagagcgttctacttcagaaaggaaagttcataaaaaactgggtcgcccgcgtctccgcgccgtcacacgcgtccctcggcgcttgacacactcgagcttttttacacacaaaagctcgcctcaagtttttcgccaaaaactccacttcgtttcagccgcttttcgcgttttctcgtgagcgacaaggaactctttcacggctctcccgccgttccttgattgcgggtcacctcagttggctcgttccccttccgttctcttgtctttgctcgctcttctttttgtgtacacgtgtgtgctcttcttgatctccgtctcgctctctttcctgctctctttctcccgcccccttcccttctctctccttgttcgctgtttcctcgatttcctcactcgggccttgttcgcattcctccgagactccggcagtggctatgcctgtctctctcctcgaggactgtctccagtttcctctcgccgtcttccgtgaagtagaacgcgcaacatccgccggtcttgttctctctctttctgcgtctgccaaggaagagactcagcagcgagtcgcttcgtcgccctcgtgcaatccacggcgcatgtggggtgccga

SEQ ID NO: 3698 - DNA, 1476 bp, Toxoplasma gondii
  source 1..1476: mol_type = genomic DNA
tgacttggagtatgattcttgaatatgaggacacagttccctgggtatccgaccccgtgctctgtcctaggaactgaaactatcaaactcactgttcaaccctgcagtatttgactcggttaataaggttttggctggatcctctgcaccgaccgatctcaaatcgcactgtctgtcgtttatgtaattttagtcgtgcttgtcaaagttccttgtatctgttcagctcactgcctacttgggatcagaccaaaaatatccactaatggtaaagattgcagaaaaaaagaacggagcgaattggcagtgcgagccagttgtcacatcaagactgatgattcatcgagctagtcccgcaacacaaagtatatcttcgctcccttcccagcgcacagacactacaacctccgtggctgtttctcacacctatcaaccacagcttgtactctgaagccggtagccgtcgtcggctactcgtgttgatgctgttcttcatgacatttattcggtcatttatccaaatacttctgtattcatgtatttccaataacacgagccagttcagtgattcggcgacgcgatttctctgaggtcccgaaaatcctggaactgttctgctctaacacagacttcgtgaactcgaacagagcaaaggacgtcgcgaatcacccagaaagtcgatggacaaaataagaaatgcactgcttgctgaggaccctggcgggaccacttggcacgagatgcctagctttttcaagttcttgaatgttttgaacgggcagcgaacagtgctggccactgttttgagcctgggccaacgtcgagtttgtgaagttcacgggaagcttgagtcgtctgtgatatcaacttatttccatttgagcagtcttgctccttttttgaagtcatgaaagagaacgaggggaagacccaccggatcaatctgtaaggagagagtgcaagatcactttgtctgcagtattgacctgcgagacaaggaaagatacttgttctggctagctgagctggtaggcatggggaacaaacgcatctgctgcccttctcctggtgcatgcttattccctcgtttttgagttagtaacagatggtccaagaggtcgatttttttccaacgaaacgcggtaccaagccagttcgtaaggccagctcgacgggcgacgctgcagaggcactttacaaaactttaggtgtacatcgatattcacgtcagcaagggctgttgtattctttgccattttccccatcccattgccggcttttcctggtgcattcgtaagtgaactgtactctgacactttttgtgattgggaccgcgaaataggtcgagcgccggctcttcatacagcttcgaggctgctgcccctcccttcactatagtttgccgtgcagcggcaagagtctcacggtgagaatcgccagaaaaaacaaaagggtggcaatgtggcttcggcagga

SEQ ID NO: 3699 - DNA, 2634 bp, Toxoplasma gondii
  source 1..2634: mol_type = genomic DNA
tggagaaggatggcacattttgggcttggaggaagggatactgtttttttatgttgatagtgttccgtagtagtagtgttgttgtcgcattagatgtatgttggatgcaagcatgcgtcccgcgtgctccttcgttcggcggattcccttttgagagaagtgtctggatgaaatgtatgaaacccgttaaggggggttgaagggtcgcgggcagaagtcctttctaataattaagaagactcggtacttctgtggcaagctacggatcattcggatgggagaacgagtgacgtgacgtatattcctcgcggagtcatcgttttgttagcgacaatggatgagtttctgccagaaacagcacagttctccgtttacgcctctaccgttgcaggaggcgtttttttgtttgcatgagaatcacgtagaagggtgtttcgtgtcaggaaccaacagtgttcctatgtcctcatcttgagttgtttccgagcgcatgcattacttctggcaggaacgctttcatttgacgcatgcgcagtaactagggacacgacgccatcagtgaaattgttcatgctcatcagtgcgctgacggaagttttcttcgcgacttccctttgagattccttgtaaatcacttgtcgtccccgcgctatactgcgtgcgaaagttgctgcccactcgtagagcattcgagccaaaccgggtacctcattttgcttctttaccagttcctctgtgaagcaatgaaacatgctccggaagcaatacttttctcagacttcggtcgccaacctacattaacgagtcttcacacagcagcttgcgagatcgctgtatgcagcgtgtctgtaagatttcctttagtcatgccgcaacggtgatcattcggaacttaatgatcagctgctggctattctagtggcagggattcaggacagcaaacgcggcattgcagattgccttgctcatcttaaattatcctgtttcgtggcctgatccgtctgcacggaagctggcagttcgctgtggaggcgagaatcgaatcctcccgtgtgtttccttcccttgcactcgtgattcttcttggctgttcgacgtacgatatcagtatagggtgtactgacgattagacacatgcactatcccctatctccctagtggaaattgaagaagggtactgccgtgtggttcgtgtagatttcacttctagacccggtctctctaaccttagatcctgggtgccaccactgtcagttgtagcgtgacggtgggagcttcggttgccgaaaatgtgcaagggctgcctattcctctaagccttgttcgtctgcttctccgtaccagcagacagacttggctgtgcgtgacgaaaacaatcagacatacgatttacaccgactactactcagctttgtctgtggtagagttccatctgctcgtctgactcgcttcgaaagtagccaccgaccgttgctgttgtcagggtgacgaagcatctacgttcatgagtttaacactgctcagtgttattgtgacgtttggaaagaaccatagatcggttcagttccatccgccagtggtgctagagtggaagcgcgttgagtccagggactgccctacgagcagtccgcctacggccagtataccgtcatcggcacacattcccgacattttcaccgcgtgtgtgaaagagacactgtcgtgagtatgaggtgcctcaggttttagaagtttcaaactaacttcaaataggcaagggtgaattgagcacgtcgggcgtgtctgatagaaatgatgagacatacgcgccacgctgtctccgagtcagcttcagcgcctgcctcgtcaccctcgtccccggccgcagccgttgaaaagacgggggagattgagtgtgacggaacaacggtccaaagcgggatgtctgccaagtcttttgaacactttcacgatgttgcctctgtgctatggtcatcggaaatcgcgtttgcagagaggcgctgtgttgccgggtcaggaaccagttgatgagccggtagagctcgcggcgacgcgagagacatgccagttggccattaccgttttcaacgatacgcgctcccaatgagtctcgcaatttcctggcgtagctttcttgagatgtctttctcaaagctctcagagtcgacactaaaaataaaagacacaaatactctcaattttcctcgagaaggcagtcaattggacatcggcgacccctttggcagttcgggcgcttgcttttccgtactcgccttctatactcccgctgccgcagcgcccgatcgttgttcgtggaggacctttcgtattttccattctggctaggtacaaaacagatttttgtttctgtgctgttttgagaggggaaacgtgctgcggctgccttcttccgtagtaggagactggtgcctccctgctagccctgagaaaacggggggcgccttggcgtccgctactggagcgggtccgcttagcattcgtctgcagtgcatgctcgagaaccgttgctctttagcataataattttttttatcccacggtcagtatctagaccaggctccactggcagcagctagtgtctcttcaatgcgcacccgaactttttttccagga

SEQ ID NO: 3700 - DNA, 3024 bp, Toxoplasma gondii
  source 1..3024: mol_type = genomic DNA
ctcagaaggcgcctcccgaatcccagagacatcttggcttctcgtggactcgcgcgaggcgccagagtcgagttgtctcctcgaacggatgcaggcagcgttccgcggacttcgcagacccaggagacaacgaggcctgggctcagagaggagacacccgatgaagcgaacagagactgcacaggagacgccaaagaagggagacagaggacgagagcagagacagaagcagcgcaaacagaagagagcgacgccggagagagagaagagggagacgcaagagaaggagaggaggaagaggaagagccgaggagggaagcagaggcagaaaagagaagaaactgaacgaggagtgagaggagtcgaagcagttgcctcatctgagattttttttcaagacactactaacacaacgctttacgtctgcgaaagtgtggacagttacttctgttcgagaaatcgcagttcagaaagttgacagaacttcattcgcattcaggcctttccttttccaccggacttttcgcagaaggacgcgcggctcgtctttcttcaagtctgctcctctgacgctcttcaaaaagacatcatcttcctgtcccagcatttcactcgcttatacagttcgaggtcgacgagaaccacgggcgtttctgtgagaagaagaaagatgcgagtctgcagatttcctctcctccagaagactcacttctgcatatcgatggattcgttttcatgaatgccaacgttattgcttcggattacagatcgaccgatttccagcgacctacacatgcatagtttttaggaagaagtcggcggccttctcaacgagcggatctccctacgttttacggagagaaaaaagacttccaccaccttggagagagaaggctcttttttccggtgctcggaaacgacccaggagacgagacacggccggtgaggacagagcacactgagcagcgggaaggcgcagagaaccaatgactgaagagaagggagaagaggcaaaagcctccgagagagacagaaacagaggagaagacaaaagggaggagaaagagggagagaaagacagacacccgccaagagagaaagagagagagatggagagacaggcgaacggggagaaaggaagagaaaggacggtatgagagaggagcgccgaactcgcagagcaggtgtgggccgagaagaaggagagagagactttacagtatgcacatccgccagtcttccttctccacgaaaatccgttctcttcgttcttgtttctcctcgcttttttcttcttttctcttcttccgtataccacagggggaaagctcgagaaagcgccggcgctcctgttctcgtcgggacgcttgtctctctcccaaggcgcgtttttcggagctctggaggcaacagctcgcagagcgagagcagagacactcgcatcgagcgcatggaaaagcgaaagattcgttttgttactcgcgtcctcttcaaagtgagtttcttcgcctctccacctgcactactccctctccgtctctcgcgtgtgcacagagttgctgtcagagggggggcgtttgacggagggatcggacaagcgaaggccgattttcgtcttcttctccgtggaaacatgactttaactggctcccaatccgcctttctcccgctccttcgagagaggaagacaacgcgagagcgaaggagaaaaaagaggaagcaactccgtcgcagggccgtctcgacttctctccgcccaccagaggagggccagagggcaaggaagacacagcgcagtcggaggcgtcgccgcgcggagacactcgccagccgaagagtaaaaaaaacgaaggagaggagaaagaagaaagagaagaagagagaagaagagagaagaagaaagaagaagaaagaaagagaggaagaacgggagatgtttcctcgctcccggcgcgggagagaggcgcctcaggagacatcgagccgggaacgagagcaggcctcgtctctgcgtggaggagacagagacggagcggggggtgggggcgtcgctgccgcagccgaaaaggctcggcaaaagaattcaggaacgaaaagagacaaacgcatagggcagaagaaggccgttcagcaggaaaatcgaacggaaggagaaggagataggaaacctctagtaccagcgcggaactcccgcgtgtatatcatggtctctcgacaagacatcgctgaaagagagagagagcgagcggctttccacgcaaagtttgcggagagcttgactcggagaaaagcgaaaaatccgaaaggagttgcggtcgcgctcgagaggaagaaatggagaggaaaggaaacaaagttgtgtcgaaaacgaggggaaagcgagaaactgtcattgttcggaggcgattctataaccggagtcggcaaagacagccgcgaccagcaacgcgcacaacatgacgaaaaggagaatattggcagaagagaccgaagaaaaaaaagccacagaaaaatgaattcaattcgcttcaattttctctcgcataacgacattaaatttcgttaagcaaaaacgatcgcggcattttcacccgtttctcccgaagtttcctgtttcccctcctgcctccttcctgggtacctttgggtctccccgtcgctccattgcatcctgttttttcctcgattttcgacagaactgcttcctcctttctgtctcggacttgtcctcagctcggcgtctccgccggcatcttgttctttttcctcgcgactcccccgaaattttcctagggaggtccaaacaacaaacagttcttcttcttctccttcctcctcttcttcctcttcctcctcctcttcttcctcttcttcctcttcttcctcttcttcttcctcttcttctccttcttctctcttctctcttctctctgttcttcttcttctccttcttctccttctctcttctctctgttcgtttgttcttttgtttgcgcctcctttgcacctttcgcctcccttcga

SEQ ID NO: 3701 - DNA, 2972 bp, Toxoplasma gondii
  source 1..2972: mol_type = genomic DNA
aaggagacgaagaaacgaaggaagccaacgctgaagacgaatttgggctcaaatgcagacgagccgagcagaaagggggagaagcaggcgagagagaggtgagcagagacgaagagtcaggagaagatgcggatgaggcgcgcgggagagaagacgccgttctcgaccctttctctccggaattccagaaaagaaacttctcatcggctacgaagagagaggctttaggacgagacacacacgaacggcgagacgccatacccgagggagaagaaaagaacaaaggactcgacgaggccttgaaagcggagaaacacctcgaggccggagagcgaaaaggggagagagaaagcaaatgtggggacgcatccgcactggtggggtccgaacgatagaaacaaggagagacagaagtaggaagggaggactcgacgccggagagagagaaataacagacggaagaggatgcgagcccgttggagggagaagagtgcgaaggacgggccgaggaagtagaggtccaaatacagcgtggaacgatctgtccatcgtagtgtctttgcattccaactctcgggtatgcttcacccgccactggaaaaaagccatcagaagtaagcggctcttcccgtctacacccttttgcgtctgggagttctgagacgagtctctgagttctctgtgaacgtttacggaggcgagagttgaaggaaatcttccttgtctcgacagacgcggctcgagggaaacacaaggccgccttccgcagccggacgacaccggccgtccccgccatctggggcaccggagacggggagggaaggcgggggaggaggaaggagcagggaggccgcaaaagtcgtagagatgcacgacgggcgaagaaagaggaaaagagaggaaggacgaaacacagaggacagggggggggggaagacagcgacgggggagaccggggaggcgcagaaggaccgcgagccacaagtggaatctggtcgacgcgagtttttaggcaagggacaaggacgctctgtgggagacgacgcaggatcaatgcgagaaagagaccaacggagagaaagaagaaggacggagaagcggagacaccacggaggcggaggagacagcgaatggtaacgtgcagcacatcttcttctacggactcaaatccccagggaaaccgcgaggagcgacggcagaggcttttcccgtagacagaatatcgaggagaataagcaagtgtcggaaatgtctgagaagccaacaggagaaattcgcgagaaaaaacggaataccgggcgtttttgagtgtatcggcgaagagccctccacgcgcgcgcgaattcgcgtgctgcagccccgaacaaccggcgtcgttcacagcgctctccagcccccccgttcttctcgtttctcgttgctactacgtctcatttttctcttcaaagaagaaagatgccaccttgcgcagtttcttcacaacaagggaaagatgagaggaaaagacgcggcaaaacttcgacgaccccaagatttacgcgctagggaggaagcaaattttgactagctttgtcttgctacggcgggaccggcgcgaacgccgtggagaccggtgaaaggctgtaccgttccttatgtagtctctatgaagaaggagggttatctgcgacatttttttatcttcgtgccgacaagaggcagaagacgcaggcaaattaactagaagcctgtcgagaggacggctctctttttcgcgcgcggccattcgctatataggtcgaaacggggattcttttcccctctcccagggggtgcgttctctgccacggcgctctcttctcaagatctgtacgctgagaaaccgagacaaattagccgggcactgccacctaacgcgttttccgcaagtgtccatcagtttgcggacgagaagtcttttctgccggcgcggcgtctctcggggcttttcaagagtctggagtgcctcagaagcgactcgttttcgcaagagagccttttttcttttcttgcacatgccccggcgaaagcctcgacccgcccgccgccactctttccgtccacacgcctcggtttccggcacatagccgagtcataacggagattctgacttgcaaggaaaagaaggaggaagaaaacgtgttctgtggactgccgcgggggtggtcaaattctcgcgtccccgtgccggcttactgcgaaactctccaggtacacatctgcggtgtttgttcgaggagggcgaagaaagcgggtgcacgggactctcgctgtagcgcgaaccgtggactgtggagcagcggctaaagtgtgcctaatctgtttttcctggtggaaaggcgtgtttctccagcttgcctttacgcctgcgaacgcgaggctttgtgcagggcgacaaacaccccgaaacaacacccggagtgtggctttagtacctgctcacgctgtgctgtggcgtgctggtcacctgtctgtttcggcaggcaggttagtgtggcatttagcgcaggtgaactgcgacaaaagtggaaaaagctggcgtttctcggtctctcgtggctgcacaagtcgccagctcgatttttgagctgcggaagaaaactgccgttcccagatccagaggagggagcaggttgtcacgagaaaggtggagctttttttgtggcaagaggcacgagacgcaaagacgggagttctactctcttcgtcttctttcttcttcttttttccttaacaacgtatccgtcgttttccactctccacttccggtgtccgttgcccgttcgcgcgccaccgctctcttccccgtctcggatgctgtctcggcaccgtctgcacgttgattctccgctcgtttctccgtaaacgttcagtttctcgtacgtttttctcagtcccgcgaaaattttgcgcactgacaggtccgtaaacaaggacagcgctctgtcccgcaa

SEQ ID NO: 3702 - DNA, 1645 bp, Toxoplasma gondii
  source 1..1645: mol_type = genomic DNA
gacatcacgaggttgcttacagcagctgtggaacatctgccttgcagcatgtggccgtcgcatcatggtcagtcccggtgttctttgagatacacaaagggtctcgcacggggaaacaagtcaacgcgtgagtagtagtatgtttctacagcgttaatgcctgttccccaacagatcggttagcatacaattgtaatgcagggatgggctggcgatacgatatgtggcaacagcatacagtggcctcacgacgacagccaatcgtagcccggttaaagtaccccaattccaagttgattcgtttggtccacatcccacaattaatgcggttgaatatgcactattttcagacagtttctcaatgcgatgtcgcctgctagcgacgtcggtgagaagcggaagtgttgaggttttcagggctgggtaaaacgagtacaggaaagctggaggtcgaggccacagtgggaccaagaccagctttgggctatcgtatgtgtcttctcattcaattgctagttttcccgctggaatttgaaaaacacacgcattcagcatgacagttgtccctcagttccacactcacttcgaaacacacatcgatcttacgtagcagtcctcagtattccgcagcaacataacaataccagatatgttatctgaccatgggtggtgccagcattatagaaacggcaagactgtgcggtgtaacgtggctatgtgaagtaatagagagacgccacacacatcattacgccacgcggtctttcatcggccctactgcagaccatgtagggaattaagaaaatgagatctaacagacgcctttaactcggaaactctgttgctccggtgtccaagagcagctatcttatgaggtcggggacatttctttgcaaatctggtctgccacgatgccagatgccagtaaacgcgtatggtcaacagccatatcccctcgtcccaattcttggaggctgccgcgtacgaaatttaagacactgctaagagtcaagcgatgcagagtacgcatctatatcggtgtaagacctacaatgggtttcacgctttgaaaaacctcatttcttcacttattttgagtagcgttcgtctctgtagacgatcccgaggattctttttcccagcgtgttgcaccacaggggacctgcatgcaaccatcccgtccattccttgcatgcagacttggccaccgcactctgaatgatcctcggacgttgcactttcagatagataacggcgtacccagatcatttggtcgctgaaactgaaacatgagtgaccagaaaacatttgctggtgctttgtgttggatctacttgaaatgtagcggaccgcaggtgccagcaaactaccggccagacacagcttacaacggtgtttcaccagtttacaggccataaggcgacaacctgttacctatacggggttcatgccttgaatcagttgatctgtcaccattcagaagggctgattttgtttcgtttatggtcttcagtcctcgtacgtgcagctcagcgctagaaagcgaggctgttgtggcggcatgcgtattccgaggcctacggttcgtgagtgaacatcttacaggtgcgtgaaagataggatcaaattccatatttatgctcaa

SEQ ID NO: 3703 - DNA, 4430 bp, Toxoplasma gondii
  source 1..4430: mol_type = genomic DNA
ttcgcataacttgcccacccgtccactcccgctccttggaagttcagcgtcacgagcgcatgggtcggtgagacgcgtttctccacgcacggacggtcagtgtatgttgtcggagggccgcctctgtggagaacgagaaaaacgtaccgatagggtagaggagagactggatagcaagacgagtcacgacggtcgacgtcagacgtttcgcaaagcggcttcggggcacgagagcgtcggcagctcggcaagcggccgtccacgcacggcgtctcagacaacacagggaatttcctgaaaaagaaggacacacccactcaacagccgcaggagcaatttgaccactcgcaacatgcttcccattcgcgcgtctctctgcccagggaaaaacggcgtagcagtccgccagcagctagtgtcggcacttgcgccttaggactgaggcgttcatgatgccttccggtgaacaaactccgctggcgcccgcgtttcattccaagcgttcatctagaaaagtcctcgcaagaaaatggcccttccaaaacgagttctttcgagtaactggccacgccttcacacctgccgcgctactatcgactgttcgtgcagacgaaagtcctaacgtgctggtgtctgtatcgaacagagaagcgaacggggaacggtcgctgtcgcccacctgcttcttgaatacgcttcacaacggagttctctgtagcttgcaccgcttggacgtcatgctcgcgagcggtttctgtcgcaggctctccgtcgctggagtcgaactgcaagtgcaaggcacaagacgacgttcagacccatgttgtgcggacagacacagaggagactttgtcagtggcattctaccagaaaatgaacatcacactacagtcaacacgcgctgcttcttcagatcatttctacgccggatgcagcccgctactccggagttgcgtgaggcaacatccgcaaacaccaacgtcaattgttgtgatttctagctgcttcccgccaccttctgatggctccacgcgcccctttcgcctgcacgctcccaccgcatgctgcaaacgagggcctgaagcaagctccctagttcttccagctcatcttctgtctacggcggatcttccgattcgattggcaagcttctgtgcgctcgttgaaggaatcagaatgagagaggacgactcactgaattcgaagcgagagttccgtcttcatctggagaacattcgacgtcctccctgaggcccagtttcagggacagcagcaatcgctgaggccaccatcctcgggtcgccgaggccaggggtgacgtgatacctcgcgtgtctggtgtttggccgccgtcgtggtcggcctcccccgaagtcccgcgcgttttccgtcgaagtgatgacgacagatgcgaacttgagagcgggattgccgaggcgagggcgtttggcttcgcgggcagaggcactgtgcgaactagaggttgggctcccgtctgcaacgcgagtgcaggcaggagtggcggagcaaacctcccggtggcaacatcgtgtgtggagatgcagacgaaggagtacaccgtggaaaagacaaagaggagaaagacgatccagaacaagggccggcgtcggtcggagaggcaagcagaaaacttgaagagggataagttttgagacattggagcgacgggtgaaagcgacttgcggcaggcagtcgcaggcgcacgggccctaggggttcggggcaggactaggtcaccggagtgcgttctagacgcacaggagacacagagaggcggatggtgacccacagatctgcctctagcgacttgtagttcatcacatttcattgtgtaagtgagtgagcagcaatccgcagaaaaagggtcccggcggcgctgtctcgaagacctagaggtccggagattggccgtccgcacttcaattgaggtccacagcagtgcagcgtcctcttccgagttcaatttttcagcaagggtgcattcaactcaactgtgtggagtttcctcacaaacgtttccggtacacagtccgacaacctcggtcgcagctttgaaagtgtagagacacacgggcaacgttaacgagcacaccgtctgcgcttcgggatacatgaagacacccgtaacagctccttttgctgcaggtgccccacacacctggaacttctcactcaacggaaaacgtccaaggaaaggttgagatgtttgacacacaaaaactgtctctagggacgcggagaaaatcctgtctctctcgaagggtcgtctgtcgcgcatgcgcggtggacggtgttctcgcggtccaacctcacaatgcagacacagagccgtgactggtgtccctttctaccaacttgcccgcaaggaacccatgagaagcactcactgtggattctctaatatattcacgctgaagtggaacaattcaccggccatcttcaggaaaccaagggaaagagcctcccgctgttttgccggcgcactcgtgccacgcctggagacgagactggtcagcaacaagtgtcttccctgcgttgaggcgagggacccaagcatcgcaactccacggctttgaagaacgtaactggacgggtattatcggcaaaaagaaaggcagaaagtaaacagcgaggcgaacagacggattgtccgtcttccctctgcatgtaacacggtactggcgaaaacgatgaagccgcggtcggaaaaagccactagaattctttatcggaatccaaactgtgtgttgtgctaacctatcccatcacagggaagtcgcggtgaactggatctgcaggttgcatgacgactagatgatgtactgaatggtgcctgcacgtttttagcatagttgggttccaacaagccaccgcgtgagtgtaggtattgcacagaatacagccaaagacgaattccatttcgcctcggagtttgcagaagcggcacaacgtcaggtgtctgtctgcaggcgctggctaaggatagacgtcatgccttttgtggggatggacctgtggctccagaacaagataactgcagatttgggtgaggaccgtgtacagcggcgtgtgccgacgcccactacgcattgtacataaatggattccgtaaataagtgggttttccactgaccctcgaagagctaaacagttgcgcgcacgatgcacgagatacgtcacccgtgctcattttaaatctcgcctcaaggcttccagcatcgagatggctgacccagtcgaaatgtgtttgcaaaggtgacgaaacctcttccgcataaacctacagaaaatttgccgctaaaaaattgtgcctagtctatgacaacgggtacacaggaagtcgagtcatgtccatccctgcgctgtgcgcctcttgcctgctgggtttgtctactttttgatgtcccacgcagacaagagttattactacgatgtctacttgccgctagccatcgtctagatcctgaaagatacatgctttatgcagaatgatcttttaaaactaagagttaaatcgcctcgaagcgttgcaccgctctatcttttcctttaaaattcccccaagtagtagcaatctacaccgtgggttgaaaaagacgcacaccagtttccacggttgtgcgacgcacaatccgacgctggatggtatgtgacagttattgttttgtcttggaaataattgtgtggcagagtgtttcagtcagaggagatcctgccctcattctccggacagacacggctttccgccctcgcctcacgagcttacacgctcggatttattactgcgcgtctccgtcgctctggaggccgtgtctttccttccttgttagcatcggggttttcttcacgtcaatcccagtcgcccacctgtttgctgtcaggtctcccgtttcaagtttgtttattcgtttatctctgtggtatattccaggtgttctggcattgtccgcttcttcgctgtcgctaccatgccttaaaacaaagatggtcagatgatagacaagggaaaaaggaacgagaggcagccattggtcctccagtggtaacatggtttctttatctcctgcattcatcgcatattgcgtgccccttcaccggctgaaatcacaagagtctataattcatgttgccgattttcccttcttccgtgtgtttcatctccagctcggcaaagctgcaggaactgggcaaaagcccttcattgtgggctgttcgtgcagggtatcctgcagcagaaacggcttctctcgatcgcggtcacatgtcagccgccaccagtgtaaccagagttcgtcatatttatcttgtttcgagtacatgacgtacttgacagactaagacaggggcagatctggattgttcgaggaaaaaggaatggacagaaaacgtcgaacgcttacggatttcta

SEQ ID NO: 3704 - DNA, 1821 bp, Toxoplasma gondii
  source 1..1821: mol_type = genomic DNA
gcatggttacaatcccgtggaacagttcttttggttcaagttttctgtgcgtcgttccgacagattttccccccaaaaccacaagtataatccccttgtggtaaaggaagtacttgctttccagtctacacaacacaattgccggcctctagcatcctatgacagtctgcgacgtttgttaatccatgctcagggaagccctcgctaagcagcggctcgcgtcgaaaaccacgccgactttgatgtacctgtgtacagacaactagcggaaagcgaaattccaatgccagtggaccccggatagcgcttttgctgtctcagaaagcctttttgatttgagaacataccccagaaactcatttgtccccttggtagtccatatccaaggaaggcaataattcgatgaaatgtagatacaataattgtaaatggcgattaatctacagaagcgtcgaggactctccgttcataccaggcgtaaaaaacgtccatccagttactaaacaggtgtcaggccaacaagaatctggtccatgtattccgtacagactaacattaggaaggagactaccacagtgaattttaggttttccaagaaatatatttggaaaaagagacttgctagtattaccgtaattacataatatacagtcccagccgttccggttaagctatagaagagtcaataaaagagttagacagtcgaaaggcatagaaagcatcaaattcactgactggtagtaaaaaattgacttgtgtagctatttcgcagactgtttcaacgatatgaataaatagacgttctctgcaagcactacgccatccagtgtaacctcagtttgtccaccatcatgcaatatatatgtatatatatatatatatatatacatatatattgcggatggttcgcgatcaaagcccacatagggttacgtatcatacctgaaccgttgaagacgagttaccgaagtggtcatggcatgacaacggagacttgtcgaatctcctctcgcagtcgattttctcgtcgattcataatctttatacagaactcgcacaccacgacgctagaaaccacgcgaacggaaagggaactcggctgctggttttgcagcgttcatttggcccctccccgcagtatgaactatgcagccagccttttccctacgcatcgtcacaaacgcttccccgacagcttctgtcttgcaaaagaatacactgaaagcgctttgctggctgtaagagaggaaacaaaaccgtgtctgaatgccgcctcagagtcaagaccggttcgttcgctgacgtcaccgcgcatgcagcgcgattttttcgcacacttttcagcccagcagccccagacagcatttgcagcggcgcgtactttcgtacatttttcgagcggccctttgctcaaggaatgttaatgtccatcgagttctatcatcaatgctatgactgtttggacatgtttgcggtacacgagcagctatacgctgggaggctttgcaggcgagccgtcagaccccaccacggggtaaagaaatcgccatcgccatatcgtgtaattgcgtctttctccgagttttctgacgccctgctttctgaggtatttgttccggtttccgtggtgtgtagttaatcgctgtgctctgtttctgtgcttgacccatcggccgcgccaaaatggccggtgcaaggacccagctctcgcgtagaggtgggtctgcgttctttactgtttgccgtctgtgagtccttgagaagagcaaatcacctgatttttccgcttgcgtcgtctcttctacttgcttctcgccacca

SEQ ID NO: 3705 - DNA, 2527 bp, Toxoplasma gondii
  source 1..2527: mol_type = genomic DNA
ccccaaagtgtcttgctcagagaatacacaggcatgcgtccacagtctagcccagtccaggggcatctgagaaagctgaaccatggcttggtcttccttctggggctccgtcgtcccttggccggctttgcctcccccagactccgtccagcgctctgtctccagcaggcgcgagcctcccagggcctcgggacccccggcgaaagcctgctcagaccccaggggccttttgtctcgccccgcttcttcgccctcgccccggggtgcgccaccgcgctggtctctcgggagatacaaatcgacataaagctgcgaaacggctgcagcctgcggcgcaagcgtcctctggaaagagtgcagagtcgaggtgcgaatactgttgaagaatggatcgtagacgcaggtcgccagttggtagtttggaaagacgaggagcagcgagcagcacgcatcggctcctggaacgaacgagccgggggcggggccagaggcaaacggagagagagaagaagcggaaccaaggcatgtgtggcgcgcagctggcgcggggggtcgtccagcctcgccggcaggaaacgcagaagacgagcccgcaggcgacgggagacatggcgaagggccggggaacgcatgcgagaacagaggcgggcagacagaagcggagaaggggagaaacggtgagaagggcgctgaacccaaaaatgcatttccgccaactgaacgcgcttgggagcctttggaagcggccgaggcgcctggaatcaccgaaacagctaggggcactgccgctaggggcgtcgagcaccgcaaagacagaacgggggtggggacggccttctcgaagtccggagcgttctctccagagaccgaagcacactgaggaagaagagatccaccagagtaacctcctccggccgcggctgagggctcgcgaggctccgcgtctgaggcctccaccggcgggaaggtcacatcgtagacatcgagagaagaaggccgtgcgacaacgagactcggaagggcagagacaaacggacagagcagaagatgttcaacacggtctgccttccgcagctcgtcgaacaagccgaagaggcgcgacggagcatgcgccatggtgtgtcggaaaggtcagaagcagagaaaagctgacaggaaaggtggagtcgggagactccgaggttccagcagcgtcctcagttcggggccaagcgatttcttacattctctgacctctggatgaggagaacaagaagcgagaaagggcgctcagtgggtctgccgagacagctggcgacagcatagtcaccagcgaaaaagacctacgggcggagcaccgatccagaaaacgaccaagtcacggagggaaaggcagaggaaaagaactgaagctttgtcagagtaagacggaatccaagacggaatctggagagaacaaaagcgtttctcaacaggacacaaaattcggggtcggctggtcctccgactccagtgttgtctgggcaggaggccaaggaccatgctaaaaggaaaacacgaggaaacaggccatgtcaaaggtttctcgtctttttcttggcgatctgaagagcgtcatctattttaccaacatgcctccgcacaaaaattcaggtctgtcacgggcccttggcgcattttccttcacgcagaatcaagaaatagggaaaggaacaagaaccgaagaatcttaaagaacccccttcgcctttttcgtctgctccgtcaaagtggaacttgttcgatggcatttccgctcgaaaccaagccttgatggctgcatgctctctgttatttctctcttgctgtcgtgtgcatgcggtcgaaactgcagccctgggaaacaacgtaaacaaaatgtctgttgagtttcaaggcgctgtaacctaatcttttgtgctgcaagtgaatcaaacaagttgcaccgttatcgacatctcgttggcatgcggatgacactaatactaagtgaccgccgccttttgctgaaattgcctttaacaccgcacaagacgctggaaaatgtgtgtacttgtacagagcagacaggtacagatgtctctgaggtatttcgaatgtatccatgaccaagaactgctcgaaagacacgtcgtaccgtttaaccaggaacctgagatgacggctgcgctctgattccacctgaatctagaatcacagagggggaagtgccggtgaatttcgcgttttagtgtcgttggtatatttaacgcgccacggtctctctcgcggaaagttgaaaggatgaaggtagatgtgaaccttaaccttaacacagagggtcgatttttcagtcggcccagaaaagcaacgcagaataacggtgggagggaagggggcatctccattcatcagaacggcctggaaaagccaggcgtcattaaagaatgaactaagaagaagatctgctgtattgtgaggagcgaatggagggaaaaagaagagaagaggctacagagaagggcggcgaagccaactggtggttagtaca

SEQ ID NO: 3706 - DNA, 1932 bp, Toxoplasma gondii
  source 1..1932: mol_type = genomic DNA
tcaactctcgtgcacttcttgagtggaattcagctaaagttttctcgaactctagttttcgctagaggcctgagttgacacatgtcagccccgggtggtagctcgctgcctatacgcagacggttgacagtgcttctctcgattttcgccctaagtgtacggattacaatggatctattcgaacattttcgcagtaaccgtactagtgttgcagatgaatgtaacgtttaattcaggttgcgtattcaggtacaggaaacatcgaaaccgaagccgctggtatcttgcggcgtctgcgcaacgagatttcaaattgctacaaacaaatgcttcccttctttctccagaaaaaatcgttttgagaggctatttctgcttctgtcgtgcccactcagttgtttgtgtgcatctgtctcacaacaccagcgaccacaccgtcgagttcttggtgcctcatcggggctgtgtcgagttccttaaagcggacaagtagccgtaccgtgtacaacttagcactctcgccggataactttttctttgttcgttttcctggcaccttcactcctgaagcgttggggtggggaaagcttagaagggctcggggctgtgttaccagcaaacgagagggtagcgcttttgcttgcatttctgtttatcgactcgacctatacagttatccacggcagagtcttcgtacatccaccttcctaaatgcaggatctggaatgtttcaccctgtgttactctagacttcacttcacatgtgagagaaacgcgcggatacgtagacgcctgtgtacggcgtatttctgtggtgtacgcgagaaatagttctcgtcggtgttctcctctgtgcaggtaagcataagaaacaaagcactccggacagaaagagtcacttacggttcgtacaaaaacgtacacatgacgacatacacgctttcccgtttccatgtcatccgctttgcgtcgtgcgtatgtttgttttttctgtgcatgcatgtatgactggtccagtttctctttttagaagccagttaaagtgcggcagaaaggagtcacaaaattctcatctaattgcctcgcttttttttgaaggtaacgtaaaaatgaagcaccatattctgtcttccgcttggttcgcatgcatgtttctcttttccaatttttcgtatacaagccgccgccctcgagcgtgggccagcgctcaggtcgccgccgctcctcctgaaggcgttgaggccggagcacacatggatatttgcaagcgaagaaatgcaaatgtctctccttgtgttccggtgttatgcgcggagaaagacattagagaggaacaaagtcaagttctttgtttcttggactttctgcgttctacagtccccacaattccggcaaccctcctcactaagtctgtgcaactttctctccggtccccgttctgcgcttcccgtcgaggtgtgaagcggtctgagaaccagtctctttgcgttcttctttcttccgcggttcgttctttcgtttctgctcctgacttctctgtacctcttccttctgagtacttgtcaccacctttctctgcgcaagaacgtctctttttctcccacccccttttctccagaggttccaaacaatatttgccttcctttcgcccttgtcttgtcgttcgtttcttcccttctttcttggcttttcgcctgcttttttcattttctgtgttgatttttctcgcgcttttcgctgtctcgtactttctcgactatttcggcgctccaccgaggtagaagttcgccctcagttctcccctgcccggcgtcgactccatcgaggaaaggtccaacaaccttgcagaaagggggactgcgttttccctgaacggctacgaagctttctgtccaggctccaattcgtctgaccgcctttcccacagaaaaa

SEQ ID NO: 3707 - DNA, 1852 bp, Toxoplasma gondii
  source 1..1852: mol_type = genomic DNA
gattcctgccctgttgttctctcccgtattctcctctccacagcatgtttccgtctgccgccgaaagcgacaagcctccggagttcccctctctgacaggcggggagatacctgagagggaagcgcttctctcttctctctctcgccctcttgctcctcttgctcctcttgctctgcctcccttttggtcttccttccgtctctgtttgctccaagagaagtcctggagaggagctgcccccgctcgggcagcgaggcaggagacactggagcccagaagcgccgcgctcacttcgccgtgtctccgccaaggagtgcgagagaaacgacgcatggacgagatgggcgcgggcagagagagaccccccgcgagacgcagcggctgtggaggcaggagagcgagaagaaggacgagctgaagaagcagctgcttcggagcctcagagacgaatcccgccatcctgctacgccatcttcatgcgttcgtttcgcttcttcctcgcgaggctccttctgcgctcgcatgcagcagaaatgcctccttttttttcgttgccactccgtctccagtctgttcctgggcttcgcggcgaagtcgaaagaaagaagtgaacagagaagggggagtcgatgtatttttcaagttcgggaacctctctcgcgctccaagcgactcggcagaagccagtggcacacacgctgtctgtacagcccgcagagcaccgaagaagtcctcgttccagcagtcaagcttcttcctctgtcccggctgctttctctgcctccctgggttgggagggagggagggaggacagacggagcagcagtcgagacagaggaagaagcttgactgaagcggcaaccgccggcttcgacctccatctgaaatgtcagccggaagaagcgcggaacagacgaaatgaaggcgaagcaggcgaaagcgagaaacagcgtggtacttggcgggaggacgctagggactgccagcgcagcgggcgaagtcgcgcgcgaaaacgaagggaagcagagacacgaagagagagaaacaggagagctccgcgcgaggagacaagcctcgctgcgagaagaaaaacttcgagaaaaagccgcgtctctcgctttctcctgcgttcttctctcccgtaaaaaacgcgaaacgcggggctccggtggccgcacagtgcacatgcctgtctttctcgtggtgtcggtcaacagcaagcagcctcccagaacgagcaatcgactcttctctcgtctttttctttcgcatcccttcttctcacctgcgttcttccccctcttcgtgtcgccttcttgtcttctttgcgtcgtttaggaacagcggctcctcagagaccaagcgagagagagagatagaggtagagagagagagagaccaagcgagagagagaggtgcctcccggggaaaagaagggcgccgtcggtctcgccgcagcgactgcgcgctcggcgggagagaggaaatcagcagtgtgtgttgtccgtttgcggccgagacaatttggaacgaaaagtgtaaaagagttttttctgtcagaagagcgtctccttcgctcttgcttctctgtttcgcttccccccgtctctcgccggtttccgtctccgtgtgaaggcgccgtagacagggatccttcgcccgagaggcggagacaaagagctctcgtgttcggtcttgttctctgtcgttttcccctccttttgcttcttcacctctgctttttttcctcgctgcggaacgtcttcatcgccgctgcttgtgcgtggctctccgcgcctctctcctctcctctcctctctgccccccccccccccccgcccctcccttgaa

SEQ ID NO: 3708 - DNA, 3942 bp, Toxoplasma gondii
  source 1..3942: mol_type = genomic DNA
ctgagtgggtagccgagagaaactccgagaatccaggatggaaattcgggagtgacgaggagagtgggaatgcttttcgacttctcagtaggcgcttccaaaaattcaggggaggggggggggatggggagaggggctgttgccctggtggctattttatctattgggaggcactgccggtgatctcaccgaggaaaacaaattgctttgtgcattgtaccacctacgtgtgtagactttgtgcatacaaggcaagccgtaagtgccattcgtgtgtgcgtctgatacacgcctagttccgtcggacgttaaaacgagaggtcttgtggcttaaacggagtaaatctgcaacgcgtgtatggaggcatcgcgccgctgcgttcggcccgcggttgccgagacaacgaataagcagttagaaactccagaaaaacttcgatgaaacagacgcacgtggtagtcgtgagagagacatgtcgcatgcagccgaccgcatgcaacagattggacgcagacagagcatttgaaagactatgtttatggcaacaagaaagcgcgagagcatgggtagtgtgggcaaggccctctgcagatgctcgtgttgtctgggtgtgtagctccatcacatcagcagccggttcttcaatctcattagtcccgccttccttcgtagttcataaactggaaatcaggtctgggcatcgacccgaggtcgaggcacaaaaggcagctgaacgtctgagtagcatcgaattcttaaagaattttccaaggatttgtgcgcgcatcggcggacacgctttgagataggaaacacggaggtgtaaaatacaggcggggtgtctacacacttttctcttgaaaacgcgctgaagatgccttcataaacaacctttgtttcctccattcgccgtacaaactcgacttgagagctccgtctaccatgtagtgactgtgtttccatctggaacttgcaacagaatatcaacctttttgcccaggtggttgcttctctccgtgcggttgcaagcaaaaggttacaaacttgcactagcggcggaacacattgtttcacacgatacactgcggtcaaacgtgccatgcacagtcctttcagaatcctcggcgagttagggcggcactgtagaaatgcatatatgtaggtcaggacacgaaaaaaagggtgtgagggaacgacgaagtagtcattgtctcagacctacggggaattcgacacacagcgaagtgggtgtccaaaaagcgacgcagctccccatcccaaagatacacgtgagtgaaggatcacgattcagtagtaagtacatgcaaaaaacgaaaatgtatgaatacgagtgtacctggaaaaaacagtgatgccctctcacactgggtggagcaaacgcgatgtggctgtgtgctatctgtgaccgtggattctggttccgccccctattggatgcgtccacattcacggtggcgttcgaattataagcagcgcattaaatgttaccgaaatgaaggatgtttaagacaaaacgcagcagaagcaaacaatcttgctttgcctgtcacaccacacagcgctgtcacctgagttctaatccgtgaagccacttgaagcagcaaagtgtgtttttcgcctgttgtccgacaatctcgccccgcagtggtttcccccaggactgcagccggacacacaacctcgggacataaacaagaaatgcgtccgaaaaacgctggtgcttcaattcctgttcgctgcgataactcgaccacagtcaagcacttctcctgttgactgggggggctgagcaacggaaacgcttgccctctccaggacttttctaatgtttgtgtttttgtcaaaacttctctctccgctagctaggcgattgtttttccttttcggggatcctgggtcaacgagacgacaagtggcaacccggttctgcgatgagtcactgcagttgctttttccagccctctggtcacgtccgtgcagacgtaagaaaaaggagtgaacgtgagtgtaggaaacaaagcattagtaccgaacattccgcgcggaattaagagcatggctttccccgattctgtgtcgtttctcgactccggttttaggtcacccaagtcggaggtggacagcagaaaaatcgcttcggctcaaacgcaatatttgttgagtagggtatttccggttgtgtgcaaatcgagaccacagattcgagattcggatggcttttccttttccaaataaaactgatcagtggggaaaaaacattcgaacgaaaaaatttggaaaaacggggggccctgtgggtctgctgtcgcaagactcgccgcaaaacaacttaggtcccacacacacacgcaaacaaacgtgtattgatgtgaagagaaaagcgagtaaaacgagaagggagagagtggtgcggcatatcttctctttgtttaaaactatgtcaagaacaccggcggcaacgactctccgatcgtgtccagagcagggctgtacatgcacccttgacaaatttggacatttttgcgtatgtcgctttgttttgtgcgtccgcgaaagtttgtgtgtggaaagaggaactcagagaaacgcatgtcaagctgtcaaagatctcgcctcctttccagcgtcttgcccacggcctcaaacgccacgggcaggcttgaccgtgcccggatcacttttggtgtcctgaagtcgcgtttccctctttgatactcactattatgatggctattcctacgggtactcagatattcgatttcgttaggtacctttatgaggagtccagatctagacgacaagaccagtagcaattcagttgccgtggagagcgggtcaaccggttgtaagaaacctgtcgactcactgtccacctgagggacaaaacaaaaactccgctcgttgccgcagcctctgtgctgcgaggcgcaccgacgggagcgaagacacataaaggaaaagacaaagaaacagtgagacagagatgccacagcaacgaccgtccaacaacctcagtcgcggcaggagcgtgtttccgtcgttcgaaatgccctttgaaccccgaaacgctcagcatctattctggttttctggaaatcccaacgcaaactcttgaagcttctgtgccttcatgggacacatgattttttctggaggaaaccgggcagagtgtcggacggcagcagacgcttcagcacagaaaagagacacaaatgccatgcgcaaacaaacgtgatgtgaatgggattgattttcgccgaatcggtctctccattgccttacacgtcttggcaaggaccttcagctggacttcactggcttccttttcacctgctttacctgcaaaacaacctgttccttggaaacacccgcaagccgagcggagacgactccgaagctttcgcgttttccattgaggacttcctcgccttgcagctgcttgcttttcttttcccctccagcctaagaagtctccgtcgcgctgagcgtcaacagtgcatacctgttgaaacagctccgtgtcgcgcatgtgattccaaagtcctcgtagtgtctctcctgaagtgccagggttggcttcgtttctttcctggaaactcacggtctcttgagccagtgaatcggggctgctcccgtgcgtctcagttgacccgggtgttctgttgtctcctctctcgcctacggtccggggatctgtcggtgaaacctcgatgtcgacgccccagtgcgtctacgtgcatgcgtgttcacctgcaacgagctcatattttgtgatacccacacggaaagtctgtgcgcttcggtgaaacactctgtcatggatctccatgtttctcaaggccccttttcactctgcgtcaattcctctgccctttgaaaacgtccgctttttggggtcctgttttcacccaaccaagcca

SEQ ID NO: 3709 - DNA, 3284 bp, Toxoplasma gondii
  source 1..3284: mol_type = genomic DNA
tgaaaaactgggaaaatcagtcgagggcaccctcgaggtgttccggcgcgaccgaaaagtggtagttcgtgtgcgtgtgctcagtgtacgcgttggtgcagcctccgtgctgcttgatgaagttggaatattccgtttcatccggaaacttctccgttccgaggaatagcatgtgctcgcagaaatgcgccaagccttcgacgggcgggggatcgaagtaagagcctacattgatgtccagagcggcagaggccaggtctgccgccgggtcgctgactagccaaacagacaggtggttcggcagcttcacaaacctgtagctgcgcttgttcgtttttggtttatcgatgtcctccgtctctcgtagcgccatcttgagcataacactatgcccaaatagtcagctttaccacagaaatcgataagaaagccgcctcacagcgtataccaggtgacaactgacacgtcgacttggattgagggtgcaaaggatgagaaaaaacctggatatcccgcccgcctccccacatactgtggcggacggatcgaggggtcacgaagtgctaggggaagggtgataactaacagagaacaggaaggtggtaactgttgtctatgttaagccgcgaaagaagtacaagctacgattgcagttccctctggctcatgctgccgcagggacttcacgggaaaatccggacgctaacacagcgggagctatgttgaaccagcagccgggactttttgaaggcgaatcgttgacttgacaaaaaggaaccagaagtaaaggcatgcgacaaagggtaggaaggaaccagacagaagaacttcgcagttgaaaaaatgcgttggctgaccctcagaactgcgatgagcaaccggcgagcagcctaagacggtgatgaacaaaaggtacaaggtggcgggtgagcacacaaccggaagaaacccagtacggaagaccaaggaccgggaaagcaagattgcagcagcactaaacgcggggacggacgcgactggggtagtcagcaacgaagtgttacagcaaaaaaaagatgcacggtagacgctacgcaagagtagaacgcgcaaacggcagcgtgcggcagatgcagaagacgaacgcggaggaattgacgcgtcaagaagaagaaactcgttaaaatcgaggcggatcgggacgcatgatagataatccaagagactgccacaaaggaaggtacacggggaagacaggcagtggcactcaggagacgttctttcagcaaagtttccggctgcagagacgaagagtccgacatctgagcccgctgtgggcgccgagacacactcaagacaaacaattctctctacggtgctgaaaattgttatctaaagtcagaaagactctaggtgaaaagtaagtcgcaattcaaccataagaagtctcgatggcggtttgtggaatgattcggtgcacagtagaagtaacgggccgatcgcagaggcagcgattgcacgtagtcgactgccgaagaccaaaggcgcgatacgggaggccttgcacttgcaagacgttgctttctgttacaacatgagtgtggaatcttctaagtcaagtgcatgtgtcattcttctgtgtgatgtagcgacttgtgatctcggagactagattttggatgaatcgatcaaccccgaggggacttccgtgcaagcgcgttttaaacttctgagcttcaaagtcgatcgcttgatcttttcgacggcgttgaaaccgtcaaaatgaatctacttgctctgtgcacgaaagggggtaccgttttacaacaatttttagcatgtcctgtgaatttttgcacacgaactagcccagttgctttgtgcgcattagagagatatgtgactctcctcctcacgaatgttccggtcggctttttaccaagagcgagtcggccactgcggcggaccgtccttctggagtggtctctctgcggcttccccttcaaggctgccggggtttctctgctgtttcgtttcgtctcaaggaagcgtgtgacgtctctctaacagcccgttcttttccctagaagatgtgcgtggatgacgcgaggaggcgctctcatttactccaactgtctccttgctaacaagcaggggtaggtgacgggtgaccggcgttctgcgtgccgcgctgacttcaggtggctcgggtgacgtggcgcgggattccacagggggcctagccaatggctttcatgtcttgaatatgttcgtcatttacatggtgaaggtagtaacgacttttttctgaagggttcagaaaaacatgctggacttcttctgtattttttcttcctcttcaactcgaagatgtacgacaaagacactgccgcgaccgcactggaaaccacccatcgcctctgctcattcactcggccgcttcatgagcggagtcgcacggaagcttcgggaaaaaacctgaatcgctgcaaacacgatagatcggccttttttcactgagcaaagacactgttttttctccttgacgcctggatgttccttgcgaggtcaactgatgttccttcttgattcgacttggtaaccgtcctcacgcctcttgtgcaaggtcctacgaggaaacgaacgctcctcgaactccgtagaaggtgacgactgcagacgattcagcccgcagaacaacggaaagatgatgtgttgtaggaaggagccaatgcgacatgttgtccaaaatcgtttcgagtgtctgtttagaattcgagctgtggccacgctcttcaagctgcctccgtttcgcgcgctcccggacgaccctccaaacccaaacacgggcgagtgaaacgcgagacctctgtcgttcccctcattttcgagcgttttctccagagtgtcttgcatgctgtcaaagtgaaaacgcctaggacagtttatattgatttgacgcacgtgttgcctccggtctggttcccctgtacgaggagcacgtgcagctgacatttttcgtgtatttgtctgacacaagcttctcttcagtacaaacacagccgagaacgcgtatgagggggggatcctgcagtactcgtcgacagaaaatttgtaactatatcccttgttactcccgatttcgtcttatgtatgtcttttttgtcgcccttttccccgtattcgaatgaaatcttttatttttctacttccgtcacggagcgtttcgccgcaacaagtcgccgtgcctcaaccgttccatgtaaggccagattccgaattctttgggtgacgttccgccacca

SEQ ID NO: 3710 - DNA, 4553 bp, Toxoplasma gondii
  source 1..4553: mol_type = genomic DNA
tattgcctggaacctcgaggtgttctggcggtgtccatagttttgcgcagcaaccgtttatccgaggactgcactctggttcgagaaacacgtatgtgcttcacagcaaattcaggtgcatccatgctctacgtggcggcgtcgtgttgctttatgctctcgttttgtgtgcggctttttacttttttccagccgagagaggttccacgtggaactgacgggtgcaggcatcagtcccccacacgagtggctgtttggcgagggagcggcggctgctccaagtgcctcggtgaagtttacttttcaaacaccggtgaacggaaactgtccgtcgcctggacaccttctccgtcctgcttcccaagcgacccaagtaaacgtgcaggtctgtggtaccgaacctgtgagttcgactgcgtacccgaatcttgaaacgcgcgacataaaatctacatgcgtagacccgattcttcagctaccatgggtgggaatacgctctggagtggacgagagaacggtatctccgggggcgtctcttccgacgggtggaaaccgacatctgcatcagacatctggtgccacggagccaagtgacgcgggtgctcgggatgaacgccacagagaagcatgtgaagaacatgaatgtgtatgtgaggcgtcaatctgtcagttgtctcacgacattcttcatgacgaaacacgcaatgaggagcggaacagcggagaacacagtcagacacagtccgacagaaggcagcaaagtagtgacggaggcagcggcggatctgacgactcgcacgaaaagaatcccactgcttcttcagagaccgtcggtgccccagtcctgcatgcgcaaaatagtccactttcttttccttttagtgcagttgccgcgaacgagacgctagagctggacacccaagaaggaatgaaaactctaggggaaacacagataggttgcagtggatgcacgcctgcggagcgacaaaacagactatgtccacgaggacggggaagtggtatgcctgtgccaacagggaaggcattctcaatgaaggactcagattcacttttctgtagaggatcctcaagaaatactcccgttgagagcccgtgctcccggcaaggcactttgtcgcatgtccacccggtggtggtcccagagccatcctattctcaaccacttgtgcaggccgggtctgcagtttcgtctctcgagtctctcggtgcctcctcaggctgggtagcatcggtccatcggtctgccttagcgttcccactcttgctggactgtggttctagtttcgtacagcaagacagcagatacggttacccgcgattcgaaggcgtcccgccctcctcacctgccttcctccgtttgttacttgtggaaggcagcgctttgttgctactggatgtggccaaagaaaagtgtttttcgcccttttataagctcttctggtcgcgcgaggaagcacagcagctcaacaaaaagaatgccttggccgcgtggcaacagcatcaagctcctgcacttcatcgacttgatcaacttcgccttcttttaacggaggtgcaccgacgcacgctacggcaaggcgtcgtgactcatatggtaggaggacagacggggtgtagacgtcttgagaggagcagcgaacgggagaaaggtgataggagtagaacggagagcggaggtacgtcggaagttcctcgtggagcaggcagggagggagacgaaacgagagagaatggcgacagcctcgatcctgagggcggaagcagcaacgcgggaatcgtaaaagccgtgggagagagaaaactatttcagcaagcgagtgattgctcggaacagaaactgatgcagcaagagattcggcaaatagagatgcagatcagacgaattcaacagcaaatcgagctagttcagcgggatcagcgcgaaaagcaggccaaggtacttcaacggcagttagaaaggcaacatggggacacgggattaacttggccggacgaggaagaaacaacaagggcgggcaaagagcggaacaggaggcgcgacgatggagagctgggaggcgttgtcctccaggtgacacaaatgggcctcgtcagcgccgtcatggttggtgtaggagctctaattttctcttcgataaagaagggagcgtgatattttgggtcatgttttgaacgggtgaagacgagtatcaaagtcagggtattgcggcctggtggaagctactgaatgaaatgctcccccgggtttcctcatccacgggggaaagagtcgacacgggcaattcccggcaacgtcgagacaccgaaataaagaagatccgctagcgattgcgccattggggcccgcggacgaagaaacgggctcgaagtgtgtggtttctttattttccacttgtgcgctgacgtgaaaggcgttacaccgtagagaagaggaagcgtactaatctggggtaaagttcgtgattggagttttgcttagccttcctccgtttgcatcggcgcgcgaccgaagccggcttgcgtttatcttccgccctggcaaatcggttttctgtgccgcagcccgccaaggacgcaggtgaccaatgtagctgcaactgaagaggagccgtatgcaatgggttcggttaaacagttccctcgttacaacccctgtgggtctggcattcgagcggttttctgtctccgaaagaaagtgtaaagcacactgaagaataaacctttcccgcagctgaacaaacctgcttgtggtaccatcctggcgtcctttccccgttctcatcctccacagttactgtcatcttccagaagacggactgacccgttctcttctattgcacaccgtttttttgagaagtctacatgatccagtgattcgaagtgtcgtcgtgttcggttctgacgaatatacatgtatttacatttgtgcgggtattgtgcatgggacaggtacatacaatttgactagacttaatgtgtatacatttatgagtgataatccatgtttggcttcgtatgcatacacatgcaagtatgtgggtacccatactggttcttaaacataggcatctacttgctcatatatgtacgcattaatgtatgcattttcatgaggtgaactcgatgaaatcgtttttccattcgcccagggtcaccgtgcctgaagagtgattgtgtggtgggcgaatgtcagagtaatttttcctgagcctttgtgatgactttttgaagctgtcccgaaaggttgccatctgcctcttccacttcttctctgtaacgactcacgaggcacgtttctagcaacgcgcccttctcaccgcatgcttagaagtgtgcaagggagatttcactgatggcactcatccggctgttcacggtgttacttctgcatgatggacgcagcaagagcaggacatattaaggcaccggtgtgctgcaaagcactgttactgcctacggcgcatctgcgcctaatcccaccacaggctggagtacctacggttcgaacaccatcaatcactttaacggtgcatgtctcgtctttcaacgatgtagaagtctttgcaacagccacaggccagccgtaccatggtgaagggatgccacaactgctcccgttgttcagcgtagagaaatgatatcccggcatgccactaattggtagcaagcgcggcgtggacggtgtcattgtcaccagtgactcgccggaccttctccccccaaaacagccgcacatgggctcgagcacttcaactccgctgtcactgtgtgtctgttgtccacaaaggcgaggcaaacattaagcccctgagttgttgccagtcagtacgacttcctcttgccgcagctcgtgggcgatgtgcgcttgttcgagctgtggcctttcttcttctactccagtacgaacgatgatgtaccataggtgctcgcggtcaccgctgtctcttgagagcatgcgtctcgttaggcacctgccgcgagagggtgtgaaaacgaacccacaagtcgccagtcccggtaattgcctcgaggtcttcgccagtagtgcttcagtctgacagcgaggacaacagaaactaacatggaaaacgccgaaggaaacggcccatgaacaagtgtcgagtgagcgaactggtgctgtcgaggcagtacagccctacagagacgcaggttgcggctgccgttcccgatgtcacaagaatgggacgtgcgggagattgcaagtggttccgataatttacatggagtaccttctttaatcaaaacgatacagtttagtggtaagtgtgcaactaactagcctttatcattcatattttcatgcatcaaaaaaactcgacccactcttgacattctgctttatggatgtcctgtttgcggtgcctgtttttttaaccggtcacgccgtttaaaccctaaacggattggaacggagcccttttctttgtggagtgcaagtcccgaaacttgaagaacaattggcagggtagccctgaggtgcctcagtgtttgtgtccgtcgtcccagagaga

SEQ ID NO: 3711 - DNA, 2132 bp, Toxoplasma gondii
  source 1..2132: mol_type = genomic DNA
ctgtgtaatgacgcatgagagctgttcaaggttctacgtctctctgcctctgcctctctaccggccttcctcgctcgacggtcatcgtctccgactgttcctccgtctcggttccttccgcgtcgaaggccgcgcctcgttcgccttcctctgccgcctcctccaccccacatgccccctggcgccctgccatccagtgcagagacagcacctgctgtctcccggaaaggagacacttcagtgcactttgcacgccgcgcggtcccctgggtcgcagctccctcggcgctcttctggctccgctctctcttcttcgtctccaaccttccagaggcaccgcagggatgtgaaagagcaacagcggcagccgttggaccacaagaagaagcagaagaagacgcagcaaaagaagacgaggaagaaggaacaacagagagggaagcgacatccagatctcccctcgcggatcgagactcagcagagcagccacggcggagacgcgggccttgcgttcggtctctcgagttcgccgacacatgaggcctctctcgtggtgccttggcggcttctttctcgcagataagccgaagtgcacgaaacgcattggaagcctccggatttgctgcagacgtcggaggcgggagacgggaggcaagagggaagtagcgacgtcgctcagggtcccagaacatcccaggaagatccaggggagccgcagaagaggaagaagtcatcgcgtctgcgtggcggcaagacggacgccggtacatgtgtgtcgaggaaaggagatgcggcgagtgcgagctgcgagacggcgcgaaaggttccagttctcagggactagagcgggagagcagaagaagagaagaaagaagaagagtggcgtaggaggagcgtggagttccgatttggggagcagaagaaccttagacgttcgcctttcccctgcttgccgtcaccctaaccagcgtatcgcagagaagagcatgtttcctgcacagatgcgatgtacagtcctcaagaagaggcctccacaaagggaagttctctggaacaagcatatcagctctggccttggtagatgatcccctctgcgcccctgctattcgcgttcgatgtagcgagctacgaaacacggcgatccgcctctgttctctcgaggcctgcagctcccttgggagagttcaaacgcactttgcgtttgctttgaggatgaacgcgtccctttctctccaagacaaaagagagcagaggagaatcagcggagccagaccggaggcggcggcggcgcgcttgagaggaatgagtctcgagcccctcgtcgtacgtcgggtgtaactacaccggcggccaaacgcacgggaggctgagtaaaagagaagcggagcgaaaggggaaaagaaaagcaggacagaaggcggttcgtggatgccaccttagagacaaagagagaatccgcgaagcaatcttcgtttcacgtgtctttcatgccacagagcatgcacaccctcggctttttctctttcggacagctatgcgcagcgagccttccactgagttactttccctttcccccctctcctttcacttcttctttctcttctttctcgtctttctcttctttcgtttctttctcctccactctcatgtctttctagaggggatgaattcgcgcaaggtgtcgaagcagctggaagagaagcacgacatgcaaggcaggcagcgaacgagggcaggttgccagtcgccgcgtctacccccgtggttagttaaaaaccaggaaagccgagggaattcgctcgtctgttattacgatcgtattcgtttctagagaactccaatctctcgcttccccgcctcgggtcgctctccctgtcttcctctccgaggcaggccgactcaccggcctgacaccgaggagagtcctggaattctctttttgactttccccgttctcgcacattggcgtttcgccgtcttctcgctgttctctctctcccctttgctagcttcttctctccgcctctcggcgcccaccgggcgaacccccgcggtgtctcgtctgtctccctcgcggacttgccgcgcctcttctgccgcttcttcttctgcctctctgttttttgacgaca

SEQ ID NO: 3712 - DNA, 3905 bp, Toxoplasma gondii
  source 1..3905: mol_type = genomic DNA
gtgtgttgctacacataagatggcagcgagtagattcgttacggttcattctgctctgctgataacagcagactcagcgtacagttggaggtattcgaacactttggccgcaagtaccgttgtgagactctcttggcttctgaagttttctccgtcaactgaagttttcttgcagctaggcgagatgaagccgcacaatggctactgcccaagtgttcgaggagaggacatgcacagcgacagagctgcagcatagtgggatacgactgctgcttgcccactttctttggctgttttcagtggccactgacaatctctttgttggcctacgggacgcccaggtccagaggaatcttcgtcgcaagcaaatgatgattgactacaagcccctccgacagtactacaagtataaagtggcgcacgcgacgtcaatggatgagcggctggactggcactgccggcttcagcgcttgcctagagactcttcacccacaagatacaggaaccggtgccgagtgtgtggcagggctcgaggctactttcgcttcttcggcctctgccgacaccacgtgctagacatggttcgaaatgtcatgtttcctggattcaccaaggccgagtggtagaagtggtggaactgtgaagcactcctgtcactgcctgaagtgcactgacactgttttggttacttatggacgcgtaacagctcattatacaaggtcggcgacagcctttaagggctgtataacacggcaataggccccgaagacgagcgtcgcagtgttctgcacgtcaaactgttgacagacttctacctgcggtcacaagatccccagtcttgtggaacaggtcaccgtcaaaaaatcgcaactgactgctaatgcaaccaccttagctgacaagagtgtccacacgtcttcactgacaagtccatctttgtgactaggatatgcttttgccctctaaacagtacatcccactgtgtgtgcaccaatttcatcgtttgggggggaggggctaactaaacgctggcgggcgctccggcatgcttccacacccaaagctgttatacatattcctgcggaacagcaggaggcaaagcgcaaacctgcggtgatatttccatcgcgcgtcgggttttaggcgatcgacagagcgaagctacgacgttgatcagagtattttcgatgtgcagatcaaaaaccataaaaagtcgaaggtgccgtttccgtcccattcaaactcaccatagagtgatacggctggcgtaccacacaaagtgagcgcgcgcgaaaaatcagccacgcaccagtatccggcagagtatcggcaacgccagtaaggcccgttggacgcttctacgcgtgatgagaaaatctataaaaaccctgtccccggcgagaagcagcgagtcctcgtatcaccccatgagcaatggctccttggagggaaaatggtcatttcacaggtgcgcgagtaagggggagaacaaggccttgtcagctgaagtacaaaacaagacacgctcttccctcccgatccggtggagaggggatattactacacatgccggaagccttgaatcaggctggcaaatggcgccagtataaacaacattaacgaatatcagcgggtcgtctgcttttatgcatcgtgttccttgaagccagcgtcccctaggttgcgacgaaatgacctgtcgcttcactagacaaccttgctcaaaccgtttgcggaatacgcgcaacgattccgttcaagaggtagcaaaaaaaacgtacaaccggtgatgagagggacctcggtgtagttttatttctgaagatgccgagtaatcgcgtgccagaatagatgcttgaagcggcgaatctcgaatctgcggcgtgcggtttctggggagacccgcagcggctatggtggacagcgggctcccgaattttttgtgaagcgtcgaaagattttcggctccaggctgccggtcagttagctccgaaatagcttactagttgctgggagaaaccctgttttcgtcttgtggcgtctgcggggagatcgcttgttgctcgtgaactagctgaggctgttcgggcgcgggaagtccaagttgtgggacttgggctgggtattcgtcacatatcgagggttggctcgcacgcccgcaggctcctccgcgcaaaatgtagtacatggaatcgtcggcgttaagcttgtcgtattgagccctcttgtacagctgtcgcggctgggtttctgggtacggctgtgaacagcaaacaaaaaacaataaaaacaagtacgctgacggactcacggactccagtgtcatgtgtttcaggcaagatgtaccattggtcgcacccctcccggttcggtgaaacacggaaatctctccacgatagttatcaagctgccaatagttcatggagttaggtcgccacctgatcctgtcatatacttccagaatccaccattacaacctggtgggtgcagacgagcgagccagcttatacctggtgctctctacttggcacactgatgtgtgccgactttcgtctgttggcccacgtacacttaaccaagatgaatgccagactcagggaactgcatggcaataacgatgggatgtttcgtttctccgaaagttaccttcagggaagacgtctcgcagtgcccgctctggaaacgcgcagatgctgcgccgggagcttttcccgtcgccacatcttcctccgtcttttctcccttgcgtgggcagagggttctgtcaaggctgctgacttccattggatggcgtttgacatcacgtgtctcgaagggcccatcagggtttgcaagaggtggtaatcggtttttcacaaccggaagtctgtcgcttcgatgagcatccggttcgacagtcaggaatcggtcccactgcagcagatgtacagacccacagatcacacggggaagcgaggcgctcgataaaaatgagggtttgttgacgggcaatcgatgggcaacgatggagtcatcagtatatcttagctaaggcttacttgtaggtggcttcttcctctacgatcgtacgcgccctgcatgcgtttccaggtgtggtatgttgcgtctcggtcgagctgcttaaagtccaactctacactcgcactaccgccttttctgcatgtgcaaaattccattttcccgtcaatggcttgccaccttgtttgaaaatgcttcctctggtccgctagatctcctgcacagattcgcagatgcgaccgcttgctggatcggactgccggatacaagggcgtctgtcctgctggacagcctgtactcccgcggagaaagtctgcagaaacgctgtcaccctgcggggatgtgcagtatagcagctcccttactccgtcactatagcctttacccgggttgatgcgttttcgagtgtgctgatgaatctcattcatgcggcctgccgcgacacccgccatgtcgggcgcagaaccaaaggccagctgggagagtttcggacgtcggtgttccgggatgatatcttcccagggatcatcaattgactgagcgcacgtgtttttcctcgacgataatgagggcttgcctgcatatccagtggggtcgaacacccggggctgtgccgtgcccgggattggcactgcaaggggtccacccaccgacgtcgccattgcgagaaagagcaagctggccagtccgaggcggaactcgaggaagtcactcacgcacctgtctagcacagaacaaccgaagactgtcttgccgcagcagctttctcgatacagaaaacgcgcatcgaaactagtgtgacagccgaacccaaaaagcactgcgaacgagacagaacgagaccgaggcagaccacgtccagtggatcacttgagtagactgagcaa

SEQ ID NO: 3713 - DNA, 2344 bp, Toxoplasma gondii
  source 1..2344: mol_type = genomic DNA
tcctcgtttagttataagcgaaaggcaagaggattttgaggttttccgccacttgcaggtttccacagggaagcaacggtcagtccacgtgttgttgcctttcagaaaatgacagtgtactaggtggggcttttgtgcttaagcagccggtggtagatacgttggtttgttttccacccagattctttcttggtttgatttcctcactgcttctatcctggtgtttacagctatggcggaactccaagggttctttttgttctgcaaagacaacgtggaccaggctttggcaatggccgagtcgtggagaaaagcggaccaggaggcccgtgcagcggtgatgcgagagcgagaagcggcaaacacaaaaactaacacggctagttcagagcaaaaggaaccggaaaagctcgcagttcagcagaaacactcctccacagggaatacagagagtggcagttcacagtctggtcactgcgagaagcagagtgcgtcctgatgatattagctaacgtgcccagagatccgggactgagccgtgcagggaagaggatgaatcaacacaatcttttttccagttggtcaatgcccctgagttccctcttcattactggcactgaattgtgccaccacagtgttactcgaaagcaacaccaccctagcgtggtgattacaggaagtaactctacgctagggtttcgaatgcgatggcaaaagtcattgaaacggatggcaattacgaaacgaaaaccaattccacgcggcaatgtgaattgtgaattacgagagattccttgaccgagaagcatataacggggtaaacaataccagtggacgtaaaggtaggaacacgactttataccaaaaggtgctgtagtggttgaggtgccacattcgaggccatataggtcgcgtcagaaacagtagatgtggcaaactgacggctcggatgactgcggctgtttctgtgcttttgggacacagaacgggattttagcttatgataaggtaccgtctctgacagcacgacgggggtcatccaatctggagcacagagcgtgaggaacccggtcttgcaaatgacgctggcattgtggctcccatacaagaaatattttcgggaagcccaggtttttgtacattcatgagtcagttgttgtgtttacgtgttccgtcacctgtttttattccgtcatgttttcccgtaaccgagtccccaggctactgtccatgtcactggctagatttgtctgcgattctcgactgtctgtttgtcggtccacctgcagcaaactgccatagttattttatctcgttccttttgaagactgcgaaggaaacataacacttctccctgacgctgcacataccccagcgtctcaaaaaaggataggcttgtccattcataacgcaccatttaatttgcttcaatcaactctcgaagatgcaccctaaccggtgatctctttcctgtacatgcgttccagagttggaagaggtggtaaaacattttttgagtttgagaacagatatctcggaactctccgtaggccccaccaagcccctaataaatgcagcattcaaagcacaacggaggcacaccaatattttgctgaagcggacctgctagtgtttttctgtatgcgatgggcccgacagtttaatgtcgcccgtgtctcggcagtaaccacctgttaccagcgaaaatgaaacgaacggcacagactgaccaacagtgggcgacacagtacatgagctactgccgaaatttcgagcatgctccacgtgtgggggcccgagcgcccaagctttgagatattgtcgtacacccgcgagctcaagtgtgtttattttgaaggggattttccgtgcttggacccatttcacgcttgcaacttctacaatgttccttcgaccggctaggaacgccaggcagactgcgagttcgttgtttcttctttaaatatgtagtgcgaacaacctggcaacatgtctgagagccccgcctcttccaatagccttcaagtctgttttcatggtcgtttgagcagagccgaatccactcttatgccttctagacaacgcagacgaatgtgaaggcttccagagggtgttgacgattgtgtcaccagccctgcgtgttccgtacaaggggtggcttggcaaggcgaaaggagtcccgtgtagctcctggaggccaaccagccctgaaagcgctcctgcattttgtaggggatagcgtatgcgtagttgggaagaaaccgctgtggcgagaagagctcttgaccccaagcttgcattactcattgatgttctttatgaagttagagagagactccgacaa

SEQ ID NO: 3714 - DNA, 1867 bp, Toxoplasma gondii
  source 1..1867: mol_type = genomic DNA
aaaccgttttgtgcataaagacttttgttttctttttctttgctgtcataggggaaattcagtggccatgcgtcgcatgcatgccttcccctctctcttcctttgttcttttttctcctctcctctctgtttcttcgtctctttttttgtcctcacacaattgctccagacaaatcgctcgaggggggatctcctgttgtgtcgttcggtgtatctgatgcgtttgggggtttcggagttgatttttaaagtaaagaaagcgacggcaagcagagaagaagcctgcacaagtagaaagcggggagaggaggctgtacggaatctggaaaagcggcttccccagagtgagcgacggagacaccatcgcccccttgcctcgtcccttgccctacagatgcagggagatcagcacagaagtaaacgggcagaaagagagattaggagagcagggagagagcgagagcagagggagattaggaaacagaagagatcaagaggagagactgtagaagaggagagaaagagacaagttgagtgaggacggaggagggacatcgacacgagcgacagggagaagagaacttcagtagagagaaaaaagtgaaaatcagagagagaggctagacgagaagagagagaaagtgactacagcagtcaagagcgagcatcgacgaggagagaaagaggttttcggatcatcgtccgacttttttcagccttcgcatgcgaacctccttcttcgtcgctcccgttcttcgtttctcctttccccgaacggtgcaattctattgaccgagaagggatgttgccgtttggcatggaaaaacagaaacttcagagaaaagagaacctcttctggcgcctcacctgtgtgtgagctacgctgcaggccttgaaacttctgtgctgaggtgcactttgctctttctttcttcttccactgccgtcaaaaagaaagagtccatccgtaaaaaacagtctctctttctctttctctttctctgtgtctcatcttcgtcaaagacctcgcttctcaactcgcgtccggccccccgcctctcccgcctctcccgccgcgttcctcgctgtttgaggctgctcgcctgaggcgtctcgacctgcagaggccaggtctgttccgcggagaagaaaaaattctttggggaatcgaagccccgtgcctcggcggaaaccacggacttttcgcctcggaacaaacgcatgcgacttccagggtgcttctttgctcaccgagtccgcagttttcgcagcatgcgcgcttgcatggtggggcagaggcattcctctggaaaaataaagaaagtctggaaatgtggaccagagaccagctactttattcctcttctcttaccgacgcctcagcttctctcccggttctcgtcggacttctccctcctcttagctccgttttcctcgccggtttctctaagcgttatggcaacagtcgcaacgccgatataatactcgagagcagcgcgtcttctctccacttcgttcgtcgcttgtcttcctttcttctttccctctccttttctcttgagtcttcctctcctttccctacagtgtcgccgttttttcctcgacgcgcgaaggcgagagcaaacgccgcctgggtctctgggctttcagagacactcttgcgagacccaggggagacccggcgagatcaagaaaaacgagatctcgaggcaaccgagagaaatcgaggaaaggggagactgagaagaacgtgggagatcgagaacagcctacagggctcacaagaccttcgcgagaagcaagagagaccagtccgaacgagaaaaagacgagggaaacagagagcagcttcgtccgcgtgcagcca

SEQ ID NO: 3715 - DNA, 2002 bp, Toxoplasma gondii
  source 1..2002: mol_type = genomic DNA
cgttcagccttggtgacgctctgacgaatgtccatctcgactctgcgtcgaaggcgagcctcgtcctgactctgtctcttctgaagctcgcgcttcgccgcctcgcgctctgccgcactcagcttcggcctgttcttctccacgctccgtcccgtcgccaccgcggccttaagcgtatctgtctccgccttgcgcatgtcgtcgaggaacgcgtacgcctgactgaccatccgcagattcagagggccgcatgcctcgctgaaacgcgggtctcgcgcctttcgtccctcgccgcagctcttctttccctggatagccaggtgtcgcagccgcttcatgtgcatgtgcatcgctgcttcgcgagaagaggagctcggcacagtcgcggacagagggtactgcgggggcgcgtcctgcggagttgaaggaagccccacaggctgacacaaagtacgctgcggacgacgagaagacacctccaaaggagattttttgttgctcttcttcaccaccttcttcacgcccttcgctttcggacctgcgcgtaacgggcgagaagaagaagaggaggccgacggggtcgtgtcacggaaagaagcagacgaggactctgggggggcatctgaagagcaacgggcagagacaccagccgtctgagctctccctgcgctctgctcctctcgccgaaactgtgcttccagcagcttcagttgctgcagaggcacagcccgagcatcttccagagaagacgctcgaagcttctttgcgcccattctaacaccgaaaagtaacaaactagcgaaaaactgcttttcaaatcttttacccccactgcttcgcttctctcgccttctccggagctcaggcactaccacacactcgatacatatacatatatatatatgcagagagactttctatgggtctatctagctggaatcgacgagggagatgcctgatgtttggcgtgaggtttgagacgaaatctgcggcttgccaagagggatctcgtcaggcgaatggcacgcaggtataaacttcgggagaggttcttgagttcgagagcagccttccgagtgttcaaagaaggcgacactcgcgctttgaaaactacgcttctatgaatcaaccacgagttgaaattttatcaggaacactgtttctccaaaacaaacgcattgaagccgagcctcgcagctcaatgggaaccgcgttcgccagagagaacaagcgagaagaagagagaagcagaaagaagaaataagagacggaggaaagaaaaagcaaagatctcaggaactgttggtttcccaagtcgacgaggaaaagtacgcttcgcagaaggacagattgctcagattcgaaggaaacgggcgcatgcagcactcggttttttcgcaggcatgctctttgagtgtgttgcagaaagcgaagtcgcgagggaaacacgcagaagatggctttctttctcgtgctcaaatgtgaacgccaattcgttgttttcttcttctgtggcgttcttcttccttcagaagggagagaaggagtctcaagggctgatgggaaggagagtagctaatcggattctcggttgtgcggccgaaagttgttacgaacgggaggagcggatttcttctccctagtcttatccgctcgtctcctgtctctttactcttattcttcccctccgatcttcttctcctttctcttcagtcctctcttttttcttcaaccttcttttccgtcctcttcagttctaccttcccttcccttcagttatcttcgttcctgtgaaattctccgtatcccttgtcttgtctttccttcttccttcttcttaaggcttcttctctctcctgagttttctccttcttcctcttgagacgtctcctgtttcgagtgttccgctatctctggaaacttttgcctctgctttcgcttgagtcgaccgcgcttgctgcgtatttttctctctttttatgccggacaaccgagttcttta

SEQ ID NO: 3716 - DNA, 4771 bp, Toxoplasma gondii
  source 1..4771: mol_type = genomic DNA
cccttcgcgttcttcgattcctcgtcactcgactcggcttccttttcgtctgcagaggacgaagactcgaccttcctccccgcctgcttcggagcggccttgccatcacgcgccttcgacttgtcctcgcgctcgcttccactctcgctgccgcctccactctcactttcactctcacttccgctggcgctttcgctctcactgtcactgtcagactcgctgctggaaacggcgagggcgaatctgctggcaccgcgccggggacgctcgtcctcgctggagtcctcgctcgacgactccgagtcggtggactgaaaaataaaatgcatggtgaaaggcgcgaaaagaaggcaatgtccatgtctcccgatgcccccctgtttccttcgccgcgacagtgaaatctactctggaggcgacgcacgcgacagaactgaagaacgccttggtgatcagaactggaaccgggcatgaatgaaccgtggattcgcaagaggtgtgtatctgaagtcaataggtcccgacaggggcaagagggaaatgaaaactggagaaaagggagtgccgacgctgaagtaggactgagccgtttatcgaggtggggaagaaaaactgttggccgctaaagtggagagcggcaaacacaaagcaaaagcggcacactcacatccgcagctggaacgggcgtcggcttctttgcttcgaactcctcgtcactggacaggccaccgcgccgtccacctcgaccgcctttcttcttcggcgccatcctggaagacgcactgccattgaaaacaaaaataatggcacagacaagtacgacagatgattgtctcacccggttggatgcgaaacagagcaagcgaggaaagcttgggcgccatgcggcgaacacggacaggagtagccagaggaaacaggaggagaaaccaagaaaaatacggaagtgacagtgactgcagcaacagcggaaccatcccagacaggcccacagtttcgcgaggtgtgtagtgtcggccgaacaatagagagcgaacgtttgcttacctgaagcagctttgtgcgggaaaggaacttttgcgcaagtcggggaccgtgcacgacgacggcggggggtgaatggaagatcaaaggagtaaattcatactatggcaatggattcggtggcattccctcgaattcgctggctgagattcctttggcggtgcttggaaaatgtaaccaagagacagcaagaaaactcagggaccgcgctgtggcggcgggggttgggggaagacaaatccgttcgtttctccctcagagaagcacggacagacaggatcaacgaagttcgaactcccaatgcaaggacgaaactggtaaggagtctaagaatgcttaaaacgcagcaaagaggcacgaaaccggcgaacgttctggtccgcggtgtggggagtgactgagcacgacgaaaaggcgtccggtgcgctacttcgcgtctactgcagtgggaaaccgcgggaaacggcgccgagagaggcacctcccgtggcgtacagacgaattctagtttttaaaacgggcgctggagagaccccggcgccctcaacaggagcaaggaatgaaaacaaaaaaacaaaggtggaccgcccccaggcgcagttgcaggtgcgcaagcttcgctcgcgaagccccggggagtgtgcaagtagaggcggtcacaccgtccagctcttggtgttttcacaaagaagcggaccatccccctctgctgtctccgaaaaacgccgacacaaagcgctttcagcaggaatctgctgctgttcaacaaccaacacagagtccgttccggtggttgtcaatattgcatgttcaattgaaactggacagccaaggactcgcggtaatggctgcaaaacaaaacataacttcccgttggagtcggaagcctcgtaacagtcgctgcatgtcacttttcggctgggaacgttgttccaccgcttttgcccaggaagcatttcgcacttctccgttttcagctgcgccataagcttagacacaagccgtacatctactgtgatattgccagtatacagtgttgattttttacaacagctgcactccgtgttccgccgcttaatcacagtctgcttgtcaagttctgtgtacctttctaggagaacactccgtacttcagatgacacgtaaatagttcgcttatggtactaggaattgggagatcgcgtagaaacgaccttaaaactttaccagtcaatcggtacaggaaagttaccctatgttccgtaagaagtcagctgagtgggaggcgattcactcgcagtagcagccgtccctgaacgcgttctgcatctgacatactttcctgcactttgcccaatatttgccatgattcttcattctttaaagtccgtacacgtgctaacggcgaaagcttgtgtctgttccagtggcgatgagcaaaagagccgaccgacgggtgcgctacttcagagcatctaagtgcttgttccgccttccgtgagggtgtctaccttgcagaattcagacagaagatcaagttctttgcctgggtatttttgcgttccgtacatgtgtaggcaaaagatatgttatacaggttcttgacctgcgcagtctgcgaggcacacacaggtagaacgacctcagcgcctatgagcgtaggatacgcggaatacagctctctgcagcccaccaacttcgtgagcacccttgttgttagtgtagacgtacaaagacagtgtcattagttggatgtttcaggtcacaaatgaaacagctctctggaaccctcctgcttcgaaagaggggacaaagcctagcaacaaacaactccgtagaaggaacgaggcaaaatgcggattcgtatggacgcaatccacagttccccaggatttagttttagtcacatgacctcgtttaccttgtataggcaacatgtcaaatgagtagcactactttaacttaggttggagtttttgcctcagcagtacacgcgtccgcgagggggatgcgtgtatctgtttcacaggtactactgtttatggcttggcaagactctttctcattgccaacgagcacaagaaagcgctgcgttctataaactcgtgcgaaggcgtctgccagcagtcaaatatttctaaactgaacggtcctcaccgtgcttcactaccagacagcaggcggcgctcgttccaagtaccataccatgcagaacggataagctttccagaaaggagtacttgtttgccagaggtttccgctatctgggggtcccctttaaggttgtcggcgaatttccactcttcgcgcttgaatatttctggagatggcaaacttctgggacgttgtgtgagcgcgacccgtttcgtttcctgcagctgctctgagggaagtgtgctgggtttgcgaatcctccctcaacttttgactttctttccactccagattcttactctcttgctacctctctctgtgcttgcattcgtgggtcttcatccgtgaaacgtaccgtcttggcggagccggaattccgtgtttttgcaccaccgacggcagatcgtcgttttactcttgaatgtaccatgtcaggaacggagctgaatgaggagtctgggtgttctttgcccttctcttctcgactgcagccggtagtgggtctctttttgcctcttaaggagcatttccttgatctatgatcgggttttaaatgtagtatttcctacctccactctgttccactttttgatacatgcgcagaaacgttgcattagctgtcgctgccgagccgacacgcgcaagctacgaggtcagagcggtttccagtggcaaaaagctttttgtctctcgcatttgactcggaacgtctcctcggtttgtttcttgtttttgacgatcctggcttcctcgccggattggtttcgtgcttgtcgtgacgcaaaagacaactgcaaaaccccggcgtgtcgagcgctttcgtccggcaagtcggtcgctgacgtttccccgtgactcttcgtatgctcttcattttgtgttttctgcttttctaatcttttcgccctcagtctgtctcaatttctccgtcttgcgaggtcggcacagatcccccctcttcttcgttgaagcgcttgcacgagcgctgcgcaaaagacccgccgagattcctgtgtcgctcacaggctcttctgcttctacttctcccttttttgctggaccctttcttccttgcctttttcttctttaatcccctgttttctcttgcccactttccttctcgtctccctgtatcccctgctctccgctgcaagcagctaggttcgctgtgtctctgtttggccgtctctcgctttcctctcgctcccttccttctcttttgtctctcttcattcgtggctccttcccttcttaacccttttcgattttccacgttttctttttccaccctgtctgcgatcctctattcttgtggctgtcctctttcgctggattagcgcctctttgcgactccagcccggccgtctcccactgcgtcttccagtctcgagctcacaattcaattccttgtcccctctatgtcccgactcgttcttctctttcctgtgtctccagcgtcgccctttccaattccctttcctttcgtctctcgatgcgcatgtgtatctcttctgtcatcatctcgtcgttgaaccgttcttccctctgttgtttccactgcttccttgcgtctactttgcgtacacgacttcaa

SEQ ID NO: 3717 - DNA, 4375 bp, Toxoplasma gondii
  source 1..4375: mol_type = genomic DNA
ggttgatgtacttgtgcaaatacgtctgtactgtttccgttgtcgttctcaacaaatacgtattattgtactgcgtatatatatatatatatatatttattgagagaggaaaagagatgggtgaagcgtggctataatccgagagagacgcattgccggtcggcacttgtgcgtcacaggttgtcgtcggatcgtggcgttgggcttgacggagaaaccttttgttgcaagggtgcagttttccacagacaaaaccttttcaacgtcgagggtgcagaaccctgacttgaattttcccttcatatgtgtcaaacaagaccctcgtaagataaagggcacgcccccaatgatttactgagtatgactgcatgctggagtgcgagttttttcacatctgtgagagcagagcccaaacaaagtagtagtgtttgtcgtcacagataagcagtactgagcagatgtttgctgtgtcagttcttgttagccagcgcgagttaattacttttgaggagatgaatctgtaggcaagttgtatcttgtgggattgagattgtttttgtccaagtctcgtctggtcgaaggaccttacttctaaacgcacgcacgcgcgacgaggtaaatccaccagttgtgtgcatctcctcgccggtttctgcctggcacaacctgttcgtcacttgggctgccgtaaaatccttcgtttcccactaggagaacgaagtatcacatcgtatggcctccaaaaagacagatagcgagtggaaagatttgcgtctttggatgtgactcgagatcccaccacacggcacgagtaaccggacatgatagaacaagaacattttccttgcacaaagcagggaacacgtacacaggtttatgaaagagaagccacactccatatgcacccaggacacacgcggggcaacgcttgtgggtgagcatgacgtagtctcgtttacgctctcctgtgttgccgggttcctcttcgagtttccttgctcccgcaagtacattgttcacttgtgcattctacatttcatttcggtgcatccatgcagtttcgctgtcatcgaggtgaagatctcactctctcgccgctaccggaggaaacggggtggtggtaagaagcgagccttttttccggaacagagaatcaaataagcaagagcacacaaactaaatagatgatttccttcactcttgcatgtcatctgctgcttaagacgcctcccctatccttccatttgagagttcacctgttccgcggaaacaacttgcgtggctgcgtgccacgttataaaggtcttttagcggatactgggtcactcccccatatgtgagagaagtgtctcctgtcgttgcttttccccccactcaccttgcaccgtctgtatttcactctgtgacgtaaaaatggtcgtcatggatcagttcttgctgtgtttctctcttttacgttctctcattcatattctatagagattgttgttcccccttttccacgtaagcgaaaaaacgcacctgctgcgtcgatcacgtcgtgcatcgcttgtcgtgctttctccattccgtcgctcaaattgtcgattattgccgcctgaagctcatcatccccctggcaacaagtcctcaggaagtttcccatttgtagtatctaacagaaagggacaaaagaactgatgctcagacaaaaagtgtgtagcacgaaagggtagtacctcctcgctgtcacatgttaagacgggatctggcaatacaaagagaaacacgcctctggcgtgtttgtgattcagatacgtgtggtatatatatgtaagaaaatgtgtattttgatgaccagcatgcaatcattctacagaaccgcaggaagtctgcatacatgtacatatcagagccgtgtcagttttttaacaggcacacgaatcgtatagatatcgtcacatcctgcgggggttttcaagattatgtttccccaagtagcttccacactcagtgttcgtcatgcaaccatcagtaagcaccacaaaaatgtgcgatcgcccaacacaccaaggatctattctttttgcaagttgggaggtactgccggtttcgaacagcgagacagaaatgtctctcacagagcattatcgatgacatcgtgtcattttgagctgctgttccttgcacagaagacgtttttgtagtttgtgttgcacgagatcgcgacattctggttagtgtcggtttgcttctccgcagacattgtgccaccccaatcattttcagctgtctctccgatgtacagtgctcctgtgaacatttgcattcggtgagcttgattgcgaaaatatctcaattcctgtggccatcgccggacctagaaccgacgaccaggagtaggttccggcggtggtttccatggggtgtgttgacacacctgtttatccttgaggttcttttaaaaggaacagccaaaccgatggtgtcgaggaattctcaagcttgtttttctgagcgaaaagtcagctagaatcgacttcgtaatacgctgtttgctatatcgcgctctgggttgatctctacgcctgggacttggcgggattgtgggaccgagctactggccagccctcccgaaaagccccatttgactcacaggttcggaaaactatgtcaggagtgaaacggaaacgcagaagacgtgagcacatctagaaatgtgggaaggtccttagaggacacgccaagagccatcgcgtgcaaggtctgcgacactgggccagcgctttgtagtcttcgagaagtactttttgtttctccttgaaacaccaccaaactcgtgctggctttgtgtgcctcgccctttcgctccccaaagaaggacggaagcgacgcactcgtgatcaaatcagtctcccatcctctacattcttctgtctttacctttcaggatgtgttaccgctgagtcaaccgaaggaaagggattcgggctgcgttttctatatgcttcggtctcacgcactctgcttagctgccatcggtgccagtcaggttcccgcttagtgtaaccttgctgtcagacacggtttggttcccaattcaacttttttttgcgtttgctcgtggtccggtgttcataaacgcagatctcatgttcactttggggggacagcgacaactgaactgacctttgttttttgccgagctgcgttaaagatgggaaacgcttgctgctctgtggagaagttcgagccggtaggtgactgcgtcttcaggcccactcccgcaaagagcaaaagagactaagaaaagcacagaacgacaactacagaacatacgtaaagaggccgcttccctcagaaagaaatcgagtggggcactcattgccccaggcttcctggcgtctcttatcatcgcgacacttttccctctcgtgtgttattttttcgtctgacgccgaaacaaattttagcccaatgtacacaacagaggcgagaaaggcagtcgccgcattttttgcgcatacccagcgttcttccgaggtcgtgaaatattgcgtacaccaaaacgcgatcgtttcaccctgttcaaagcactcacgagtgtcagcaaaacgaccatagaagcgcatatcccgactctcccttcacataactgtacaacgtggtattcaagggaaggttggaggcagccgaatcagagcaccgacgtctcaaatgtctttgatccagaaaagctgaacgagagggcctttagatgccaccccacaggatctccgcgtgtcccgtggaccaaagacaatacactttcgagcagttcctccttttctcaaagtagcaaggaacccgatgacggtctcattttggcgacgcgaaactcgcctgtcctcaattctgaacctcaacagtacagatttgcttgtgtttcttttagggcagcgacgctgcggtcaaagatttccttgtccgggcggcaaacgggttgaagatggcagtcgtccttcaggtgtggagaagagaattttcgaaaaggcagtagcgaacggcaacttgaattcccgatttgccttgagacagacgagtcgcaccagtgcacaaaaacggatattgtcgctcctttagtacgaagcttacacgcatatatatatatatatatatatataggttgggaaaagtagtatataccagcgcaaacatatatacgtctgtacagatatatccaaacgtatgctctgcgtgcattcacctgacttgttttctgttcgcaccatgaatgccacactcaagcactacgaagacgcgcagactgcttggaaaagtttcttctcttccgttcttctcctcgtcacctcctccttcgtcgttctgtaggatgggtctgacctggaatgcataa

SEQ ID NO: 3718 - DNA, 1660 bp, Toxoplasma gondii
  source 1..1660: mol_type = genomic DNA
ggagaaaagaaagctccacctttaggaaagaagaaaggtccgcctttgcttgggaagaaaggtttaccacctccaaagaagtagcaaggatcaaagcgggcaaaggggcactcgcatttcatggcccggttttcgacagttttggtttcttcctttgttcttcctcagtgcatgtgcagtgcaaggccgtgtatcgtaggttcacaaccagttgcgttcgggtgtggagatgcagtatcttgcttttgagagagacgttgaggctgacctccgtacgaccgcacaccgaaaggacatttcttgagctgctgaacgcagttagcttggtgtctgtttccttgcccagaattccgcgtttgctacaaacggaaagcatccactttgtctgatccggtgatgcgtccagaggtgcgaaacacagctcaagacgtagtggctagagaaaagtgaaatgtgccattgtggacatgtgaccgacgtgggaacaaacatcggctggccaaagcagtgatgtgcgagtttcgacaacgcaggagagacaagcaaatcccttatgtgagcgaactgaagttatcgcaaatgagccacgaagcctttcttgtccttttcaaagagttcaagttgagacatctatagccttgggtttaacaaacgcagctgttcggctagtgatcctccactcgtcgtcctgataaatcgacaaactgcgagaggagctagatatttctttcggtgtggaggcgggtaaaggctcgcttctttgtacgcgagacacggactacccattctgatttcgtgtaacagctctggataatacgtaccaatttccttgaatggcagtctaggaattttttggtgcgatagaaagctcctcgaagcgttagactcgaatgaaaaccgtcgataatctctgtttaggaaactcgatccctttctctcaaagtgtcaatacacagagctcgaggtgaccaatcaacgacgcgtgtttcttcgctgaaaacatcctgcgctcttacgggtaaggaaaaggttttttcactctttacctggtaatgaaaaaaaaacaaagtcgcgtagtcataattcctgacgccggtgcctctctgattgggatgacgaacatcgcaagtccttaaacgggcggtcgctcgatttttggcgcttgcatgcccgctgcagtgcatgccgaagacacagttttcgtcggatcattaacagcgattggcttttctagcgagttgcatattggtcttttaagttgcggccttgtcagcctccgtgtcgcgtcgttttagcagcgaggctctttccagaatcagcaaagcgagctcgtgtactggtcagtaaattgtcaacaggagctgagtgccgtcgtctacagccggagagaattgtcggcgtggttgttcttttcctccttaaattgtcaacagatttgttctgtgagtagtatattcggatatctcactttttcaggaggtttcgcttctccaccagggctggaaacaccgaggaggcactctggaggaattgagcagattagcgtgacagaacgggtttggcggtaatgtctctcctctacaagatctaacgaaccgacggcgaggcaaaacagagcgaagtcgtaccgaagcattgatcatccaaagtatagccaata

SEQ ID NO: 3719 - DNA, 4956 bp, Toxoplasma gondii
  source 1..4956: mol_type = genomic DNA
ctcctttcaactctccgcttcacgctctgtcgcgcaagcgcaggcaaggactccgaccttgctccaggctccgacagaacgccagcgctgcgcgcagccccgcctgaaagaggttgcgcgccgccgcggatacgcacaggaacttatgttccggagttgcacgcgcggtctctgctcctcacctcttcggggaagttctcgacgaacaccgtcctccccaactgctggagctctgtctccttgtgggggcacccggtgaccagagaggccgcagccgggagcagcccgccggcgccgggaccgatggagacacctaggcccagttcggttttcttcttctctgcgaggatcttcgcctggagagcggctgactgaacagcctggagaagaaagtggagagagagacacacagagaaagagacatttcagtgctgggcaggaagaacgcgtttttgagaagacagaacgcagcaaaacagagactcgagagaggacagggaaaaaacagcacagtgacagcaccccaagcgcctcacggacaaaggccagacacacatgtttttcgctggtttttttttcgcctctggccttcgcgtacgcgacgtcgccctttgaaagcccccccccccccgttccccacactcgattcacgaaacgcgggtctccaacgacggtttgccgcttttgcggacgttttctctctctcccttcccctcgaaggccgcgagttcatacctgcaagttgctgaggtggttttgcatggcgatttcgacgacgctcatctggctgttgaggggcatggccccgaaggccgcggcgccgccggcctgtccccccagcgccgcgaccgcgcctgcagtcgcgagctgggctccggctcccagcgcgccgtttgcctcgaattgctggagctgctgctgctggagctgctgcagctggcggacgccctcgccgacttgccccggcgcgagagctggttggccaacgggatgctgcacattcaaggcggcttgcttcgcgagcgcctccagcgaactggagcccagcgcgccggaagcgcccgcgagggcctctggcgcggcgatgaaggtcccgccgcccgcaggttcgacgaccgtaaccgtcatggggacgttgaggagaggcgtattgttgagctgcgaggccgccgtgatgcccgcagaatccttgaactcgaggacgcaatagcgctgcgctgggttgttgaggtacgccttgaagccgatgttcagaatttcgccgcagtgtgtgaagatctgtcgaatgtgatcctccgtcaccaagggagacagattcttgatgtacagaacgtttgcggtgctgtacagcgcgcgcgtcggcgcggcccccaggcctgacgccccccccaacattttcagagcggccgcggacacttggtcaaaagagagcggacaagcaaggggaagctcttcagcagagacgaaagacgaagcaggtcgagggagaaggacgcggcggggtcgagggaagcgcgaagcgagacgaaggcaacaaactcacggagggaagagaaggcggagagaagaacagcggcaaaaaaaggagcgagagagacagagaaaacgtggaggcacgacgcgggactggactcgagagagggagcggagacgcgaaaaacgcaagaccttcttcgtgtgcatgtacaggcttcgcgatttttttgacgacggaggacaaagacagacagatgaggaagaaacaacagacagacgaagagaagagagtgggcgcgcgagggaagacaagaggagaagcatcggccagaaagtgcagattcttggggggacgacggggcgttcagcgggaggcgaaaaacggcttgctgcaaggagaaaggaacggagacgaagagttcacttcaactgaagaaaaacatcgaaaccgcgatgaagaaaaacaaaacagagggtgcaaggcgagagagatacgcggagactcttgcaggcgaagagctccggagaaaaatcgcactgggcgcgcggcgcggacgggagttctttaacagcggggtttcctctggaaatccgttttcctaccgagtggctcggacagatcgccgcggatttgatgggagaaaagaataggagcgtggcgacttttcagagcgaaagatcaaggaagaaatatactcttccttcgtcacgctcccagaggcccccgcgccgagtctggcaccaattctcgaggccgagcacaacgactagagaaggacgcaacaaagaaacgctttcgacgccagttcccaccgaaaaaagagagatttctccggagaaaaactcgaaaggaactcgaggtctcccccctcagcctcgcgcgtcggctgctgctctcgcctcccacacatgcacagcagcgggggggagcggaacgaaattttccgcagtccaagaaaaagaaactgagaagcgccgcaataacaccagagaagacaaagaaatgcagcgaacaaggtgcgtgtctctcatgaagtcgctgtctcgactctttactctttcccccgcttgtctactctgggagcggcagcagcgccaggcagaaaggcaagtgaagaaaactttgtcttttttgattcgcaatacacgcacactgcaaggaagaggtgggcagccgaggagaatgttagaaaacgattttcgcctgcaaaaggacgttgcacgagacggaaacaggcgttgtactgcaggggggtcgcaccgaggaccacaggcatgagaggcgagccaggtgtgccggtggctccctgttcaggaaggaaaggcaaggtttctcggggtattcctttcgagaaatgcacgaaaggaaaaaaggcgagtcttttctcctgcgggggagttgccactgccgcagagtctttcgtcagaagaagaagcgcagctggtagcttcacggtgagcacacggcttcgctctcggctttcacaccgcttttcgagtgagttctccaaagcaatttaggctgtgtagatccggaataacgcccgagcatttacactcgcttcactatcagttgaccgcttccacccctgagaaactgtcggagaggtccgtgtgctttcagggtgttccgcgtagagtgttgtcacctacgacgtttcttttcctcgacctttttgcgtcgtggaacaacactgaatctaacttggaaagagagcagatcacgctctccgcaccgaaagaaggagactgtcgcaaacggtgggaacttttgacaagaatacaacagtgtgcagcgaagtcctctctcgcgtctggttgctgaagttcctggggacccggcgtcgaggcagcgttgcatccgattcgtacgactcgagggcaactcacgtgaaggcgagcgatccgagtgaaagacaaacgttgagaaaatcgacagcaaacgagaagcggttcttcgcttttccccgtcgtctgctcagccgtctgcgccgggctggacgaaggaaatggcaccaatcgactttttctgtcttggggtgggtctcacgaagattggtcgtggtctccctccctcctgcaagtgtttgtttgcgttgaagcgaaaagaagaaagaacgtttctttctttgtagcgagccctccgacggcattcttcattcgcgtcttgtcttggttttttttgggggggttcggttgcaccgggacaagagagagtgcaagtttctactttcacgcaaggcgaggttcccagagttctctcgattttcctcagtcgtcttctttcgaaaattcggctgttcctaagaaaaaacgcaaaggctaccagagtctcccgtgcggcgcccgctgcgagagtcgcgaggtgagaaggcgcaggaacgctgttttttcgcctttcgcttgcacggcggctctctggccctctcggtctttgccgagtcactttttccagttttccttgtctggttttttctgcggggaagcaagcaatttctctgtcgaccctccgcgatcaaagtgcaggcagaacgctgagactctggaccgcctcgcgaacaaaggcaagtgcggcggccgaaggcggctgcttctggacgagctctccttttgaaagccgtctttcttccatgcgaaaacatttttttcctgcagaattcggagtcctgccgtgacagaggacggcggtttccctccgatgggtatctgccggcgcacccctttcttcgtctccttcttctgtcgcgtttttctttctcccagaagcgcaaacctctgtgctgtctctctcttttctctttcgagctgcaggaaaggcggcgaccgcgagggagagtctggcgacgcagagcgacagactcgttcgggagatttagggagcagaatcgttctgctctcaagggtctctttttcctgcgctccaacgcgatctggaaaacgccgcgatttccacttccaatcgtcggtgtcaaacagctggtgcgtggttgccgacgcgcttgactgtctcaaaaaaggagacgctctctactttttcgcgtttctccttttctctggctgcattctcgatatcccttctgtttacccttccttctgcgaaaacagaaagtccatttttcgtaagtttcggcgccacacaggccggtgcctcaaagttgccgcgtctccactttctccggtcttcacgcgaaaaaaaagaagatctcttccttcattcggtccaccatcgcgttcttcgcgttcttccttttctcctcgaagccccgtcctcctctcattttccttctctcattttcctttttctctccctcggctgttctcgtcttcccccgttttctctcttcttctgtctcgtctcttccctcttccaattggcgtctcgccggtggtcgcgaaggccgcgatgtagctcgcatgcacctcggagcgcgcctctgcggcttcctttttccgaactgcgcagaactcgacacccgacca

SEQ ID NO: 3720 - DNA, 2537 bp, Toxoplasma gondii
  source 1..2537: mol_type = genomic DNA
gctttccatggcagccaagccaccgatgaattcacccgtttttgaatccatcgtggttcgccccgaaaaaggcgactgtgaaaggcggtagggaaaagagtgtgaactgatttacacgatgtcaggttatgatactgctttggaggggctcatacgaatgtagcaaacgccactacggcagcaaacatctggtggtaacgtgacggatgcctctaaaaaaacataccccatcgatatcttgcctctttatatggcatcgaaggacgtctcgctcctccatttttcagaagaatcgtttttcttccacaaagtagaggccgagatgtgtgtctgctgcgcgcgtgcgaccacttcctttgtcggggtggcgtcgctccagggcgaaagcttgggcaagatcgggtgtcgatctgagtgacggaaacacaaactatttccctcatggtttctcagggacagcgtacgcagtggcaggcagggcttctttgcgagctttctctggagaatttcccggggtaaactggagctgcaagaaccatctccacgacagggcaccacttgggcgacattaggagatgtggtatgcccgagtactgaatcggacaaagtagactacggtcggaattgttaccagagcgtatggtttcgtcgtcaatcgtttgaaacctgaaggtttcacgtgcctcggtgtgcacatgtttttgacgggtccaaattcatgatttggagaggatgtccaatgcagcgactcacacaccgcagtttcgttctgaaaatgaatttgttgttacgactgactttgcaagctgttcctgatggactgaactgcacgagcagacgaggccgtcgtatcgcgttgtatttcttgcaatgtcatttgcatggtgctaaacttgtgtgtaagaccatgcaaaagaaacgattcagtcgactcgataccgtcgccggtgctgaggcatcgatggcaatcgcaaagtaccagaaatattgccaggaagtgcatacagaagtgcttccgacgtttcgcaaagtaaataccggcaagatttgtattcgggaacatcaagtacatgcgagaggaaaagcactacggtaatcctcaaagtagagagtgctcgagtcatgccaggcccttcaggttgcaaagaagacgtcattggtctgctaccaagtaattcgaataaacagtcagcagtgcagtgagaaactcagttactagcgacgagcagacgctgacaccttttggaaacggaaaccactgtactacgcgacgacgaagacactcagagtctgtgtgataggagattttttaccgtctagacggcttctgatcggagggcagtggtatccgatgctgaaataaccggcctgcacgacgtctttccacgaaagaacactacagatgactctctctaatcacctaacgctccgtgagtctgctttacaatgccaccaggccgctgctgtagtcgcatcgtctgaaacactcggagcttcttcccgaactcactgtatgaggttctgtactgtcagaatatttcctagcgctttgcactcggttgtattgtgtcggtgactccttcgtcctatcaatagcgttgacacgcggacttcccttcttcacatactctatagcgcgacaagcgtttgcgcaaatctctggccttacaaaaaaaagtttatcggatgcttggacttacgatccttctacttccaagtcgaagtgatgaggacggacctggagccggcgtgtcccaggcacagtcgagcgacgaaaaaatcgggaaacgtatttcattggaaggagcccttcgcagaaaagccggctcgtgaaaagattggcgggggaagagaacgggaccgaaaaaagagtgggaaatcgctgaacggtctgctgaactgttccctgtggaagctgtcaaaaactgcccggaccagggagcgcgtgccgcctacttgtctcatacgagaggtgccgtcgtcgtcttcgtacttttcgcttccttctcggttacttgtccggcacaacgtatcccgcttttgctcacttctggctgacccacttgtcaacattatcgtcgctgaaattgttttgtgcactgttcgctgcaacacccgtttgtgcatttagaaccagggtaagccaacagcgcagttgaagcgtctgctcacggtacctcgggacgggttcctggtgtcgactcgaaccgcttcatagacatggaatgaccgtcgttccaccctgcgcacccttcttagtttttgacagacgacgcctcaaaaacgtgaggagttccgttttcctcgcccttttcgcggcgtttatcgcgagtagctgcgtcatgcaccagccgtctctactgagctgtgccggccgagcggatttttttcaagcgcaggcgttcctgcgacgcctcgaatctgccacagagaactgtcgagcccctcatctcagttccgtacgtttttgtcttctgtcggaggatacttcgtggagagcctcttcgctacattctgcgtagcgaaggttgcgaaga

SEQ ID NO: 3721 - DNA, 1352 bp, Toxoplasma gondii
  source 1..1352: mol_type = genomic DNA
ggcaactcggtaggttggaagcgaaggaaaaagcgagacagaagaggaagaggcgacaggggcaaatgcgcgagaacgcgaatctcgaaagcctggtgaggccgagcacgacgcgccaccaggcgaaagacgcgccgcgagcgaagcctcagtctgacaaacgacgaagaagaaaaaggaaaaaaggaagaaaacccaccatccccgaagtttctccagaaggcggatccaggaaaaaaaacagagagacaaagtctcttctccctcctctgtttcgactccgccatcgcgacagcaggcctgtgcctccttcgatgctctgacgaatggccttgctgctggctgcgtcgtcgtcctctcctccatcttccttgcttctccttccttttccttcctgttcttcttcttccttctgcttccggtgctcagtctcgccgcggttcgcgtatgagcgtctcgtcgggagtgagagacgaaggttgttctctgcctctggagcagagcggttgggtctgtcaccgagaaggcgcaggtggagaagaagaaacggcttcagcaggctcttgcagcggccgtcgcagatcacactctcctcttgtttgcactcatggcctgagacctgctctcttctctgtagagttcgccttgcttcgcagatgggccatccgcgcgcgcatgcacagctgcctgcgctgttcgcggcggcgccgtgacagcggtgctccagaggatctttcgaaatttgccgagaaattctctatcttcaggagcctcagtcgacaaagaaaaagtctccttcatttccaactgcagcggaggcaacggatcggcgctctcgtggtaaccacagcaaatctgcaacatgtccggacctcctgtctttaagaaacagagaaaacagaaatgaacattcacaactacacgttggcatctatatctctgtatatataaatatatatatatatatgcatatatagatgtacgttgtacatatatatatatatatatatttatatttatatgtatatgtatataacgtacatatatatatgcagtagaaacgcattagagagacatagcagtccggctgtgtgtgtctacagagcacagagaggcaggtccgacaggccatgcagactcttgaatatcgaaacgcagacagagagcctgcaaggcgtttcgaaaggtcttggtgcagcggcaggttctgcaaagaccgcggagaaaaaaaagagccgtctttgctcagggagaacgaacagaggagagcaacttgagaaccgaggcaggtcaagaaggccgcagcgaataggaggtttgagacccaaggagaaacgagagccgagagcaaa

SEQ ID NO: 3722 - DNA, 3266 bp, Toxoplasma gondii
  source 1..3266: mol_type = genomic DNA
aagagcaaaagccggttcctagctttccttacggcagagtagcactggagggccatcctggcgttgaatctctttcttttctgtggcgactcgtgaggttttccctccctcttttgcttctcttcctgttccgctttctcttcctcgttccgcgcgccgattgtcagccaggagtttccctccttcttcagtttctcggcgacgctcttcgccgtctcgccttcgtaggcgagctgctggagggcgacgaggtgagggtttccctcgagattttcggggagttcatccatgaacagaggaaagttctcgtctttgtatttctgctgcaagtgctgcagatactcaggggtcacgttccagtcaaagaggccgtcgtcatcttccatcccggcaacctgaggcgcgggcgccgccgggcagcttgaagcctgtgaagcagacggagaccctctggaggcaggggcctgtgagtctgttgccatggtgaaacttgtagaaaaactcgtgggtccgcggcaaagacctttattgtttgcacgagtgcttcaagtctcttctatctctttagaaaactaacagaggattcggggacagagcgagaaagcactggcggcggcacccgtaaaaggttgaaagtcccgagaaaagcagctctaggctgtagaaacgatagcatttcagttccccagactcacgaagagtgtatatcagtagcgcgaagttctccgctcgtgggagtgtgcattcataggtgtcttttaggtgcagacgttagtttttgtttcgctccagagactcgagacttctccacgcacgtctgcatcgaaggcgggaggaaggtaggtgtgtctgtggagaatccttaaagaagagaactgcggaatgcggatttcctaaaagagtgtttcgaatcagatgacaacagaaggtccgtttagagttcgcatacggaaaacgaacgaaaaacgcggtcaaagaggcggccttggagccggaagtcacggaggaaggactttccgaaaaatcaagcaaaagccaggaagatccagaaaagctaagctaatccgttgattgcacttctttcccacaaggctgtgacaaaagttttttccaagataccacgccaaactctcgtgaaaattttctcgtgaaagcgtagccgttgtgtcgaggctactgagggagacacagggtagtcagggaactagaaatcccctcggaaaaaagacgacagggtcataaaggacaaaaactgaggcgataagctcgacatcagacaagagaacaaggcgaacgacggcaagaggagacacgagaacggagacaacggaaacgaggagaggagacacggcgatgtagttgagttacgacgatgcgcagaagcccaaaaacgcgcaatgaagaacccaacgcttgaccgtcggagaaagggaaacactccatgaaaaagaaaatgtatttaagtccatttccgcctcgtctacgttcctcagaaaaaagaattggacgcgaaaagaaaagacacgctgtttctgcgagcacctggagccggcgttcggcgccttccgaggcgaagcgtattatcctgcggctaggacggtccttacattctcttctgtgccatttttgtcaagcaagggaaagactctcggattgatcgaacagtcacggaaaaggaacgcacgaaacaaaaatcttaaatgccgttgaagaattctatcgaggcattcgcgccccggtacaaatcatagcagtcgtcctctcagtctgctttgaaaggcttcggggccaacagaggcggtaacgcaccgtaatggagatgtttccgtgtttgtgtaacggtttccatacctgggagtgtttcagatatccattccgctttctaaaagtgccccacagagttgtgcgaaggaagattctttgctgtcagcattgtagggacctcgtccccgttctaactcatagaccaaggctcgtcgagtgtgcgtttcacgacagacatgtggtagaaccaatgaagcttgatttgcgtggagcgtttttaagccttgaagaataaatgctcgagtgttcaagtagattccactcacaggtcagctttgtgccaagacagaagagtagttcaactgaatgctgttctctatcggtcttctgcagtccactggggtggtgatgtacgacagcaataaagaagtttgttgtctgtacctcccaactggagtcatattccgtattctaggtcccaagataacactggcaataccatgactgaaatgtgtagcagtaagtataaatagaccagtaccaaatctgagttcagatcatacaggccctttttaattgctctgttgccccctctcaccatcgctggaatttggggtgttgcatttttcgcttgaattttgcgaccgacacggttgggactctcgctgtctgccgaaagctggaaaaaagctaggaattcaacgtctgtcgcctaatcgctgccagtctcctgatctgctctagaggctcactgtccctaggcattattgcacgaattcacagaaagtgattcttgcaggggattttaacactgcgtcctgcttggcgagtctctggcaaaaaacccagaaaaaacgcctctcgagcccagcttgtcaaggaaaggagacaccgagttgctctcccgtttttctccgtgtctccgggcccctggagacggaccttgtcacacttccgcttcgtagacacgtggaaatggttgtcttctttgcaaaatgaaatagcacaaagcagtctggagcatttatcttctgggggtcctccgaatgaacaagatggaatatcgaacgttgcaatcctgagatgtgacttctacgtggcaccctgagtttcttgcttttccgctgggccagaccagtatgtattgttcctgtgcgattatcgagtatacgatcctttaggtaagcgacggaatttttctcgtaagctttgttgggacctgaaatgtttcagcctccgcttactttgcatggtacgaacgggtcttgcggttcccttggttggtctactttttccttttgcgtgttccttgcgtgaaggcaagcgcggaacggttatttaaaagccctggtctaactctccggacgttttctccgtggtttcttgtccttttcccagggtctcttgttcgcctctgttccctctcacctaccggagaggagggcggagatggcccaatgtcgtattttccgctctttccttccttctgctgctggcaaaaa

SEQ ID NO: 3723 - DNA, 2475 bp, Toxoplasma gondii
  source 1..2475: mol_type = genomic DNA
agacatttccggtaggaatccaaaatttagggtgatcatctgctgttgcagcacaccaggggtcgtcctctgccataaaactaacacgggggtttataggagcgggtcggctggtacccgttcccacgcgtgaatgttgttcgccactttgcgatgcttgtcgtctacaggccaaaatcgttccaccgtccttgtcctgccacttttttagggttgataagccgagtggtgccgccttcacatgtggtggatgaggcagtcaaagtcgcaacatccatttcgagccattccttgccgatgcgtgcgtctagaaatgcagattatggattcctctgtttgtcctactggtagaacgctagatcactagaacgttcaaggccgttgccgatcttgtgtggtgaagctatagtaatcaccattgtgccctgtagctatttgcttgtgtttgtccagcatcattttaatatcgaacatgtggcgccgtacctgtctacaaaaatatccagactagacggttgagctttacctcatcgacttgcctttggtcatcgctctttgcatcggcctatcctgtcattacgcagtcattgcggcgaaggagtgcgtcaatcgagcgtacgaaatgccattacaagaaggcctgctcttcgaaaggcgtcttttccacgggacgtttgcatacgaagaccgcagagagggcatgaccgcctttgtggaaaaacgaactcctcagtggcatcacaaatgatccccctgggacatgctacccttcaggctgaccgtgcagaagtgcggctccccgtcccaggcttttgagcaagtgcagaaaaagagtttcgagttttctctcctctgtgatgtcatatgtcctcgcagaaaacaggatgcacccgcgtgatctctttcgattcatgctttcgcacagtcgcatcaccgatgcgtttttccgtagataccacaacaggcagtcgtgaatccgtcggctgagcgaccagacgcatttcccctaacagagacactgagacacaaatggccgccgacatgcattcctctgactcgaaagggtcaacctacaactaggacaatcaacacgcagctatacacaaacgtacactgacactgtggcgctttggcacgaagcatacattatccatagtcacttgagttatgatacgtgttgcatcgctgatcccaccttgaatctcagcagagtgtagcgtgcgaagcatttgggtgtagtcctacaaacagatgttcacgctaccagaacggtggtagagaccagagttcgtcacgctcggtattgaggtactgaatgtgtctcaaagaaaaggtgaaacaatatgggatactgttcacgcagtgagataatgactgaatctcaagctcatggtgtggagacgaagtcttggatgagcgtgttctgtcttcccatggcacctgacagtggcgtaatactgcggcagcacgatagcgacattgagacgaataagtgggacacatatgcgcataataaatgaacgaagtaactgcatgaggtgtgtgttttcactgccttaatcagccatcagtggacagttgctctaaggttttacgctactgaccacgtcccgtacggcatcgcagtgttgcttcacggcatctccaaaggcctctgctccacacgggtgcagcttcgcaacggagagacttctgcagggcagaagttttgcaggacaaaaaaacgcgaccataacgactcttcttcaggacgtctgttgctccacttttaactattgacaccagtaagagaagtaaacatcaatcggttttacgccagccttttgaagtgactgacatgtgttatattggctgctctgtcgcaaaggctcgagtggttgtttttgtggtttcaggtggcttgcatgcatgcgggaacgaagagacatacacaggaggccgatgggtgctccgtcgtagacggctttctcctgttgaatatcccgcttttgcatgagcggcgccctaattatattttgcaattctgtggcgtgctgctgaagatcgttcacaaagccattcgtgaggaaacactattcctgctgtgatacgccttttttcgtcctccccgcaatctgaccccacgcgagacagcgcgaacattaaacgagtcgacattcataatttcattcccgtcttagtcacattttttctgtcggtgccttttcttggtgtgtcgtgtcgcgagaattgagtattagtctttcgtttctccgtgctggtaactgggcactcgcatcttctgcgccaccaccccacgtcggacgtgtagcggtgcgtgtctgtcgtggagcgtagtgcgtttgtctggtgttttccttgtgatgagttttttcatgccttggtccccctgtcctgtgtagaaagcgaattttttatcgacgtgatcccctgccttgagccaatcttgttagagtctcaccgtccctgtcatca

SEQ ID NO: 3724 - DNA, 3647 bp, Toxoplasma gondii
  source 1..3647: mol_type = genomic DNA
gcttgaattcactggtttgtccgcgtcgctgggtggcactcgacttgcctttcctcttcttcttctttccggatccgccgcgccccgtctcctctctctccttcgttggcccattcttcttctccctcgcggtgcccttcttctcttcactggtcacgtctctcgcctccgtcgacgcctccttcgcgtcgcagtccgcgtctccgcttgcgtgcatgcaggttccgtctcgcgcttcgccctcgcaggtccttcctgttgctccttcgagggcaacactcgcggcagggtggcaggtgcagccgccccggccctcgtgtccactgcatggcgctccactctttgcggtctcctctccatcttcgtgcaagcagcctggtgggcatgcgccgggcggctgcatgttgctgttgtcgctcgcaatgaggagcaggttgatgaaggcctggttgcaggagacggcgtccttcaaacgggcaattcgcgagtcgattgactcctgaagcagtgctttgtcttcgggagcgaggcgccgcaaatgcctctcgattcggtgcacctccatcagcgcatcctgttcgtacagctcaaacgcctgccgcacactcgcaaagtgctcgagctccgcctcgtcctcctcttgtctccccagggagacgccttctcccatgtaccccagttcatcgtcgttctttccgctcgcagccagtgccgagaccacgtccgcagagggagagacgccggaaggcgaagacacttcagaccgactcccttcgttcaggaccattgtgagaacatggaacactgaggaagagaaggagcaagggggaaatgcggcacagggagaaaagagagagaagagagagaagagagaaagtgagaagtggggtatagagttaacccaagaagaaagcgacgtggaacaggcacagagaggagggaagagcgcagcagtggaaggcgaaaggtgaatgtaaaggagaggtgaaacacacgcgataagctggccggcggctagtggataaccaaaagatagcgagagctacacccaaagacacggagaaggaaaagcgagagttgaggaacctgaggaagcaaatggaggcgactgaaatccactgggcataaccccgagggagtaacagaagagacttttgtccacttcgtcgcgacggggcccttgaatctcgcaacctaatcggaaagccactgaatcgacgtgaaggggagagacgttggaggaaaggaagaagcggaaaagaaatcaacggggaacggatgcagaccaggactttcgcgcagacggagagaagcggcgcgttttcgcgactaagagagcgccctgctaacctcaaggaaaggctgcattcgtaagagggaaaagagcgacggagagaaatgggaaatttgagagaatagcacacggcaaagagtccagaaagcacacgccaaagacgcagaagtgggagcccgaagcgaagaacgcgcttcgacaccccgcacaccggcgaccgcctatacagcacgaagtcgcgagtctgtgaacaaatggatgggatcctttgttgtcttttcagatttggctctcaacgagaacgagtacgatccaaggtgaagaccggtcaggtctgtctccctgcgaacgccgcgaaccaccgtgggtctctcctcccctcgccgggcttttccagcggtttcctgagttgtgtgactgaatcagaggaagaaacgttctcgaatcggatccagaactcgaaaattctttcaccgtcaaaaaaagtttggcgaaaagcgggcaactcacacaccggtcgagtggcggaaatacgccgcaacagaccccaaacgccggagtgcagactgggtcgcgaggtggagaaacgcagcaaactgcagctgcgcctctgctctcagttctcgggcggaattcgagcacgtggcgaaacgcgcacacttgacaggtttcgccagagcccgtacaaacggagcggccgcgatatgagtcgcttttttgctctgcttcgaaagtgtgcgcgaagtcgacccattggagctttccccaaggcgcgcaagtcgagctttcgctctgtctaggttcgcagggattcttggcgccagcttcgatgccaaaatccgaaagaagtgcattttctattgagacgctaaggtgaattaactcccttcaccgggtgaaaaacgcctcagttctgcagacggaagcggcaaagctgcagttcgttgcacgacagacacttccgcgctcggctgatggttgtctcggtcccgcgagccgaagtctgttaaacacgcagcgcagctgggaatccaatccggcccctacctagaggaagcgtcgtttctaaccacctgagagtgacagcttgtatcaaatccggtgtttcttggcagttttgttttctacttaggttcgtattgggggaacccccgtgcaagatgttcattaagccgcggtccccgtgaaaccagtggcgtacccgagtgcgagacacacacaacgcagctgacggaccattttcgccggcgcttgctcgctacacgtctctccgcgacgattcgagatcttccacattgggacaatcaaaacacacgagtttaggattcttaatatatgtatgtggagaactcctgagatcaagtgtaccagaaagtgtgctcgtaccgaaaatgtacagctgtcttgctgtactgctgagctacttgacgcaaacagctttcctaacgccacttctttgttaatatcgcatgtggactgccgtctccgcgcgtcgcacgcgcgggaaaattacggcagtgtgtgtgtgctcgccagatgatggtggtcctcgcaggcgacgatgcacttcggccacctaaccaagttgagctagttatcaacgagggaaaaacaaagtctgtgtgtatcgcgcgaaggatgctgcacgtttgcttccagcactccagtgtaaatacaccccggcagcaaaaaaaatctgcttgcgatccgcgccttgcgtgtgagagctaatcaggccgcttccggtgtagtttttcggcactcctgcataaattttttttctttctccccgaagggtgtgtgggacgcagaaaagaggagaacgaatcgctggtggatgccggtttttggacaccgtgtcgcgggacaaggtgctggtcgtggtgtcaatgtgcaagcggacgtggattcccggacaacctttcaactcaagagtggtgtcccttcacagtgattccccttgtttttctgtgtcgtcttattgacaaggcagacttcagctgggcacgggacgggtgcattttctgcaagttcatgtttcgtctcgagcaccagtcctttgtgaggtccagcgaacccaccgtcttgtggaatacttcccggtggacaggcttctgtgttttgccagttcttcgtacttttgaggcacggcaccactcaagtcggccaactgtaagatgtggtttctgtctgggtcagtttctgctttccgacaccccaaactgaccgagtgaaaccctcttcatatacatcctgtccgctgtgtgccacggcgtgttggtggaagctgtcatctttcgcgttgcgctaatcgtgcacaccagcgagtcttttcaggcatcgcttctcagaa

SEQ ID NO: 3725 - DNA, 3521 bp, Toxoplasma gondii
  source 1..3521: mol_type = genomic DNA
gtattattattcgtgcagtgtcaaccgggtcgctagtctctaagacacgagcacactgtcttcaccccaaggcgcatgaatatatacatatatatatatatatatatataaacatatatatatgtatacatatacatatatatacatatatatatgtatatatgtgtgtatatatgtgtgtatatatgtgtgtatatatgtgtgtatatatgtgtgtatatatgtgggtatatatgtgtgtatatatgtgtgtatatatgtgggtatatatgtgtgtatatatgtgtgtatatgtatgtattaatgcatatatatatatatatataagcgtatgcatactacaggcatgaatgcacacagatgggtgtacgtattcttgcgcgaggaggggaaaaagagatgcgcatgcgtttggagagccttacatgtgtagttctgtagaggcatctcggtgttggagagagatcgagcgtcgcgagcgcgcagcgatggacgacaaagacctcggggagacgagagagttcccggagacaacagtctcctctgcgagaggcgcagtcgtcttccggaaaccaagcagagaacctcgaagagaacaagacaggctccggcgcgtttggcaccaggagacgcgcacagactcgagaacgaagaaacgaagggggcagaccaagaagaagaccagggagaagaaagagagaaaagaaacactgggagaagaaagagagaaaaggaacactgggagaagacggagccgtggtacggtgatgcgagaagacagaaaggagaatcgagaggcggggaaaggaaacgcggagaagaaagtggaaggtgagcagctggcaatgtatcgatgcgtacgcagacactggagaccgggagaagctggagaggttgcggtgcttcgaaggaaagatgcgaaggaaagatgcgaagggaagaagaaagagcttctgaaatttcagtcgctctctgctctcgagcgcggacagagaagccgcgatccgagcaggcgcagatgtgccaggggagaggacggacggccgaggcggcgagagaaggcgcatgcagcggaagacgtcttgacagaaaaagtggagaggagcgaaaccaggagtttttccgtgacgattgttgcggttggcaaaggacagagcagaggcaggcgacgatcgcgaagaagtaaagcagctgatcggaccgcgagcgcagctcgcgcgtgagaaaaagcagcggagggaggagaggaagacttgctggcagagtcgcgcgaggcaccggttccctgaaaaagacttttacgctctgcagtgacctcgcgctttcctcacagtttctccccacagctcttcttgcgacctgctctctccccgacttgggcggcgaaaaaaacgcgacaaaaaacgagaaacatctcttctccgcggcgaaccttctctctggaacacacagccgcgcgagcgcggttgcatatttgcatagctgctggctcggacatcctgggggagagaaactgagggtggtgaaacaggaccggacggagcagagaatggagagagaggaagaaaagaacattctttacttttttggggagtctccgagtcgactccgccggagaaacgcccaaaaatggcctctctctctagtcctggggagactctcaggtgtgcactcgttcatggcccagatgtaagcgcttagagtttctttttcttttgtgtctttccccacagaacgcaatgctttcttaattccttcttgattcacactgtggagacaccgtaaccagaaacaacagaggaggcgagaaggagaggacaacgtccgtgaggactcagtggccggcagtgcattgcgagtcctttccttcgcctctctctcttgcacttcctctcaaggactcgtcctctctttcttcgtttctctctctctctttgaatagctctctctctcttccgatatgcatctcttcctctgtctgtgtctttctccatgctcacctgcatatgcatatatatacatacgtatatatacatacatttgcctaacaatacatacatacattcatacatacatacatatatatatatatacaaacataattacatatatagagagagagacacagagagagaaatatatatatatatatatacctctctctttcctacctcttgccatttctctttctctctccccgtctctctgactctttcctattcagcgttttctcttgcctttctcatttctgtgtatttgcttcctcgctcttcctccgttgttgttttctagctcaccacaaacctcttcacctttttgccacgatttcccttttcgtctttcggtttctctgtctctcaagtgcctgccgaccatcttcgctggctcttcgaactcttcgaactctttctcatcctcgttctcttgcttctttcctcgacccccctgtctgcgtatttctcttttctccttgcctgcgccgaggatcaaacacagaagaagcgacagagcgcgcgaggcgcccaaaaaagaaggaacgccctgtttagaagagagattcgtcactctcactccacacccgcgcaaacgatttaccgcagctctcgattctccaaagctaaacggcgtcggcaaaaaccgctgtcagcctgcctgtcgatttcatgctttttcggtgccgacttcgcctctctcttcgtgttcggttcttgtctttagtctttacagctgcttcctttcttcttgaccttttcatgctttaaatcagcaccgaggtcaagtcttccttcagagaggcagcaggccttgcggcggctaacgtggaaggtccgtttctggtgcaggatcgaagttacgtgagaggcgctctgtgttctcactgtccagagcaagttgagactccaacgcattcagtgtaaagttcaaacggaatgcaacgcgttcctctaggctgttctgtgtctcttctgtcagttggggtgatggggggtctccgactgtcgccgcgtcactgtggtttgctcttttctcttgcgtacggatctcctttacaaacgtaaactttgagcaggacagacacgaaggacaagacacaaaatgcctctacaaagcgatctttcttgtctactatttttgactgaatctggaagggaagacccccgacatggcggaatctgctcctggattctcgtacacaaaaaaaccaatacaaggggactccctgtctgcgaaggcctctagagcgaaatgcagaagcctctgaagtgactcacccagtttccctctccatgcaccttcaatctggaaacagaaaggcgacacactaactcggtttccgtttcatggtgacgactgttttttggctcgaaaaaaaactgcgttctccgaatataatccgaggtcagatgaatttttcggggaaatggcgcagccgaagagcctcggcgaggcgaggagacggtcgctgcgccgccgtatataagggcagatggagaagcgaacagagagaaaagagaggcgaa

SEQ ID NO: 3726 - DNA, 1961 bp, Toxoplasma gondii
  source 1..1961: mol_type = genomic DNA
tgcctaagcgcatgcgtcttgtgagagcaactcgagaattcaagttttccgagacgttgcgagacagaagctcccgtgtgcgtcttcactagaactgtttttctcacgtttagagatactcacagcacaggaaatggcactgagagctgcgttctctcgcctacttgggtcccgactggagaccgccctgatgcgacgaggcccaaacacacccaggcatcaagagtgcctgccaattctatttatcattttgtatttaggaaccaaacagtcgcgtcacatgtgaccacggcaactgctgaaacgttccgtctcgaggatttgctaatccgcaattccagcttccggtaggaggcgtgtctccgcgtaacttcttagagcgacaagggagagactgctcttcgtgatggagattctggactctgctgttgcatacagcgtgcaaccatgcgcatgatatcttgcagtttccatggacaagtttttctctgcttttcttccgtttgttctctgcgcaagtgcgttcacaactcgcggtgccatcgagcgagtgttgagcgaagaggccttgccctggtgtagacgctgccggttatctgacgcgggagaaaactactactcagatgctagtctgatcagtaccatcgtcctgggagtaatcatctctgagactggattatttataagctttttctggagactatatcctacgagttggacgactggtttagatcttgaaggtctttttgatatacctctcgctagcctggcacgggttgagttgctgagtctccgacatccacccgcctcgctgtgcgcaagatccatatagatgaagaaagtggaaagtgctttctgcctcgacggttaaggcgttttggtagccttccgacgtttggtgaaagaggcagcagcagcccccacccagagcctgctcttcgttgtggtgccgttaatcagaagaattccatcgttactgccacttcagggaggtttcaacaacacaaattctggcaaagtaccagcacgaagggaccccccgtggctagtctctcgcacaccccggaagactgagtttgtgattcattcgcccacccagggatgtgcgcggacctttggatgtacgacgcctcctccatccatctcttcaaactcgtgaggctgtaccgccgttcctgacgtactgctctttctcttcctcctcgctttatttgcggatctgcagctttaacgacagcatgtgtgtgtccgaggcggatgctgtatgcgagctgcacggcgagtggatctcttgcttctgggttcttgtctgctctgcttgtgttttctgtcgccgtctacggcgtaaaaagagagaactgcatgccgcaaatgagacgctgtgctctctgatgtcgagccggtcaacaactcaaggcggcggccggttcaccaaaaagcgcaacaagagcgcggcgggtgaggcatgaacagcgtctgcgtgtagcacagagatgcgccgcggcaagcgcgacggtcgatccacgaagcaccgcgagagagctggatacgagtcagggctcgcgccaggcgttcttttcatctgtttgtgtcttgcctctcgtgtgtttctctgccgcggaacttcttgcgcgtttccgatgtcttttttcgcgctgctgtgggcgaaacggcgaaacggaggcgcgccacgcgtccaggagagttcgcacactgcgcgcatgtcctgtcgcgtcgattggcgccaagcggtcagagcacaaaaatcgctgatctacgatgcagagaatcgatttctcctgtcaaaagcgataccaaggaccttgtgcatgctggccgcctcggaactcttttgtttctcgcgatttgtcgtctccgcgttactcgctggcggcgcgattctgctgcgctgtctcagccgcatggtcgagcgacgtgaccaccggtttctccggaacgga

SEQ ID NO: 3727 - DNA, 3105 bp, Toxoplasma gondii
  source 1..3105: mol_type = genomic DNA
acgtctttctcttctacgtcgataacgaacgaggcgaaagtgacattgctacagttgccgtcactgtcaacgatcaagagatgcagcgagaatgctgcgtcagaaatttcttcgtgttagtctttgttgcgggcgaaagcgagacacacagccttcgcgcttggcaaaccgttttttttaaaccttttccgtgaatgtccataacggggaaaacgaagcatgcagttgcgtgtctagtgtgcgagtgcatatggacgtgcagatatatgaggagttaacttcagttcttgcggttttgaacggaagtttttggtttttgaaggtgcctcggaagccagtttcggaacaccatttaaaagattcggtcgacgtccgcaaactgagcagcggactgagggctcacttcaatcgagactttctcagcccgaaatatccacaaagactttcgccgttttagctgcactctgtctcatttgcctcgaggccgaaggacagtagaactcaaacgcgcgtgcgaggagtctcaacggaaatttgctcgggtgttgccgtcaggtctcatcgccgaaactgcgactttcggtggatccctctgtgttgggcgcccttctgtggtgacgtgaaaaaaaccatccaggctagaaccggttttcgaacatggtgacaatcgtccgccacatcttgctgacctttttgttttcggcttccctttccgcgagttcgacttcggcgtcgaacttctctttctgatcctccttgtggcggtcgatcgcgagtttctgtctgcgcttctgccgtctcttttctttttcttggctggccttcaggtctttgtctgtcaaggtgtctttcggaggcagcttcacgttccccatctccggcgcctgcagcatgtgtccgatggcgtaccggcggactttctccaacaggctattctttctcggcccgctaacgaagttcccgctttcgccttcgacaggcacttcgtcgaagtcttccacactttcccttgtctctccgtctgatttctcgtctgggtctccatcctcctgcgctccgtggtgcccgcccaaatcttctttctcgaccttctctccgttcttctctttttcggcacgaaagctgctgaggagcgcctcaagagcgctttcgttaccctctgcaaacgggtcctcttcaacgacaacattctcgaagtcgtccgcagtctcttcctcagactcttcttttgtcactttgtctgcatgtgtttcggtctcggcctgcgtccccgcaggtcctgttgttagtttctcgatcttctccgccgagtccgcagccgatacgaagagcgtcaaggacagagggaaagacctcgcgtttgcttgtggggcactcgcctcccgtggaaaaaaggaagacgctgcgatgtcttgtgcactcgagaccgcatccggctgacgagcactttcccagcatcgcggcctcccctccagcaaagccccacagacaacaacgccggcgacagctccgacgaacactctcctgcgtctccccatcgttctctcacgaaaaacagacgccagccgttcaggtcgcaaaccctatgccctgaacccttccacgtggacgccgagaaacaccgaaaggaatcgcccacacgactcaggaatctgtgttcacagctgcatcaccgcgtaaacagacagtcacacatgcacgtacatcgacagctacgcacaaatacccgtttatatatacatatatagtcttgtttgtatgtccgtaaaataagttcgagcttttagataaaggcagacgttcacaaaccagactgatgaaaggcaccttgggcgcctgtggaatattttgattcgaagaatacttgccgagcaacatttacaggacactcaagccggagccattttccgtctagagagtccttctgacgcttccggaccccgctctgtggacggacgctggtgtcgaaacacgggatgcggaaccgaccagcattattgtctagacatgtagtggtgcagacagtttcgtccatgcaagcgtgtatggtagctcggtctgagaccccacgcagattcgagccccccttcgttgccttcaaaacacctcagaaggaagactcctgccctgggagattccgcagaaagcgttgcccgagcatgcaaacgccgatgtatttttcgaaagaagcacgaacattcagccaagaaaaagcagaaacagaggagaagaactaggaccgagcgcgttcactggaacttggcacgcccagctgccttccgtgtatggcaattcttcgcacatggacatcgaacaaagccaatcccctttggagttgggcacggataaagcatgtgcatgcatgcaggtgaacgtacacaaagagaatatgtggacatacagtttccaactgtattttcacgtgtctgtaggtgccgacgtttgaccgacgaaacggggcgacagggggagcgccctccgcaaccagaggggggtcaaacggaaaaagcaaaggagagatgtatgcatgcaaaacacaaagagaacagagcaagtgcctcaacgtttctgcacgtactagggacgaaaacagtccgaattgtccgcgaacaaaaccccccaaagacgggcaacgtttaaaccgctcccggttggcggcacgggcgcctgtgcacgcgtgcagacaatgtgatctcacgagtgcgacttttttacattcgcgttagtaccgtttcaagtcttcttttgcctctcttgactcttgacgaatgtccgcaggaaagcccctcagaggaaacgtactccgcgcgttcatgctcgctggcagagccggggtcgtcgcgtctcctctttcctgtaaagcgcaaagcccaagcaaaggcgaaacgggttttatcctgggatcaaactggggggaattcacagtcttctcgagcagaaacaaaacggtcttttgtcctcgttttgatggcagggaatccgcgcacgggtgcctgaattgtgaggctcgggagaggctttgaggaggcagcgaaaaagccgagagacccgttctttatgccggtttcttcgggccttctcaacggctggctcgactgcgctgca

SEQ ID NO: 3728 - DNA, 716 bp, Toxoplasma gondii
  source 1..716: mol_type = genomic DNA
ggtttctcgaaatgattctttttgggagcctcgctcaccttttctctgtaggagaaaggagagacgcgcgacaaggttcgaacccctcagagaagcgcagctggcgggcagccacagtgacaacaacaaaaagaagaagaagagaagaagaggcatcgtggctgggatggaggagagaagagctgcggcaaaagaaggggacagactgggaagcagcgattcggagaacgaacgtctcctcgctgactaaaggaagcgacggacagaaagcgccgtctcgcgtttctgagcagtggctatcaagagacaacaaggggaagcgggggagaggaagagacaggtttggagagcagtgccgttccgctcctcctgagaggggaagcccggcctacagaccccgcagtgcattgcacaactcgactgcagaagggggacaagcagaacgtggtgaggaacgtttcaattctttttcaggactttgttccagctgcagcgccccccttcggtgtgcatcccctcttccctgttcttttggatgtactttctcgagtgccttttttcatgttcgaccttctggcctctgtgcactttgtcagcaaaaccgtcgagacaagccttcagtctcgcgcggtggagaagaggaggaacgagaggcagagtacagctgagaacccgaagaagacggccaagaaaaaagagaacggtcagatccagga

SEQ ID NO: 3729 - DNA, 4601 bp, Toxoplasma gondii
  source 1..4601: mol_type = genomic DNA
cgaacttccgagatcccgcagctttctgcagatgttcgagtttcttctgggcgagaatccactccgcgaggcgtcgatttcgcgtctggatgtcctgcagaagcttcgcgttgtgctcacggtgtctgcgcagcggctcagtgacgttgaactggaggtcgcgcttcagcttcgcgtaggctgcgtgtggtgcgtctgcgcgagtcacgcggtggacggcttcccgatacagacatgcgtctcggacgatgcatgcgtcactcttcttcgtcaggtggaggaccgcggcctcggacaggatgctcagacctgtgcagaggtgctcgacgccgtcgaggaagcgcgcgactccgccctggagagcctcgaggctctcgtcaaagcgctggaagtcgcgaaccatgccctcgaacacagggtcctgcgccttcagcgaggtctccagcgagccatgctgcaaccgagacaagaagtacaccaactccgacttgatcgccgacaaagagtcctccatcttcccccgagacgaactactcatcgagacagaaagaacgaggaggacgcgaggggagacgaagctcacactcccgagagacacagggaggaaaaggtcgggggcagagaagaggaaactgaaacgggggagaaaagagaaagagacagaagagaacgagagagaagagaacgagagagaagagggaagtgaaagggggagagagagaagagaggaaagagaaacgagagactgaaggagaggtcggcagaagcgcttagagaggacgggagagcgctgctggagagaggaggcgtcgacctccggcgaaaagcatctttggctgatgctgcctgcgcttcatctctgaggaagaaaagtgagaggtgaaaggccgagaaggagaaagacgggagcggagcaggagaaaacacacacaggggagacgcaaagaagaacgggagagaagctgaaggggagagcaaggggagaaaggaacgagagaaggagagagaagagttgagggtcgacgaaggcgcggaacgaagagaagacaacgatggcgaagagaggaggaaagtgaggaattaaaagaatcaggagaagagttgggcgaagcatatctcgcttgccctctctttttacctggccggcgcgtcgcctctctcaccgaagcgccggccgaatcgggagggcaaagcaagaaacaaaaagggaaacaggaaagccaagactttctcgctttttccagaccctgacacaccacgtcgtcggctgtttcctctgcgccgggcaaacgcaaacgcggcgagtttccgcgacgatgcggtcctcctgtttctgtggcgaggaggacgtacacccgacagctcgacgcggagaggcactcgcttgggtagtctccgaagaatttttgccggagaaaaactccacggcgagagcgaggacgagagaagccgcgaaccgcgcgcgaggaaaagggagctcgcaaaggcgccgctttgctgcccgcccggcgcgccgtcgtcgggccgcggttcttttctcaacccccagcacagacgaagtttttcgctgtccagcgaatcggcaaacagacggaggaagtcagtgaaaagaacggcctggcggagagacctggaggagagaccgggaggagaagaacctgcgaaagaagcgaaagtcaccggcgggattcggaagacgctccagagttttctccggctgtatgtccaccgcgagtcgaactcaaaaacctgaaagttggtggttctccaagccgtcaaaaaacgccgagacaccgcacctaaaacgctgctttcgatgcacagcgcgactctttcgcagctgtcgcttttatgaagcatcactatacatctctgcagttcgacgggagagaaaaccaacggagggaaatgcccgtcaaaacgcgtgattgccaggagaggcgccgttgcagcttccccgtagtcctcgagggagattttccgcgggaaagtcctgcaaaacaaagtcgcttgaggtcttccccagcgagttctccctcccctctgccgaaaaaacaagtgactcaacttcagtggtactgcagtcgcccctcgtcttctcgcctgttgtccccagcgtccgtgtggaggcagttaattcgttgtctaaccaacagacaatctgcacaggcgctctacagaactcgaggcagacagaaatacatcccaaaatataaataaataaatataaataaataaatatatatatatatatatgtacatatgtacacgtcgtatatcatctctaacctgacatacgcataaacatgaaccaaggcaaatacatatatatatatatgtatatccaaatacatatatatatatatatatatgtatatctatgtattatatatatatatatatggccgacggtctttagatcggcatgtagacagtagagggaagcgaaatacctgctcgatcacctctctgtgagcatgtggatgtggagggttgtgtgccagtcgatccggtcacgcacaggctttttccatttagcgctgcatgtctgagacgcgtttctcgctctctctttgtttctcgctctctctctctttgttctcgcgaggcttggcggcgcaggcctgcaagagtagcgaggaagcagagccccaaaaaagcttcaaggcagcagctgtgctctgtgtgttggcgtcccctctcaggccgaacgaggctgttcttttcaccgtcgcaaggcagacctgcgtttcagcttcaaaactccttgcgacgacctctcgcagccgttctttcctgcattcgcaaaggccaagagaggagaactgctcacagacatgagctcttctccacgcagtctcgggttccaaacgctctcgtttaccctggcgcatgcctgagcacacacacacatgcatgcatacgcaaatgtaggcacaccaggaccacggatgcatgcgcgcaaaccacgtacaagtcggcaaaaccgagagcgactgaaattgtcaaggactgccttgcgcttttttttctctccaaagggccacgtgaagcactcgagtctaagcgaagactttcctcatgctgagtcacatctctacctatatatatatatatatatatacatatatatacatatatatattatataatgtattatatataatgtattatatataatgtaatatatatattataatatatatatatatatatattataatatacataatatagtatatataatatatgtaatgtaggatatatgtatatataatatgtaaatgcgtatgagtgtatgtattgagaagttcacgttggccttcccactctgaagaacctttgctccgggcagaaacgcacacaggctgtctgcgagtctgtgctgagactccctgaggagttgagaaagactgtggcttcgaccgtctgcagaaagacgcaactctgcagagtcgagacgaggagaaacagagaaacgcggaggcgccgtgattgttttctgcaggtgattcgcaggccttcttccgcagagccgccatccatctcgactgttccttcctcgctcttagttcttatcgttctctctctatctccctttctttgccttcctctcgctccagtgtctcactctcctgctctttcttttcttctaaacatcacaccgtcccctcgcgcctcccagcttcttttctgtcttgtctcgcgggtgccgagttctgccggggaggccctggacgcgcgcgagacgctccgtttttctggagagagaaaggagtcttttctcgcagggatacccgctcaacggcttttctcttttccccaacgcgtttctccctgttcttccctcacgcactaagggagcggtttgccgcgtccatagtagtttgtggtgcagcttcagagtagactagcgctggcgacagaggtccgcttttcggcggaagaagaccgctggaagagacaagcgcgggtggggggagggtggcgacccgctgaaagcagcaggcagagaaggcggcgcgacgtcctttccttttggacttgtttttgacatgaacatctcctgagcgaagaagtcgagaacagacgcgaggcctcgctctgtcgcagcatgtgtggcggagagcagagggcggccccgtcgcgcctctccacgaagcctcgcccctttcgttccttctgtcttcttttctccccttctttgcttcttgtctctcctcgtcttctttctcctcttctctcctccaattctctcggcggaaacaggacgaattgtccgccgtcagccgcaagacagacaccctacgcggatcgtccgcgtgcgaaccgcgactctgccggcgctgagaggcaggatcgcagagcgcggaccttcttttcaaattcacccgagtccgagaggcgccgaaaacgccctccaatctgctgattgccgtgacaccttgcggcgtcgaaaggctcccgtaaatcttctctcttcttctctctcgtcttctccctcgtcttcttcttctccctcgtcttctcgctctggcgttctccctctctttcgggcctcgttctccgtgtgctgttactcgctggttttttcgcgagga

SEQ ID NO: 3730 - DNA, 1718 bp, Toxoplasma gondii
  source 1..1718: mol_type = genomic DNA
caaacgaacagggactggaagagcaaagacatatcaacgaagttttctatcctcaacagaaggcctcagctcttccccactgatcattgtgccacacactatggcagatccctgaatccacacacacgcatctatgtcttcattaaggcaaccgataatatatatatatatatatatatatatatatatatatatacatgtgtaaggggacatggtgtatacacgtttatataatcaaatctgtatacaagtatatacatacacatgtatatatatatatatatatatatccgcaagcaggaacgtatgtctacgtttaaagagatagatatatatgggcgtttggatacaaatgacaaaatagaacggagaagagttgagttcgtttagcaatttcagacggtattagatagctcgggatgacaaactgagcctgcttaccgtcaggcacgattttctgctgaagataataggcctcccactccgcattttccctcacgtctggagaagtcagccaaactccattgccctcgccattctttttctccgcgcctttgcctcccttcttcttccccatcttgccgccgagacgtgtaatgcgttagagaagacgaagcaggaaaaacgcaggaaagaagagggaggaaaggaaaggagagacggaagacaaggaagaagagagaagagaggagacggaggactcaactggacaaaaggagagacctaggtcgaagtagaagagacagagaaggcacacacggcaaagcaaggagactggtaagcctgaggcaaagaaagactggaggaggagacacgaaaagaaacaattcagagagcaaagaacagaaacgaagtgcaaggtgaaaaagaacagagcgcgcgcgggacagagagacagacagctgcagccagagtggcaagggaccctgagacaacgaaggaaggtcgaggtcggaagctcggtttaaccaaggcacttttctaggagaagaagaccacgagaacaagaagcagtgaagaaatacctgcaaaagggcagagggacatggagttcagaagcagaaattcggtcaagtttgagaagcgcttcttttccagcgtgcatgcgttgtgccagaagaagcgcgaatcttgctcttccgtcgattcgtgtggggtgtgtttcgtcctccacattttctcaagactaggaagctgtttttcatcgcagctccctctgtatcttattcgtctttctcgctcttttacttttgctgttctctcgagccggagcaatcgtcgctgtgccacacgcaccccagacctctctcaccctgacgcgcgcagaaacgcgtaggagagaccattgagcatatgtattaatactgcgaagataacttgggtgaccaaacctgtcctgaaaaaggactttcttttccttggcaaatcttttcctatcatccacagcgtccccccttgtgcgtttttactccctttccctccctcctcttcgacttctcggtttcccggttttttccagctcgctggttcggctctgcatctgtttccttgccttttccttctggtccaggaccctttctcggctggtttcttagattctctccatctgcactcgtgtgtctctgtcgcgagcttcgcttccctctcctggagtctcctggccctctgtttttcgatatttcgcctctgcgtcactcgctctcctgtttcctccaaaa

SEQ ID NO: 3731 - DNA, 4274 bp, Toxoplasma gondii
  source 1..4274: mol_type = genomic DNA
aaagtgcattcgtcgtcttctgcaaagcgtacctcttgtccgaacccaaggtgcgacgacggttctaacaggggatcgtggtttagtggtgcgacggggggcacagaagcacagtctgtgactgggactgtaccaggggattccatttgttgcatcggagtcaatccgacaaccacttcttggtcagttctattttcttgggcaccgcatacggtggactgactgtggtggtcgccgacttcttcctcatttttcctgctcactcccaccggagagtccacaaacgaatggcacgagacactcagatcttcgtcctcggaagcaacccgcgcagtctctgaaacagacagacagtgatcggaggtctcagaagggacgtcaggtaccgaatgagaggcgtctgctgggaaagtgttcgtaggttggtcttctgtgcttacagacgaagcgcggatatctgcgtcgaagtgacccagatcttcggcaccgcacttcgcgattagaggcgacgcgtgagcctggccagagcggtctgaagggagaaacagaggtgtcaatacgtcttcatgcaagtgaaaagcgggggcctgtggacctaaatcgcggtcagcactgtcgggataggcttcgccgtacgatgtggcctgggaggcaccagcgaggtcaacaccaccggaaatgcagttggaattcgaaacgtcgcgggataaactggacaaacagtccgctgtcaactcaccctcaggtaaaaggtcctcttctggattgaagacatctctcgggagagtcatcgccggatttttcagacaagcgtcgagttgaggctcgacgctgtctggcagcttccgagctgcgagagagtcaaccgactcgagggtgtccattcttccgctgtccaacgtggaaactgtaccaccaaactgaaacacaggagaaatcctagacggaaaacaacatcgaacaaaatgatataaaaatgaccctagcgagagactcacgtcgagccggcgaccccggttcgccgttgaacacagccaagacagcgcattacctcgtgctggcgcgctggtttcgagaagttgccacaagtgaatttgaaaacagagacgctgaaacaccgagctaaggtcccgcgcggcaacaaaaaaccgtggtaagtcatatgcgcagagccgtaaaactcatgtacaagtttgcgcagctttgtttgttgccgcaatcgcggtgcttcacgagaaccgatgctgccaagaacgacgctcgagggacttgcgcgcgtacaagcgctggcgtcactcgaagcatcaaagacaaggctgagaaagattgggggacagggactactcgaaacagctctagaaatggtgcaaaatgcagtagacgtaaaaacgctttgtgaaggtgggataaaagaggctctcgtagacaaatgacaacaacaagtcccgaacctgccacgccgaacgtcgaactgcgtccgttttcgcctcagcgctccgcgctgcgcgttttcttgcaagcgttcgcttcgagcgtctgtagcacgcgcacctggtgggagctaacggcgcaaacctagaagttcccggtcctgtgtttccctctgcgattttaggtacctcctttagggaaagcaagcgcatgcgtgatattggctcgcgtttctaacacgaaacgagagtaccgtggtcacttgtttaatctcgggcacgcgcatagtgcctctgaggaatgttcgtaggcttgtctagcagtcaggctgctcgtttgaggcatcgcttggcgtcagcaatgctttcaaattgagtgtcgcgcctaattccttatggcttaagcttatgttttggtttcagtcccgcagagctgctggagacattaactggcagacgccacagacaggagtggaaagggaaatcaggccatgttagttgcgccacagtgcaagcgtgaagctcgaaagcttgggaacatcctgcggagacaaagatggcgtatcagtccccagaagctgcagcaagagatgccaacagttgtccgctccttagcgcaagatgcactagattgttgcctgcgtgtttaatggagttctgtgccaaaaggtatgcgtcagcccagcgaaacgatagccgtgtagtttggaaccgcttctggcggacagttgccaagtttcatgacgtaacccccacactcaagcgcatgaagggaatacaatgctgtggcacggtcttcgccagaaacaccagtccgttttgtgacaacacaaaccaataagaccaacagagatgttcacaatgacaggccggatcgcgggagaatcggtatgcgaacaaaccccgtttacggccttggtttttcggttatctcctgagtcttccacggcgaatatgaaagttcaagaatcacgtagaacattcatgcaccgtctggagtatcctcaaacgacctggtgacaccaccagacgaatcagttggagtgttctgctgcatattaattttgtactagagggttttactatcaaaaacagcgatgctcttgactgtctcttcatgtcaggagatcacgacccaaaaacatctgtgacggtaaaaagcatattacggagcttctctgcgcctatattgctccttcatgacaacggctgtgacacgggtgagttgtcttctttctggcttgccgacagtgacacctccagtcaccttaggtgtcagagcgcctaatgcagcttcacccacaaccggtgacctgttcggttttttgtcaacgcaccgcttaccggcgctccacagacaatggataatgaggttgtcagtgtttgaaagtgaaataaaaggccactacttcgaggggtattcgccttcgtgtgcaatttcgctgcttatcacgaacactcgggtatcttcttctgtaatgccgagtttaaaagccttttagcactgatacacttaagcattctgctattgcagatgcttcaacactattcctgcatatacccgacgcgatctggtgcttgccttgccacacacgcacgaactgccgtgagcggttccatatccgcatccgttgccgaaagccactgtatgggacttcgcgcgtcgtcaggtaatgtgattcctgtgaagaatcgggaaatctattgtcaaaaaccgcacacatccttgcgagtgtgcacttctacacttcaatcgacagaatcgattctacaaaaacccgcgtagacgagaagtgacgttctagatttcctgtcccacgtgcacctaggcaatcggtttcgtcacaccaaatgccgctgcccgccacatcaacatccacataagtcacaagagcgttcttgctattgtttgttgtctgtaagagagcttagatttctcacggtgccaagacagtgctttctgaccggctctcggtgcacacggggtggcttctgctgcacttttgcctcacctctgaactattataaggcaggtgcctggtgcgaagtgtttagcagcaaccttcgcaccgaaatcacgtgaccagcttctcgtttcacgtgagttccccttcctgcagccggcgatcggtctttttagtgttagcgacggtagtggtacgatccagaaactccagcaaccctttccagctggcaggctttccatcactgcattctttctgtttcgaaaaaagaggtttgggggaaatgaccagcatagatcgctggctatagttgcttgcctaattctgaggaggacatctgtctcgaggaatcgaagcccctcgcatgtgagttatttgtctcctcccacatgcgccgacatgacagtcaatttcgtgcatcgctccgagctgcaggggaaaagacggtgcatgtgcatgctttaccccccgtcccgcggtggcaactgttgtcagcactgtatgtcctaaaagacggccgctgccaatggacggcaaaagcagcttcacgaggacgggcagggaacgaaggaatttaagattcaattcaacatccgcaatccacctgcttgacccacagcagccagttcgcgaaggcggaggcgtgtcccgtttcgagggtctctgttagtcagacgcttggcaatatcgttctctaaagtacacggacaaaaggagggttttggcttacttattctgttgctgcacaaacgttccactatgtcggtcggagagcagcacttttgtttctcgctcggtctgggaccggttcccggcgccgtcgaccccgtgtaggaattgcctccagggcttgatttcgggactttagacgctcgcaata

SEQ ID NO: 3732 - DNA, 4474 bp, Toxoplasma gondii
  source 1..4474: mol_type = genomic DNA
atctgtccgagaagcgacgctcggatgctccacataaaagtctttttcgatcggggccaactgctcttcactccactttggctcgacgaggtgcgaccccatcgcccctgcgtcgtacctccctcggcggctcccatcctgactcagctggctgtggcgccaaggtgcctcagtgcctcgcgaccgctggtcgccgtaaccaggtgcgtggccccgccggggtcccgccccggggcctgaggcccagggacccgcggggctgccagggtacccggggttgggcgcgtagccgcccggtggcgggtacggggcgcctgcttgggcgccgtaagaagggcagggggctggggggctgtatgtgggggcgccgaagcctgtggcattctgtcctccgtacacactgtagctagggtcgtgcttggggggagggtacgcgttatgagggggttggagcggcgcatacgcgtgaggctggccctgggagtaggaaggatcataggagggagggaacgcctggtcagagggcgacgtcaccggtcccaggtcaggagaatacgaggaaggcgagtaggggtacggacaagaatcagaggagaggggaggaagcgcttgacctgtgtatgcgggggggttgacggaggcgaaagaactcttggggtcgctgtagtaggctggaccgttccctcccgctgcacccgggtgctcgggggagctgccgcctgacgcgtattgggggtccgtttcacttctcggcatggacgagaaaaggcgggtcgaggggaatgctgaaagatactggtaaaacgctaccctatagctgtcggggcttccggctggggccggacgacagtgccacgaagggaggcgaggagccacacgagacacggaggcagacactcgagatgtgcctctgggggcgcctgatccttctcgcggaaaaaccgttggaaagattgttcgcaaactctcgctctttctcgaagcgaaacgacacggtcctggcccggcgacgcgggctgaccgggaccgcgcctggcttgcgagcccccacatgatgcttatgctttgcggcacggaaggaagcacctcgtttttagtgaatcgaaacggttccaaaacagagaaaaatcggtgcagcgtcttcaggaagaaaggttctctgagctacgtcgacgcacaatcgtcactcaacacccacgctgaacggcgcatgcgggcgatacactgagtgagcaatgcgtgatcttcagaacacgaacaaccacacgtttcaggccaaagactgggctttaaagaagaagaagaagaaccgctgttcactccgacaatgaagaaaatggcaagcaaaagaagacgacgaccgaggatccgccggtctcaatcgagatcataactgcggggctggagccgatgttgaaacaatctaacgatcagaggagaggcaaaaggctcctcccacatgacagacgaagcaacaccaacgaggacagcacaaagaacggtaatttgtctctcaagagagagtgagcgcatgtagaccgtcctggcatgactttttgtcgacagccacatgcgctctccgcgaaaagcagacacacttgaggggagcctgaccgccgagcacaactgcatctcgtcgttcgagagtgtggaagcgacaacgcgctcgctgcttgtttagggaaaagccgggaatatcgctgataccgaaatcggatctcctgacttcttcatgttatacgatgagctctgtgtttctggaggggctgtcaaagtagttttccatcaatcaattcccacaaaatgtaaaagtccgaggcagtaaagaaataggaggtagcatgtaacgtttacacacaggagctaccgtcaagttcggtaatcttctgcgtatacacacttcgatgcgtcagcacttgggccgcaagcgatgataactctctcacagaagaagttcttgcatgcctgctgttgttcaaggggttgaaggctgacaggcaacgttttccgaagctgggtacaggtattccaatgcaccggtgctctacagaggtagacataacatgctatcccttcaaagaaagggtttacatgtatggattgacgcgatcagcgcgcgcctgccgtaagaagagataccatttgcgtggttaaaggaagaaggcgtctttttcggtgacaattagcatatgtgcgtgtgtgtgtggtgcctgggatgggaacgagcaggtggacgggtgcaagcacgactctcagaaaatatagtgaacataacatgacagatgtggctctgatttctctgaaatcacgcagcgagggtcacattaggtaaagttgctgaggtgggagcgctgtcatatatccaaagcctccgagccggcttcatcggctacatcacttgcttacatttggtagtgttacattcgtgggcggcaaccctgtgacgtgtacacttggattctgcagttaatcaagtaatatgctcaactggatggctgttatcattggaacgagttaccgtccgcgatctgagcagaagtgttcggctggcagcaggcaggttatcgtctaaagtcccggaggacgtggaacatttaaaacaaataaatgagtgcatggaagatggtgtcgaggaagggacaggacaaggtaaggatacgagttcgaagaatcatgcaaaaacttgaagagcaaaaaagcaagtacaggaggaggtaagaatggatgaagaaagagagagaggcaatcacctaatctggctattgtcgagcggcatctgtcccaaacgggggctgcgccatgcagacggtcccaacaagcctgtcgaagatcgacagcaatcttcccttgtggagttcccgtagcagtcatcctaacatttgtgcactgtagtctcattgagcaaggcttcttgtgcgacgaccatttggagacgtttcttggatctttccagcaatctgctgttttcgatgttctcctgttctcatgcatccaggggcaaaggtattgtgcgctgtcagctcgtcgagagaaaccaagtctttcacctcactgcttccacaactaaagtgaccctgcgaatgtccctattgagatcgtggtgtgttagaaactcactgaataatgcgaaatatgcgtgggtgctggtgtgggcaggaaaatccagctacgaggcgctggcactctctatttattcacgcgcggtagcggacggagaagcatcttgctttaaaattgtttcggtggatttcgagagaaggctactgtagtgagggctacgtcccactacttctctgggaaacctgccttctcgctaacggcgaatgttgtgtgtgtcacgccccacccctcctctctgatctggtgtttaacagcgttgttcacgttcacgccacggaatcatcatttcttaccagcgtgtaagcgagtaactctgtttcttttttcattcggtctatatgaatacgttttccttcagagggcacttaacgcgtacacggttctgtcaagaaggggaaccaagttccccttcaagcaagtgcggtacggtgtaaagggatgtgaccgcatcaatgaataaaacgaaaaacgaacactcagtgtcgccttccggttcaatcgagctacacgaaacatgtcgccgtatagaaggatactggaaagcgatcataccaataagtgtcaccttcctgccgatcattgtagccggaagggtatgcaggaggctacctttctcagtgtcacatttcttctctaaacggatgccttctgaatgaacctgatcttctttattcccgatgggggatgaccagctaacacttattcagagatatgctagtgagcacacgtgcgacgatgaagtctttgttttgtcatatgtcagagcagctcaatacgtggggggcgggcacgcttgcgaaaagcggttcccgtatcctcatccgcgatgaattcacactcgactacagctgtgacaatcaaagtgagacgggcttatttcttctttaaagatcaccgcctttcctttatgtcaaaagggttaccggtatacggaacatttcgaaacgcttgcatctgacgaacgccaacacaacctgcattcagctcttccattcggtttactaagctcgctgtgagatctcccatttgtcggcaataagcgacaagagcgccatgcaaaatatattttaagttgttcgcttgcagcaggagtcactgtctctgcaccagtgtacagaccgcctttacagtgacagtgcgttcgtttccatctcctgaaacgtgtttagggtatgttccgcttcacacgcaccaaagctcgctactaggcttgggatatcaatgcatcgaggttcgcactttatcccctaagtactttcgaaccgtcaatgtgtatagcgacctcgtatatacaaatggtggccctcggataccgacactttgccacattaccaagggaaatctctaaaaacga

SEQ ID NO: 3733 - DNA, 3695 bp, Toxoplasma gondii
  source 1..3695: mol_type = genomic DNA
caggcatcgtgaacaacgggagagacgatggaagcgcagtggagaggagggagaggtgaaagagacggagaggaagagaggatgagaaggcagcgagagagagagaagaaccgacgcccgtgcacggttctcttgtctccagagtggggattctctcccgcttcttgaccgactctggcgcgcgttctctcttttctctcgcaaaagactcctctcgcgccctaccgccgcggcagcaacaagtctggtctcttgcagcgagcgcctccgtcgaagtgatctgaaccggacgcgaaggtgaaaacgcaacgccgagccgcgtgaggcctcgttcgcctctcttcagatcctagacaagccaggcaaactatcgcgaactgtcgcagggagaaaacgaattcatcagagacagcgcgggcgtggagaacaaagaacggacgatcgaggaagacagtgtggacgagggcacagttccggcctcgaagaaagggatttcctgtagagcacgaaggtgcatgcaggggaagaacgagggagaagtgacaaccccgcgggggaggagggagtgacaacggacgacggaggaaaccgtttagagtttccggaaacgggctgattctgagccgcggcaaaacgcaaagtaagaaaacgattcgaaagagtcgaaagcaagcgaagaggtcagcggaccgttcccgacgacagccgcagacagaggcctgccggatggcggaaccgttttcctcccgagtacgtgaacaggaaaatacgacgacaacggggaggtgcgaggaagaaaggagcagaacagcctcagaagacagcagacagaatgccgagttttgtgcaggaaacgcacgaaacggagaagccccacagagaagctggggaggcagctgagcgctgacgcctccagacgtgtctgcagcagccgtggaaacgagaagatttgaggaaattgaagaacgcggaggagaacgaaacgtgaaaaacgctttggatccacgcgagagaagcaaaatggtcagaactccgagtccgtttccagcaagtctgaatcgggaacaaggaatgacggggtccacaggaaatccttccacttttcccgacagatcgacaaaaagtaaaaaaccgtaaaacactttggacgagaaaatagagacctggatctgcccttctgcagagtttcctcttccctagttgccaggatcgacgttcgctcccgggggaaaaaacgcaccggcagtggacgcaggcgttgcggcgagacagcttcgcggaaaagagacacaaagagaggaaagaaaaaaagcgcgagcgaaggggaaggcagaggccgtcccgccaaagtccgagaaaaatggcaaacgcggagaacaggggaaacagctccgccggcggcgtgtgagaggaaagtgaaactgcatgcagagccgcctacacgcgctttcggtttcgcgtgaaacagcgcactgcttccgcaagtcccagtctgggaacaggagctgttttccgtcttcagtctttgcttcttgcgaaaaaattcgcacgagcaacgcgaagctgccgcgaagaagacctgggttcatgtccctagtcacacaccaggggtcacacggaggccagaaaactaacagccggcgctgctgggcgagagactgcaccgcagaaggaaagtcgttccacttttgcagaaactcgtggcctggccgtgatggtgattcaggagttgtggagagtgtgatttccgcgaatggagggtcatgcgcagtggagggtttcccttttacacgcgtcctgcaggaagggaggccgccgcacacggcgacttggtccagggcggattgtctcgctcctagaaaaaactctgttttctatgaagaaaggaggttgtgcgtcggactgtagaggatacgtgtctgctcgcgttatgtgcctattaacactctcgggtcagggctatgcagacctcccaaccgaggagaaagttgtccaagggaagtcggcaacccactggacgactaggctacgggattccgacactccacaagctctgttcagcgggtactatactgccaaggtgtttccgtcagctttgcctcctttcctggttcgcagcgagcccagaaaagaggtgaaaagaagacaaaccttcacttttgcacagttccgtctgctcccaacttccccagagtttcacttgtagtccagtgtcccgttctgcccactcagaacttgacatagaaagtcacattccatacacacgcacggacacaccaggaaatgccaccggccacaagaagtcgcagagtctatggagttaacgttctgcgcgaatccaagcgtttgtgtcatgctcgttcttgtacgtttgtttttctgcaccggtgtgatttagtaaggcgctagcaaatgcacaagactttggcagcacaagttggcctgtgttcacaggagaaatcccaacaatgtaaaagtgtaaagctgagtttacagggggtgtgcgactgggataccactgagaatgctgccttatttcgatcagagctgttcaactgaaaagaagtcactactttgtttggttgacttgcgggcggaaacactgcggaccacagatgcctacgcaacaaggaccacctttaaggaagctgaggtgaaatgccatctggattgccgggggatccgggacgagcgactccgagagaaaattcgtggaacgcatttcaaacaactgaagcgtaagacacacgaggctggtggtgaaagagggcgcgaagaagtgccggtaatagtgtggagcacggcaaaagggtgtagacagccccgtacgaccatccagatatttcttacaaccttgttgtcatgtgtgcagatgtagagacattcgcggggcagaatggctgtgctatgatggcagaattgttgcttatcttgcggtgtgggccttcagcgcggagcctctgtgcacatatgttgcgtcttccaatgcttcgtcaacaactgcgaacagaacgttgtgctggcattcggttgtcaggatatcccgctccttttccctttaaacgaaagaagaaaggaaagcaccacatcgaagtcccttgacggtccctgacgtctctcgcagcattgatcagatccacgaagcagcttcctaagtggcagttttttcctatgcgatgatgtttactcgagggatcgttgcatgtagccttctgcattatggtcttcgagtcgtactgcctgcaagctctatttgaaattatcgaccgggcgccttgtttgtttcacagcatgtgacacccgcagcgggggcgtcagaagccccattaattactctttaaaatgccacatcagctccatgtcaacgcctgtataattctactcaaaagctgcttctctggtcgggaatttcaggttcgcaacgagccggcgtctttctgagactctctcgtctgcttcaacacaagaaatcaacatagcgtattgcatcgcactccgcccgcaattctgtggctctgttcctggaattacgaacggtggagtggaagtatccggataccacgaaagcgaatgggtgggacgagggtgtctaccgacgacggtacagaagcagagaaagcgtatgaaacattccatgttgacgtatgataagctaaagtccaatctgcgtccccacagcactgtccctttcacca

SEQ ID NO: 3734 - DNA, 4797 bp, Toxoplasma gondii
  source 1..4797: mol_type = genomic DNA
cttcctccacctggagcatttgttccatcatttctcttctagcagcacttgcctcctcttcctctcgctcaccattgttcgtgatgtcctttccatgctctcccgcgttcctccctgtcccgcgatccgcatgactcgccacactgttcgggcgggcagaggagaaaggcataccgttctcattcgctgtgttgcctcgagatgcaaataaggccatcgacgactccaaacgcgatgtgcctttcaggccgtgagagcttcgtacgtgcctgtcattaccgtcacgcgtacgcgcctctgcctcgcgagaaagtcgcttcatttcaccgcaggaaggctgctgagtccagtccggaaccgaccctgtgaagctgttcctttcattcttagacgagaaaggcatgcgctcgaccaaatggggctctgttgaggctccactgtcgtccgaaacacagggaacggttccggaagtagagccgcagcattcgacgccaatgttggtcgctgaacccgacgagaatctttcggtgaccgtaccgtcgctttcgcagagaccacggcaccctccttcacggtcacggtatctcccgcaatcctctgcgtgcaggggacgacggccgccagtccgagtgccagcaaacggaatgacactgttctgcattggtaatgtcgaagaaatgagagaaggcgacgaaagaaaagcccctgaccacacctcacatgaggcgggagaatccggcttctcactggttgagactaattgttcatccaactgtggtgtgttgccttccattatcgtcgacgggccacgagagactacgttccgcttttgcagtttgcaagcagggtggattaagattgcgacgaattcttcacttgggaacgcctgcaggacagtcttccgagagatcctggcctcagttaccctcgacgactgccggcgccctggatgccgcggcgggctaaacaacactcgagctgagcaagcacacgaaactgaaaaaatgttcacatctggtcacttaagaacacccaagatgacatagggaagccgcgacggcaacgcgtcggtgatgggaaatcgaaatcaaagcagctgtcgacttcaccggggcggatcaacaagatgtcactggcgcagaaacgggcgggaaaactgccagggaaaggcgtgacgcggccgaggtccagccaacagcttgaaatgtgtgtaatatggctctcggcgctttccagttgaaggggaaaaacggaatgcgtgacagctgctctcaaaagtgtggtgcggacggctggtacgaataaacagcctgcctgtaacacatcaattgaacgcgggtgccagctgcagcctgtgcttcgagaaccggcgccgcacaccaggtaataaaaacacacaacatacgcaaacaaggcgttgccagtcgtgtgccgcagtcgggaaacgctttcgacgcgccgcggacggactgaaatgacttgcagtgtgccagtcacactgagacgagagacgcgcactcactcaatggtcacctggggtgtctttacaccgttgtgggaccagctgtccgcagtttctgttcttcacctcttgttgaagtcaccgcagtacgaatgacgcatcgccgatttccgtttttgtcacagcgctcgcacacccgtctgtttctaggccagaaaacaagcgtgcccaacaccgctgccgccgaaagacacgcacacctgcatgcctccgaaagtgaaacagcgctcgcgaagcaccgctgtcgtatcgggtacaactcatgccagttgtagctctggaattcagaaaacagagaccgtcaattgaatactggaaatgttccacgcggaactttggaaatggaacactaaaacgcgtctgatgtgacaaagaaaagaaacagtcaccagcccgatgacccgctccacacgagaaacgccgagagtgcgcgaaggtgggcagagtgggtgacgctctgacgagcaactgtgcagctttgccccgtcacagacgggtttcctcacggatacggctgctgtggagagccacttgactgacagcagagaagaagagcgaactgcctgttagtgcgaggctccgctcacgctttaaactgtggcagttctacctgagggggctgcattatcctgcaacaagaaaagaaagactgcagtgactggactgccatggaggagccacttttttggcattttttcgtggtcaacatcctccgtacgctccaacgtggtatcatgttcgcttgctgcgctgtgcagtgcgaaaggttcatcgaatgctacaacaaatatctagctactactgaaaaactcacccccggggggcatcctaattggtcccggccttgcgacaaccagctctgacatttaccgtggagaacgatgattgcgtgacacacgcatgagtcccgacaacgaatcgaaactgcaactccattttcggtacttccttcggcagtttatgcatcgtgtgaacgctactcctagttgtccgaaggcttctgtgccttgttcagcatttgctttttcctgactgcagccagaagcgtgtagtccgcgtcggattagcgcggctaggatgatacacaccagaaaactggaatgctttgcggttgccccgtttgcgagagttggagcagctgtctcgggggaagcttaaccaacataagtgtatccgcttgatctccggctaacgcggaagcgcagtgccgcagcccgtcaaaggcacaacgttgcctcattgacgatcagtggccaaacgagcttaaagtttgattgtggtacgatccgctatagactgtcatttcatccacaatttgcgcctacagaattttgaggaacgctttttcggggtgccctgacgtcggcattacctgcattcgggcacacctccggatttgaagttggtacaagcacacctctagcgtcattcgaagtagaggcacagagagcccgggatagtgttttgtcaagcctacgctccatgagtgaaaaacacttcgggcaaggctcggaaatgcattctatggcatccacccttctttcgtgcgtttgccccgtcagtatcgcgccaattctctgcatgccgaggagtcgctcaggctttccacagcgtctgaatgcgtgccacgtttcatgtgggatcttggaattcaagacgatttcccccctttttcaaattgtgtattttgctccctttcacatcacatcgtcaaacggtcacaccagtagtagccagcgataacggaagtagtggcttgctgttcttgtgcgtcactggtggcagcctgtttcaagatatgaactacaaagttgcctataacgcatatgaaactgttggtcaaaaaacagcttcattttgacggtgacaatcagagtctctcagacactggcgagttccattcggagaaagagaggattatcaggttcggcaagagacttctgtattcacacttttatccggcaagcagtgttaagactgtccacgcgtgcaaacagcacaagatgacgttggccattctagtacgccatgctgactcaccgccagctggcatatccagaaaacgctcctcgggtacatactttttgccgttgcaagaattatagaagttgccagccacagtcccgttcttctactcttggcaaatctggtttcaacttacggtggagactagtagcaacagtccagccgctcacactgatgccatcttcgaccctcagtatttttagtgaagtacaggtcccaaatgatttttcccatgcgatgaaagatctcgccttcatagagcaagaagaatatccccacatgaggttcggcagcaggtcgtagaagcaacagagacgtttttacgcttcactgtcagtatacgctgttcgacacagaatcttgtgtgcggaaaatgacaccgccttccgctgtgaaatcggtgcaagacgacactacataacggaagtttttcctctgtgtgttggtgggagagaagtaagcgcgttatacacgatgctggaagccaaacgcgaagacttcgcaagagcacggaaaccctaaacacttgtgttgggcagtagagaggaaaccttcaggaaaagacaaagatctcgacggactgcagcacgaaaacgccgcctctcggcggcgtgagccatttcctattctaaagattatgacaaaatttgcagattttcccattttagttcaacaaaccgcgcatgcagcagtcgcgtaacagcactgtgacttctaccgcatgcgccaagcttcccggaaattttctcgtgatacgccttacaacgatacgtttcccgtatcattctccgccttttgctcagttgtttactgtgtgtattcgtcgcattccccaaggtgctgcctgtgtcatggtcgccgaattgtttgcctcgtttgccgttggctgctgacaagtgattctcttccgtctggagctagcggcatgtcgtatctccccttcacatgaacacgtaaaagatctttttttcgcttcaacgcaggactgtacaccggcattctactctctgctaagccccggagtctttccccactgtccacaccggcacagtccaaccataattcctcttttctgtcgagtgcctcaactgctgttcacggtgttttttccgctttccttgcttcccttcttggaagacctcggaccggaaaggctgtagacctaaacgaactcgtgacaaataacgggaaggcgaggcacagatgtaagcggcggtcattcacgtgctctttgtgtatctgtgcgtgca

SEQ ID NO: 3735 - DNA, 2370 bp, Toxoplasma gondii
  source 1..2370: mol_type = genomic DNA
gagaggaacatcgctgtcatgctcacgccatgtacttgaattaaatgactttgttatcgagatcctccggtttctagatcttctcacttgttactaggacagactcacaggtaggaggtgcaaggttgccgcactggcagtgcgaaccggttgttcgatgttcgtaacacggtgagcagtcctgtgtgtatgtcgacaacgaggctgtagtcacagcgtcctgcatcagctgccagtgcttcgacagtgatataaaaaaatagtgttgatatgttaacatatgcaaggcttattcaattgtacctatacgcccaccccataccatcaagacatggaatcacacgtacaagaagcagcccatgtgcttctcttcgagacgtatggggtagtagaaatgcacatgcctggatccggcatacataaggatatcgagcttcggtgttaggggctgacatgagaatgattagcaaacacataccaatagcaaacgtacaacgtctctgagattacattatcgcgctgccgttagcgtacctttcgcaagcgcaccttaaatcgggtcatcgtcggttttacctggaactcctggtggcgatcagctctgacgaaccaatccacagtctcggatagtccagtctctgacccgtgaggcattaccggaaaaaactctgtctaggatatgtctgtgaatatcaaacggaactgagcgtttagcaacaccgcgtaccatttgtctcttttgaggctaccttttgtgcttccacctcacttgtcacgaagagtgatcttgctccccgcctgtagcggacgcgtaaatgggattagcgatgtcagaggaggtttgaggctcggggtgctcgtacacaaagaacgaccagcggtaagtcccatgctcaagaatatcagcattctatggatgcaatcagtgctagagccgtaggtcttaactgacttatgttaacgctaccattgaggtcaccgtgttttgctatgatgcatctgcacattatttttaaattgttgacgggtcttgtggcctgttgtagcttacacatcggaaaatagagggaccctcatagtgactttcgtgtgttaaagggcgctttgctgcagactgacgttgagtatacaactgaggtggcgggctaaatcgtgcgagtgttacactcgccgtccgcctcttaccgcgtatctgcgaacatacagtgttgtcgtaaaccaaaactcagaagtccttgcttcaaaagcgtcgacttgccagacaacactgcttaggattacatcacccatgcggtccgctgccgtcgggagcttgagtgccgtaattctgggctgcttatttcaactacagatacacgctatgccgaccgccagtacctctccaatttgagcctcttctgtggaattcgatgtggcgattattcgatggaagcggacagttcgtacctcctacagattccggttgtgacaaattgtctgcatcttcccggccccaggcagttagtttgaactctgaaggtacacgctgagaatccgattaccaaggcacccacagagttgtggcaggttgacatccgtcaaggccctgttttttccattgttcctctgcatcttctgtcttggatatatcactacttccctcattcaagccagttggagtgtcgctgtcttggtctcgcgcctgctgatctggatcaatttgagcctccgcgccgccgatgcacgactaactcccccctcatcgaacgcgaactgccgcaccgtttcggccgtcgggttgatacaaaattcacgaattgctacacgagtggccgacgtggaatggagcaggcgcacatccgctcgcaaattgcagacaaattcgcaaggcagttgcctcaaggctctcgacttcaatgcgtggatgtcgagctacaaactcgtatgtgttatccaaatgaacgggcaagtctgagaggtggcagatgtctttggtcgcagaggcggcgtttagcatgcccacaacgatcttgcgcaaggcataaaacgtaaatagttcgtggtgagtgagcgtcggcttcctttcttacgagttttgaaacagagattgtttctgaatctgctgtctaaaatttcgcgatgtgtagcacgttcggcggtggctgtcctcctttttaaaaggtgtattgtcggttcgctgagcgagctacgtcctctcgacagggtttctggactaacgcgcgtctcggtcatatgcactccatagttcacttctttcatcggtttctctgattcagtagcttcatgtagtcgcgcgaaaattctgtatctcacaacggaaaaccattcgacgcactccggtgtcaaggcgtccagtcacttcttcctcga

SEQ ID NO: 3736 - DNA, 2264 bp, Toxoplasma gondii
  source 1..2264: mol_type = genomic DNA
gtttctgcagatgggacaccgacatctgtagaaatagatactgcgcgagctgtcgagcagctgtagatggcatgtcgtcggtctatatggagcgcactcggggccgctgtttgagtttgagatctccaccagatgtttggggacgtgaaattgcgttgtgttggaactggatggcagtctaccgtgaggggttgcaggccataactttggttcctctgtgacatctcagcaggggctgattgccaaacttcctatcactggatttctaatatgagtgtagtttcgtgatggcggtgttgaaacaccagagacttgtcgcatggggatgtgccacctgatatttgctgagatgcagcctcatagatggtagaccgtcttaccatctaggcaacatgctcccactaactagagggcggttcagtcttttcgcaatttccttagacatacattctcgaactcgtctcagcgttaattccaacggttttagatgagccaaaatcaacaccagcaaacacggtgtgtccagtcatgcgtcagcgtctgataggcaaccagaagacttctcatctcacggtgtatgtggtacagaccctctcttaaaacctgatccaaagcgatgttttcatgtgacgtacaatgaatgacaccaggaggtagaagaagcgtaacaatagttttttttatggggaaaaagctgtacaccggcggaagagataagagcactgcgcggaagccttgtaaaatccttggggtatgctgtgcaattgatttcccgaacacgagtacctcttgttgaaacacgactgtggaagtagcttggttcaatcctgtattcagaggcatgccacgacagtgcagccgtggtctcagaggctgacgaatacgggagcttcactgtagattggcaaacagggatgtcctaatatagttatgctcaaaaggagtttggctccacctcttcacggagcctgctgctacagcactctaataaaacatgcttcatgtaggcctgtaacttcatagaaggtggtgtctgacatcgaaacgagtgcaagggccactcattttgaggggggcctacattaaatatacctgcgttccagactggagcgacgcctggctgcacatgtgcattcttgcttgtccatgaagtgaattttgagtttttttcttattaggatggacaggtgacgtgaaggatttcgttgtgaagtggaccaattactggcacaccacctttcagagactcggttacgttgatgcgtcttccccgagagtgcggtgggcccgtgaagcacaatgagctgagatacaaccacccttgagcgggcttctgcacagtgaatgacagaatatgtagtctgtcgaagcgggttcttccaccctgtcggcgccgtctgcagcgtttcctcgttggagctacagtcagcgtgtcggcagcaaagttccggttaaccaataatcgcccttcaattagcccttttctctgtggggccaatacagcgaccggagacgtgcgtaaacacaagaacgacgagaacgtgtttgttcctttcaaggaaattaggctcctggtgctttagagctttcccatctttcttttaaaactccgtcccgtcagtcgcgttgtaagtagaaacacccatacatattgatattcaacgtcgaaagggaccagagatcagtgcgatccttccgcaaccgcacgacgtgtttcggagacacactcttccatctgttgctgggtgactgtttctgctgtccctaggcggtcttttgctgtagtccggggcatttgctactctaattggttgaccgcttctccagtacgcctgtgttttcgtataggctggtgtacactcgacgtggcagtacactgtagagatagacgagcagctgctgcctcgttctgtaaagcatgtgtcgccatgatttcttcgaaaaatctgttatccccgatagggcttttcgcttcgttccgtggaactgaacgccacttatatcccgcggtgtaaaagactttcaagcgatgtcgaacactcagtgggaattacgaatagcagccgccactcggcgtgtgactgatgcgtgccgtcaagcagggcaccccgtacctgacatttacgcagcgtactgcctgtgtacaacaacatgtagtgaggaaaaagatttccttatagataaactgctttccaaagaagatctcgatgaaggtgacatactgagggtggctgatcgaattcagcaaaacgtgggccctggga

SEQ ID NO: 3737 - DNA, 2002 bp, Toxoplasma gondii
  source 1..2002: mol_type = genomic DNA
acaaatctggaaaacactgagtgggcagatccgcgcatctccttaacgtatccggcatttctttaggggctgagaaaacagaggatgaatcgaaaactttaagatctccacctgcagcagtaccacgagtcgttggtaacaaggaatccacgaacgcgaacagtctgcataactgctgaacacaacgccaccccacgagaatgctcaagacagctacaagtggtggacttcagttttccaacacaatacagttagttcatatcgaagcatgctctgctaaaacatcgcacttggacccggtgaacaaaggccagtctaaaccggtagtccaactagtagcaagacacacgcgacggcctccggccaacggcgaaagctgacaaatccaggggtgggcagcagacatggacagataggaaataatttctcgtcagttcgtcttcaagctcttggctatcgcagacgctgatagcatgtgctttcgagatgacacaaaagtaaccgactgctactgaacaggggaccaccgtgacttgtaggagggagagagtccgacagtggtaggtgacggccgacacgcataaagtggagaaggcaaaaacgaagagtgacacaggatacctggtggccgaagaaaaagaacattcatggtccccgcgacgacgtgcacatccgcggcgggagcgagttacaaagactcggcggattgaaaaaggagactgtcactgcacctagagaaacacagcctcgaggtgagtcttccgacctttgtgaaaggtgtggcgcgttagatcttgcgtgactggaagcccacaatgtgtgttttctacatcatctgtcccgataaaatcgcccgtatgttctatccagatgtgtcatcgagctagttgtccatgccagctctttccccgtggtcacccaccacgccttctcgaacaccagagatgcagtccgttgaaacttaccatctttcatggggaattagtcgagggaggcggtagaattcgaacacgcagagtaggtcttgttgctgtgcggagccacgagatggaggatgatgatggtgcaatcgttgatatcacacacaacgatgcgctcggcacgcagtgccaagatcgccgagtgctgttcaatacggtaaagatgctaggtcgcctttcgaaaaggggatgctaaagaaattattttgttgagcaccagtcactggagtgtgcatgcatcagtttcaggtgaaaacgcttcacgaacagttgttaggcgggtcgcattcgctgtttccgaccccactctactaccactgagcacgtgcctgtgcagcctaaaaagctggtggtaggaaagtgccatcctagaaaacaaattcggcgagtcttattcagagtagtttgtgaccggcagccccgcgtgtctggaaattgtttttgctctgtacagagtatcgatgtggccagcaaacggtgatactctccggttttcgcccccgcgtctctcgatgtcaccaggtctgcacagcgaaacgactacggaactggctctgctcttctcgtccacggcaacttgcggcgaatgccattacagaaggcaacgcaatgttgcttgcacagacttcagaagcatctgcgccatcaatcaccattgccgtggataacttttcttcggtaagtggcggggacatgagaattgtaactcagcaacgagcagaagcgcggattgcactagaagcaccagcagtacgcttttccctagctggggtcaccatctctcgggtcccgggtcacctccacatcccggcgactcaaagctgcgacacacccgaatcgaactttgctgagagccggctactgagtcattcggcgcgtctctagactgtccaccgcttcgagtagtcttcctgaatgatcaatggcgtcacagaaggccaagtgtaatggagcaaactaggcagttgtgagagtctgtttgttcgattcagttccacttacctcttcgtgagaaaaagaaa

SEQ ID NO: 3738 - DNA, 4647 bp, Toxoplasma gondii
  source 1..4647: mol_type = genomic DNA
aaatgtcagtagcgcatccaactgtgcccgaacagttgcctgctcttcctccagtgacgccacgtagtcttcttcttgtgacagcgtgccatctcggcgcgtgcttcctgttgatcttttttgtgcggaccctcgcgggggcgcagacgcttgagtgcgaacctgcggaagcggacaccgagagcagcaaaaataaggaaatgcgacggaacgaagcgggaatgtggaaccggaactgaaccgtttttcgcattttctcctctatggtgaaattcacccttcgcgccagaggttgagtgggagtgacaatgagccgacggcacttccaccacagaaagtgaacagagcaagcagaccacgatcagcccacagactaaactattacgaagccgtggttgcactccatacgccctagtgggacacttaagctgaaaagaacagccttacagatgggcgtgacaaccaactttgtcacacaaggcgtcactgtaggtatttcctcggggacaccacacggctgtattgcacacaaaacaccgtctttcttatcgaactcagggcggcgctctcgtcgttacacttgtcgtcacgagggagtaaatgacatacctccgcaccactaatgggggcatcagatgaagcagccgccaaagccgcactctgaagctctgcaagtctctcccttaactggcgtgctgatggccatgtatcccctttctgaaccatcggagagatgacctccgtgtatagacgctcgaactggcgccccccccatgcagatttcggaggagagaatcccgagaccccgcaagtactcgaagatccggaagaagacgaagcagatattccttgttgcccagatagtgcctgcgtagtgccgcttgcagcattggcaggcgcagccggagtagctgtgagcagagaggatcctggtgcagcatgtgcatttgtcatcgccggttttgcggacaagcttcctgttgttgccgagccccctccgaataaattcgaagaggtgggctggcttgaattgccaaacaacccgccaccggagcttgccatccttctgccgacggagcgagggagggcgtccgcccggaatgcgaaaagtgttgtccgaagagagtcagagaaacatatggatcgtgaatgctggaagcaggaaaaaagagtctgagatagagatgattttaaagagtgagaggtggagtgaacgcaagagacagattggaagccactggttttgatgcacacccgttggctgccaagtggggataaacgaaggatcaagatggcacgctgctactgtgtggtctctacctcaagtggcgtcagacgtttatcacggtaaacggttttcaggctgcagttagctataaatcaacgggcattttcgacaaagatcgagacgaaaaatgttgcccccagcccggctgtgcatgtcttggacctgcaagaccggccacgcgcgagggtagaacaggagtaaccgatccgacaagcagtccacttaccgcatacctctccagaaatacaaagaaatattttagggcgtttatttcccacaatgagatcgatggccgccactttactaactcagcatgcacgacctacattcacgacctattttctctccgcagctgcatgcagcagtttcaggcagacctcctactcctgaatcaatccagccccgaaggttactgtcgccaaaagcatctgtgaagaagagtatatttctacagtgtattcgtacacatctacaggcagagtttgtgatgctggcacacgcgcggaggtcgtgctggatattcatgtagggacggcccacgcctagcacaggcctgccacatcggcgagctcaggacactttttcactagtcggtcacttctggaaatggattttggctggtcgcttgtgaatctaccgccgttaatgcttctcctgaagtagcgctcttcgacacaaggtagcgtgtttgctagtcatggcactatagaggcgtcagaacgtcccccggcgcacacgggaggacaggcatcagccgcgacaaagagcgcaaatcgcgttgttctgataggtcctccgtcgatgaaatttatcaaagcaaacgagatgcaactgcggagagcccaggtgtttcctccatgcacacgcccgtatcttccgctgtgcactacagcttcgtgtacacagttccggggctcggccacaatcgcttttggaggaggcccgctctacgtcgactaagtgatcgggagccgcaggtgtatatccagtgaaagcagttatggcgtaaataggccaaacgtccaaagccagctaccaggaatcctctggtgttcacagtgtgacgtcatctgtgttacgttgtgttttgtcgttggctccagtcgagtgatggaaatatctgtgtagccaaaacactaggaacaggcgctgccgcagacgtggcccttttcgcatggttccagtagcctctctgcacgatgccagaaatgaacaagttgaatggcagccacggcgacggtgccggtaggaagactcgaacagccatgctttcacgctttacttccttttacccttttcagcaacctctggtcacaaggctcgagctatacaagacgactttgataacgctgcggcaattttgaaacggaaacttgcagaagagcttgcagatttgcgggcagcgacaaagcaagtgagcttctctctgcgcttgcactttttgtttcaagtgtagtcctggtgtagctgagtactgaggagagtcggaaagctgcattagatgaacgttttgcttcgcttatgctggagaaagatgctttgactattgacatcaccgagctacaaagaagacgctcgattgtaagcttgttcccctgagagcacctagtctgatgatattgaaaagaattataggtggcatcggacactaaggagcgcgagcatgtaatgcgggaaatcgttgtgcacctagataaacttcctgacagaaccgaggatgcctctgtgaaatgtgccaaccgaaaggcgataggaacatgaagaacttcaggtaccgtgataccagtagctggcttcagtttcaatggaactctccgtattaactgttgcacacattcgctgccagcaaaccgcttatgtggtggtttcctatcccactatgccaagaatatctgtgtagataacggtggaaaaccggagtgggaacgaatgttccggaatacgtcttgcttttgtcctgtccagggagtcacgggcgtagaccatccatgatatccggtttgggctgcaccgattctgaactccgcgcacgctgttactttaagtggaagtgtgcaacgagcccttcgtcccgcaattggcaagcagtttttgccctggactggggcgatgtttttccttgaagttcttcagtgctcgtatctctcacaacgaagttgtatttcagctcaagtatttcagctcagcgcacaaacagaaaaaggcagcaaacggtgcagccatatccgaaaatgagacttcagcacgtttacaaccttatatggttattttctgcgtgaacatcttgccctccgggcattcaaaattttgctcactacgttctgtacgcagaggcatattttgctctaacataagttagaacagttgtcggacaactattgcggcgacggatccgatgcctcggtagaaaacaaacagattcttcaactctcttataccgaaagtaagctctaatggtttccctcaccaataatagtctttcctgacgacactctagagaggtcacgggagtgtagcagttccccttcacactgtgaagaagcatctcacggttattatcagtccaacggttgttggaggaacccgggtgttttaaccctgcatcagagtcaccttttttggtgttccatatgcctgctgtgctatgtggctcggaggtggccgtcttcatattcgcagacttagtgcccaagaggacaatatgtctgcgcggggaaagatcttcggttctaatcctgttcataacaaagcaagtatgtgataggatgtgataacgccaatttaactttctggctgcccttcaggtgacaccagcaaagcgcggcacgagcctgactagtcctttcgcgtactggcaagacgcaccagagctgtggtatctctcggaaggctggcggcactgatcagccccaccgtcagggctgcggatcattatccgtgggggcccagggtcggctaacgtgccagcattgtcgaccaactacgaccggctgaactactcgacactgcagcggaagtgagcagcacaccgttcacttggttctcattagagtactttttatgacagaatcaaaacgcatgatattcgtggatatgcctttcctgttttagaccgtttaagtctcgcgtcgttcgacctggcaccttctaaagacaaaatcagcatgcttggcactttcccgggaaggacatggcgtggaaacaacttgtatcggtggtgctaaccctcttttcaagcaatcctacgttagggttctaatctctagagtctgagccacgtctagaatcgtgtgggaagcctgagaactctgcatcccggagttctgagccacggggcaatactgcagtgattggcgaca

SEQ ID NO: 3739 - DNA, 2353 bp, Toxoplasma gondii
  source 1..2353: mol_type = genomic DNA
cctgaaggtgacgctccagatcttcctgaaggtgacgctccagatctccagggctgggaagctctctccggcgccggaggaatggaggcttcaggctgagaggcctcgcccccctctgacgcacctggaagttccatgcgtccgctggagtcttgcaagcctgcggtgggcttcgccagactgtctccggagactctccccggcaccgccgcagatttagcggctccggaggcatgcgccggtgtctcttccagcgcaacaggacgtgtgaccgccaccagcggagggctcttgccttctggtttttgcgctctctcttggtcgacgttgccgagaccgcggcactcagaacggctcgtcgcttctcgccctctgaggccgctcgattcgccagcgttctctttctctgcggcgcccaggagcccccctgcccccgtctccgcagagtcaggcgcgggggaaggcgctgcggcttgcggcgcagcgaaatccttggctgctgtcgtctttcgcgctgcccggtcgtccagcgtccacgccccgacctctgcgcctgccccagagggattgggctgctcgtctcgctgcatcgagagaacaagacgaggtccgcttcggaagcttcggaaggactggcggcatcggcggagctcccgcaagctggagagggtcgcggtctttcaggaggccgaagacgaaagcgtctggcgagagacgcacggaaagagccgagcgcggagtccagaaaagtggagagagaaaaacaaggacggtgtcgagacggcgcgcagcagcaggagcggcgctctgtcgaaagagcggagaaggcgagtgaggacgcaaagccgagtcctcaggggcctcgaaggtgacagagggtggcttcgagaaagccgccgtttcgtcgagctgagttaaaaccaaagcatcgacgcgcgcatgcgtgtgtccaacttggaaaaatctccaaagtgtacaaggtgaatccgagagcctatcgctcctttttgggagtgtatctacagcgtgggacgcgggagcagaacgaagggagcagccaagagaaagcgcgagcgaatctctgtggcttctgagggcgctccttgttgtcgccaccgagaagcgcgtccacctccgctggagatgctggagacaacgagaggaatcttagtcgaaaagacgacctgcggcatgggagcgcctcgtgatgcgaagagtggcatttcgtcgaacggagaaatctttgcggcagcaaagtggaggggcttcgcggccctcgcccggaggactcttcgagagaaaaagagcggagaaagacggaacgagaaagccggggcgaagaatcgagccgggacgaggcagcagaatgtcgcggttccttgaaacaacgcgaggtgacgaggaacagaagttcgagcctgcgctggcgaaaagagccgcggaactccgcgatggccccctgatacaaagctcggagcgtccctcgttctcgcgttcgcgctgcgtctgacaagcgactcgagcggaggcaacgacgttcggcgcgccttcgggcaaatctttttcgcagagacaggacaaacactgagaacggctggacgttctcattggcagagagggagggcgtcggcttatggacggagagagggtaggcgccagatgcacgcgcgggaaaagacaagtgtttccgctcgcttttgcggcacgagcggccgcgaggaaaaagcagagagcttgacaacgacacagctggcacactggaagacaaactgcagaaacgcagccgccggaaacttcaggaacgtcgaaagttgtcgagagggatcgtttccacatacattttcgcggtggacgcacacaacacccgcgagtctttgtgccctcctgcctcgcgctggcgggcttgatcgcatgaaaatcgcgcatgttctgtggagagatgtgatattttgcgcggagcgactctcgccgcgtgaccagactctctttgccgcgcctccatttcgcattcatcgcgttgaaaggttctctccaccttcttgttttccgtcctcgaaaacgctttgagcggaaacatgtcgaagggggctgtcaaacgagacagcgtccgacgcagtgtgtcaccctttgtctctttttgcaagtcctttcgcacaagttcaagtttccttctttcttccgcttctccttgcctccccttcacctgcttttctgtctgtctcacactttcgaggcaggcgctcgccttttcatctggaccgctctctctgtcagtttccagaggagctcacgtttctttttcgcagtgaacgcgcagagatgatttttcagtgaatcggcacccttgacagaa

SEQ ID NO: 3740 - DNA, 1248 bp, Toxoplasma gondii
  source 1..1248: mol_type = genomic DNA
gagacaggtggaaaaggcgacagtgtcgaccacggagacaaagacgaggaagcgactggggaaggaggaagcgccggagaagatccataaaggagaccggcaaggaagagaggcgcgctggaggcccccttctgcccgcgacagcaggagccgtctggtggtctccgtccgcgggagaagaaagatgccgaggtggagagacacctcagcgtgtgaaagtgaggaaacgcaagacaggcggacgccgagagagaagaggccagaggaagcaagcggaaagaaggagaagagagaaatggagagcgcgaaacgccggagacaggagacagagacacagagggtggagagacaggagacagagacacagagggtggagagacagagggtggagagacagagggtggagagacaggagactctgcgaggtcgtcttttcgccgttttcggctccttccctgggatgcactccctggacgcgcatccccctggaagtctccgtctgttctttcctcgcgctgtctcgctcctccgcgctcttccctccttctgctgctgcctccttgaagaagaaagtctggcctctgcagcgaagcgcccgcgcctcgcctggcggatccgttgcggatcctggagggactggcgaggagcaggcgcattgcggtaagtcgagcgacaccgtggaagagggtgaaaagtcgagacgcgaagcagagaaaagacagacacctcaggtctctcttggagaagaaggcgaactctgaagcgcctctttcttctcggcaacgagacgagacacgaagagagaaacgagcaaaaagacagagaaaggaaagagagaggatagagagcccagggaggaaacgaagggaaaagagagagagagaaaacaggacagaggatcaacagcagaagaaggacgtcaaaggtctgttcctgcgactaaaaaatgtgaatgctcgttcattttcctggaaaacgcgtttgaacgcgcgagaaaagcagacttctccagctgtatgtccactgtgcaacgtttcgccctcgctgtctcgcgctgtgtccgctgctttgaagagccccacacagtttcttcttagtatcttttcggggatctttgagaaacgaatgaaacaagagaatctcgtctttgacttcctctcaagtttttccttcaccgcgatcgcacttcctctcgtcttcaaggagctggtcgtcgctgcctttcgctgtatatatacgcacagcgta

SEQ ID NO: 3741 - DNA, 1983 bp, Toxoplasma gondii
  source 1..1983: mol_type = genomic DNA
cttcgattctcttctttccgatacaagctcaccagtcctcgtccacgtcgtgccatgattcctttccacggtgtttcggttttgccacaaaaacggtctccattctggaagtaaacgtaccattgattttacacctaccttttccaacctagatcattttgtaggagtctttcttgttgcgaaaaacagattttgaggacgaatcagacctctatgatccagggggtttttcggtgcaagaagcagaggcgcaagcgaagcagggttctgtaaagagagttagaggaaatattccaccgtatgatgcggcggcagctgtggatgtttactggacaaagaggcattttgaaacacaacttctcgtgcagtttccgtgattttcgcaactaactttccagcggaacattagaagcacttcctaggtttatataaagtacctttctgagagtgtgtactgcgaaggggagtagtggtctcgatctcgaaggactaaaattaaaacaaaggaagtgctggtctcttcgtggtaatggatcaggagatgactcagacaccccctcctgaagcctggctgtatgcttgcacagtcacgacgtgggcatcctccgtcgccggtacgattccttttcgcacgtcagtgttgtgtagccattttttccgctgggtatgagtagcaagacagggagaggtaacagaaaaagacgcaaaaaatacgaggacgaaccgcgagtcggggcgcaattgagtggcaaatgtgcagtggtgtcaagtgtgcgtggtttggtccgaggtttcgggtgctgaaaactgttcggcatgcagccgtcgcccatgcctttattttaataccgaagaggtttctatgaagtgctacttgtctaaacaacgaccgttacttccacatgaagcttcagatcggtttctgtgaacctcacgttccaggtacaggatcccggcctgcgtttatccagtgtatgtgcatgcagaagaccagaaaaaagggtatgtcttaggtgacaggcgggatatcaaagtcttctatcgcagccgacatacacgcgtcgtggcaagtctgacttgaagcctcaacgccttcgaaaaagttagatttagttgctgccgcaattcactggatgtcctctgacggaagggtttagagcgaccccaaaaacacagagttggatgagcaggacatcttttgcttccgggtgactcaaacaaatcttataagaatgtaatttatcgaagtcccggtgtgtacatgcaggctgcgagatatggtcgtacccagtccgagacgtctgcggtgcatgcatgcacactcgagtagctagcagccatgtgtggaacgactgtggtggctttcagcctctttcttgtgtccggaaattgcctgaacaatgcttttctgagcgaaggcccaaggttgtttcagattcgagaactgctcgagtattgttgagtgacatgtcagtatccctgcaactgcggaattcccttgctccacctgccgtttttgtcggaaaaccgtcattcgacagtttcgcattgcacaccatggtcccacccttaattattgcctgttgtcggtgacctcttccacgcgatgcccatttcatccctgggagatgggcgcgtttttttctctacagtctcacagagtctgttttccacccaacgcatgtgtgcgacaagacactcgcgggtcgcaaagggtggaaaccacgctttgatgtttttgccggtcgccgaactccgtctcttgctgaaaatcgtgtcctgagacaagcgtttcctaaccgcggaagctgttggtctgttcgaggaagttttcgcccgtttttacgtagtccacagacggcgtgcactctgaaagtcttcaggtgaatgtacggcgcggcttcgagcagcggccgcccccgagcgcgagctttcccctcaatttttagattacatcgtgccacgagttgcttctcttatgaa

SEQ ID NO: 3742 - DNA, 3127 bp, Toxoplasma gondii
  source 1..3127: mol_type = genomic DNA
catccaggttgtacgtacaggtcgggacgcagctgtgcggtagatttgcgaggcgtcgcgagaagacgaggccgacgcttgcatctgggtcccggcgctggaccgcggctgaaggcgacgtgcttcgtacgaacggcgagtactggctgacgaggagcatgaggcgaatcagttcgcgatgttggagatagcaatagaatcctggcgggaagtccttttcgaggcgccgcgcgagcgtcgtcagcttcctgcgcaactcgggctggccgatctcaacgctctcctcaaaggactgcagttcgccgagcacgttgtacagcatgtccttctcaggtcggacgatctcgcgctccagccccgcccgcaggagcaggcgacaaaagtgcaggacgccggtgatgctgagctccgcctcgcgcgcagcagccatgatcatcggcagcaatccgcactcgcgcgaatgcacccggacgttgcgcatcaggcactcccaggagcagaagacgaagggacatgtgtggggtgagacaggacaggagaacccacggttggagactggccgctcgcggagacagtggaagcatgtcgtgaagacttggccgccctcgagcgtcagcggggtacacacgtaaggcaattctcggaagatcagctggccaggctcgagtggaacctccgcgatgcacaccgtttgcttgtcctgcttcacgacgaggaacggcggccgctgcagcgcgccgcgtcggccgatctccgtggcgagagccttgggactcgagagctgcggaaggctctcgcacgttgtccagaccgacgcgcccggatgcgagaagtacaagtctccctccgcgtacggccgcggggtggtgtgacaagaggcgaagcgcgaagagtcaaagagagcggccttgtacaggtggggaatgcatgagacctcggcgaggagtcgctcttcggcgtctcgcagagaccggataagcatgcggttttcaggcacacaaaacagcgcggtccagtaaaactcaatggcctgggagaactttttctgctcgaggttgaggtccgccgccagaatgtacagctctgcgcgactcggaaacgcatcaaggtagtactcaagaagagactcggcgtcgctaaattgctgcctgctcaagagctttggaatcgtcgaacgcaccaaatccagttctctctcgtcttgttgcctgttactttcatccaccgcctccatgcgccttaccaactcgctccgcaacgcgctcccctttcgccgccgagccgaaccggctgctagaggtgcatcctcgccgaccgctcgcaggaccccatggcgcctttccgccgtaaggtccttcactggatctgccgcacgcgctgctgcgacgtcctcccccggcgcgacgcttcggggacgccccttgcctgcgtcgagctgcactcctcctctcccgtctgaggaaacagtattgttctctctgcgctcttctccggtaccgtctagaggaccaccgggcaggacctgctttcccctatgagaaggcgcgcgcctgcgccggagcagttcgtccctcgtcgccgcgtctgcagaggccagcgagaaagttgcgtcgtcgacatgcgaggccttgaaggcccccacgagcattttctcgaacatcttgcagctcgggaagcgtgagaacaatcaagacgatcagtggggaaggcgccgaacgacgagtgggggagcagagaagagggcaagtcgacacagaaaaagagaggggaaatggggatgcagagcgcgcaggcgacgcaggatctgcgcatctctgtactcggttgtcgagggaggcgctccagatgaaaagtggaaggcgcacaagagaaacgggaagagaagtcacatggtggagactcgcaggacagacgggggtgggtgaactgcgtttgaggtcgctcctacattttggacagcagagacgtcgtcttacgcagctcacaaaggagtccggatggagtcgccctctttgataaggcggggacgacagaagaaaaggccatgaaaaaacaagacaagcttccttccgtcccaaaactgccttcgagaagcgtcaggaggatagaggcgccgaaaccgagccgctctcggaaattgtcaaaacgcgataatggggtcacgacccgccgcctagaggcagaaagttgaaagcagcccagagaaacgacttggcgactcgaaaaactaagtctcggcagctcacgaaggaaagaggcaagaaacaagactaagaaacaagacagtgtaggcgctcgagcatcgaagagaatgccggacaagaagcccgactcactggacacggcgggtaaccgaggcgatgtgtgaacaggttcgagctagaaggaaaggtgaagagtaagttgaactggagaagcaaatgcgtgtatcgaggacatacagactcacgaagaagacataaccgataagaactcgagactcggaagaacgacgcggaccgtcaagccgaggtcagctgcgaaaagggattgtgtccttgaagacagccccgctttacagacttattttctccctagactcccttccccagtatcttgttggttgtgaaggagagaattgccttgcgaggaagttacaaaagcgcggaaatcgctgaagttcggcaatagagcggttgcgagatatcgagcaatgcgagtgtgcagactgttccaaacgcggggaaagagtgtacggaggagaaccaaccagtcccagagggtaggcgaacgcgctgtcttcttgatcctttctcttggaaacaccgaaagaaattcagttttcatgcttcaacaaaagacaacaagaaacgaatccttttctccgtaataaaatacttccacgcaaggctcccagatcgccccccctgtcctgattccgatccagccactatcgctgctgccgtcactcattccagccgagcgtgtgctggcgtcatctcactatccaatgaaatttcagacttttgatttttctgacacaaccacaccactctttaccgtcccttccatcttgctctgaaagggaaacgcttccctcccaatttggagcaacttcagataccggggggaaatgcggtgttctcca

SEQ ID NO: 3743 - DNA, 3684 bp, Toxoplasma gondii
  source 1..3684: mol_type = genomic DNA
aaagggaactgttcagatgtaggaacagacaagttcacgtgtacgtggaagcatctcaacatcgacatccaaatcaccgcacaaatctcaatgtaagaatacgattgtttttggagagaagcgggcatgaacgtgcatagagagatattcgcgtgcgagtatccacctactggtgaacctgcgaggactcttccgtgttgtctagatgactggttcagttaggcaggaccggcggtgctgttgacttaccaccaaaggacaagagaccttcacccctcctcaaccgctctacgcggcggctcatctttctttggtggacgtggagagggaagaatcgaaaaagcctgaagattcgggagatctttataaaaaatctttcgcgaaaatgcagtgtgatatcttgacaagatccaaggcaaaccctgaaattgagagggagaggcgatgaaatggtaccaaatgcgtagcgactggtgaggcaattagagcaacgtaagatcgaagaaaagacgtggatgaagaagaaaacgcagggcccgacgagtcagggctggccgcaacaggatgtccttcatcgaaaaaaacgagagaggctacaatggaaacgaaacagacaggagcaatatgcagaattggtgcacaaatctgaaaccctccggcaacaacggaagcagaggcgcttccttatttgtgcgtcgggattgttccaacaccactccgggtcgaccttgtggatcgccagcaagccgggcaagtcgctgcggagccttcacaatatcgtgtttgcactactatgaaaccacaactaacaagacgggagaaacggaaggaaatacggtgcagcggacgcaagccgcgcccgggaccagcagaatcgtggtgggcaaaagacaccgcaaagagacctgtagaatcccggtcacacgaaattcaccgcagacacggtaggtcatttaataaaaaaaagagcccatagtgtgtttccctctgaagactacactccaagaagatagtgacgaaatgtagatataagattgtaaatggttaagatgccaccagaaacggaactcgatttgttacgagagcacgtggaccggctgcgaggccgctttgccgcctattcctttgcgaagaagtccacagagtctcgcacctttatccgtgcacacaggcacacaacaagtgaaagggacaggtatgtgtcctaaagctgttatgggaactgttcgctgaaaatgcagaaacaatgatagtacttttccgcgcttcagcaagttaccgtgcatgctagccagccgcacaccagccgcgcatgggggttcgttagccaggaaaaaagactggtagcgtagaacgttaaggaagagtggtaaggacttttttgtccaaagatcactttacgtggcggatcacatatatatttcactagagatgcccttgctgacgcagtttctgaacacaaaaaccgatctgggcaaaaggctgccaagaaacttcccaccagcggcaaggcacagctctcgtagctgtcaatggtgtctgtttgtgggggggtcgaggggatgggctcttcaagattatgacaagctattgactgctgcgacaaagtttctaaatgcgttttcttgcaagcgtactcgaacaattcaaagcttccgcaagagatggcgagatccccccaaaattcggctgtccagccatgctgtgtgacgtcaagactttcgattgctgaacagccgaagataggtacctgctacggtactgcagggacgatatacaagcagttatctatcgggatgcacgccgcagtttttaagtgcggattttgaggagccttcgaaagatacacagaaaactgcactggaaagctgcgtgtgtatgtcgatttggcctatccttctcaccacggtgaaacagtgtttcaatgttcaccgacgagcaaaaaatagaaggcactagttgaggaatatggcaagggagaagctcttatatatcagacaaggagcagatcatggtataacgcctctatcctgggtgtgaaggatggcctgcttgaggatcgtcccctcggagagagctaggaagacagcaggaagaacagaagtgtatggagttttcccgggcctctccgtgttgctgtgactgtagtcaggctctattccaattcaatcaagcaacagtggtgcacacgctcctagcagcaacaaaaacgcacaggcacgttcgcttcttgagttccgcattccgaaagagagacgcgacagagctcggcgttattctcccttcactattcgaattggggagagctcttctcatatgtttgtgtgctggagtacctatgaccgcccttgtacttaggctctccccacacagcagcttacagcaattctcatggtcctctccttcagtgcttttctgctgcctgcttctcctcagtagaaaatctgttgaaaagcgccttctattgtcacccttgtccctctccacctctgtgcatactgtttcctcctttctcctgtttatccttcggtctggaatgaacgttccccttcttttcttcttcgttacgttcatgtctcctgtggattctccttcccttgacttgcgaactcttcctcgactgtcagcgttttgatggtgatttacggcgcatatgctgggtttctgctactgcaagttgtccactgacgtcttcgaattaccgccgtttactatgaagcgccagaagtacttgtttcttgcgccagtatcacgattcccgcctcatcccattcgctacatacaaaagtaggcagtgcagctgttccatggaaccaccgatattgtgctcttcacgtgaaaaggaaatcgtatcttgaactgtctgactttccctgagccactgttcttcggcagacgtctccatcattcgtgtaattctatagttgcgccatggagacaaacgaaacacaaagtccctcgaaaggggcgacctcactgcaaatgtccgacggctagagacgcccatgtcatcaagtgtctgattttacgaaatttcctctccccagacactggtcaagacctttttggtttcgaagagtcggcaagtatcgcgtgtcaccctgtccgtcccaatgcggactcccctttccagcgtggggacgacaaacgacatctttgactcgatgaacccctctgttcgcgcatctctgtggaaatccactacacagtttctcttgtacaggattttgatgtatcagaattttttccataaaaacaaagacatcggtaaccccgagttctccatgtcgctgttgtcatctccaacgatccggacctattgcatggtacacccgctgccctgcgccccggttctcttccctttccctgttgcatgcactttcaaacattttcaccgcccagtttcctcgttttcttctagtttccttgtttatttttcggactttcactactcttccgcgtatgcgtgttgttctcccaacttttccgctccgtgacatcttgccgcagctccacctgttgcatctggttgccgaacacaacaggcgctgggttcaagcgcttcgtcgagtagtctcaagaaggccggtggtgtctgtttgttgctcaagtagatgcgaacagtttcggtgggtctcttccctgctgaattcttttgggctccgtaacttctgcttccccaaa

SEQ ID NO: 3744 - DNA, 3752 bp, Toxoplasma gondii
  source 1..3752: mol_type = genomic DNA
ggcgtggcgctacgttttgacacagagtcacaaaaacagaagaagtctgcatctccctcatccaagataaacagacacagggagtagccctttttgctctctgcaatccgtgagtttctttcgacgtagcagtaaaacaacatcccccaccggcgaatacgggacctccctgctctcagaaaaaaggttcttctgtaacttccgttctcaacactcgcgccagcccccgtgcatgaagaaggaaaattcttacttatgtctagtcaataccccaccagcctgtttccgctttcctgtgctcgattcttctgtgtttcgtttatctttggcatctggtgcgctacatgtttttgatgactctgtacccattgtacacactcggaatacatgcgccaaacgagcatatacataagagcaaccacaccgccgagagaactggtaaaatcaaaaagtaccccaaattccaaatcgagcatgccgtggctgtttggagcatagcacacattttgacggtttcattaggatcagaaaaatcgaatttacccttttcaccccgctgctgcgcggcaagtgcagcctcgtagcgactcgcatggctctgggagccgataaatttctctgggtcgtcaccaaagccacaatccgttgcgcagtcgacaggccatcgttggaattcaaagatgctgaggtgcgagaacgtgcaaaagagaccagctcgtgccatcgcctggctagcgatgttgaccccctttctgtacgtggtcgtcgtgtcccagtagtcgttgtggcaagtgtttttgatacccgcgtgacgttgtccagtaaactcatgaccggcgagccagtcattggcggttggtgttgcgcgaaggcctgcaattatacccggcaccacgagaggcccagctgttgaacgtgcctgtctcccaattcctgggtgaagctccgactcattttccgcatcaatactttcagaagcagcatcattcgctgcaaatccgagagcagctagcccgtgtacagagaggagcgcatcctggtagtcggcaacttcagacgaactgccggcatcgattgatgctgtgtgggcggacttgagtacgccgtccgcgttggcagcaggagttccagtaatctgtcttccctttaagaaatcttctatatttcccccctggcctattgcattgttaagttgcttcttgatgtccccgacgtcgggcatgatattcgtattgctgttcgcgtacacggtataaatctcgcctataccctggccaacgctccagctcagagcgctgccactgcggatgaggatgaagagattgtaggcgcatgcaaacagaacagcgacacatgcaaggcaggcagtgacaacggcaacaataactggtctcttctttcgtgtacacactgccgtcactgtcgcaagcagcaaaagaacaccggcggacccaacgacaatcgtggcgaggaggctcaacttgccgagttcgaagaagatcatgactgcgagaaggttgaccataacgacgtaaaaaatcaaaccacacttcattcctgaaaaggaaatggccaactttgcccgttgatcaaccagcttctcatcgaccacctgaatcacttggaccacaggagcaggagcgaccggagcctcactacttggctctagtaagggagccatcacattgttggcttcctcattagagaccttttcgtttgttgcttcctgacccgtctctgctgtgtctagaagagacaggaagtcgtcgctcccacctctggcggttccacctccggcggctccgcctctgatcgcttgatccttgaatgcatcctccaccgacggcaagcggataacgcgcttgcgttccatgagaagtcaaatacggcgagagatgtacatgaaaacttttttctaactctgaaatgacccggcccgcaaaaaaaaacttgctttgaggcaggcctcaccaagtgtttaaggttttattaaacactgtcgccatctgcgacccacaagccttcgaagtcatctactgatctaagcccatcataattcctcttactgggcgtcggagggaaattagcgaaacctacacgaaagaggtacgacgaagacgaacagccggtcactcccggcagcgcagtgaattagagcgctgggccacagaactgtgtacaccgtcagaaactgcttttttgttgtctgagccacacgataatttctatcacaggtcgcccctctgcgatgccacgcttcgcagcacactaatgaaggctcggagaaaatagaacaaagtccgcgccgctaataccccggttaggaaaagctctccgggtccatttcacgctgcaccacaaaccctccagaccgccttgcaacacgccaccctaacctaactcgaacgccacttttttcacgtcaagaattgccgcatagtctgcaaaactgccgctctatttccacaccgtggtaattcaaccagtggaattccgcgtgcagcctgactcaccgctcaatcgagtgcacgaactcgaagactctgcaggggcagtagctgctctatgtcagcgaagggggggggggaggggaacagctagctgcaaatttttgactccaagacgacaccttgttggtatgggcccagaaaacttccctccaggtctccctttttcgctgtcacaaccaccaaaaagggtcgcacgcgaatcgactcgcctcacgcatgcagccgcctgcgctctggaagagccttccatctcaacaacacttccgaggcgacctggaccacgcaagagcggctacggatctctcaggtcagcacgtagtgtgcaagcgacaggtccatcgtttcttgtttgtgaaacaagcaaactgccattccggactggagtcagaaatttggttttcttgacgtactcgatcggactgtcctgggaggggcgttatcgagggcatgcttaagcacggaagaacgcctgcggacgtggcgacggcttgtgccgcagtttcagggcacacccctgacttttcggttttaatggacttctggatccacgacacaggttctgtcccgttccttcgacttctctgctgattattactaaaggtgtgtcacgaggcggtagaggcctccgctgctgtggtggacgggtaaaacccaggtcgattttgcgcaaaccgtgcataagcagccgcgcgtgccgctgcagagaaacttcgctcccttggcagacatcttcccttttcctaggatttctctgtccagagacctctcttcctcgtaggtgttatcttgcggttgatctcggtcgattttcccttgaacgctgttgcatgcggtgttgtcgacaaggcacttataggaggagaaaggagaggaaagcgacgagttccgcgctggggcatttcttctgtcgcatctttgttggtcgctttcctgcatccgatgcagacgtttactgcgtgacttcttccccttttccctgcctctactcactgccaccctcacgcacacagccatctggagactgtctacttgtgtcttccgccctcaatgctccctttcttttaggttccgtcgctctcgagcgggatccccaacagccgtgttttctgcaacaaacagagtgtggtcggacaaggaagatggcctgtggtggatgcgcacttaggggacaagcctcccggtccccttcgtggttttcgttttccgctgctctcttttaacagagttaacagagtcataaca

SEQ ID NO: 3745 - DNA, 2826 bp, Toxoplasma gondii
  source 1..2826: mol_type = genomic DNA
cctcttctctccctattctccgacctcaccataccacaggcactcataccacatagagatacatacatacatacatacaaacataactatatctatggaaatatacacatatacatatatatatatatatatatatatatataagtatatgtatgtatatatgtgtgtgtacatggcgagccctgtgtatacatggatgtccctaagtatgcatgcttcactctgcataagcctgtgcgagcgtttccttgtcgttgttgctcttcggtagacgccgcatgcgtgtctgtttgagctttctttctcgcgtgcctcgtctccctctctctgtccttagcgcctcttgcccgcctcctcctcctctcgccgcgcgctgttcggtctcccgttgcctaaatccttcttgttttctgacctgtgtcgacgccagtgaagccggcgaggagtgcctgcctgacgagttgcgccgtgttgtctttcttccacgcagtgccgtaaaggagtctcggaagctcgacgccttcgcgagacgctgtctcccgctccggcgcgtcgtcgccactgtcctcgcgccgtggtagccgctgcgcctccagggaggttctgcggcggccgagggcggagggcggcgacccgggaggtgtacgtacacccgaaagttcgagggctcccggcgagggccgggcgtaggcggggaggaagaccgcgcgtgagagaggcggcagacgcgacatttccacaggattgatcgcgcgacccagcgagacgacgacgcccgcggccaggaaggccgagagacttaggcacacgaggaacttgaaggacggcgccgaagcgactgcctccagcgccgactgatgcagcggcgcgcgcgtctcctccgcgccgagggcgagaggaagaagagagagacacagacacgcaaacgagagagacaacggacccagacaagaagaaaagcgcacagacgacgcgcggtgaggcacagcagaagaaggaggggaggaagaggaagaagagcaagaagacgaggaggaggaagaagaggaagaagaagaggaagaagaaggagagaagtcgagacggagggtgcggagcggtggagtcgatcgttgttcgtcgagaagaaaggaggttgttgtgtgtaaaaagagaaactcgaaggcaggcgagaagcggcgccagctgagaggaacggcaggctgttgtcgccgggcggcgacttgcctcagtgtgtgtgtcatgccaggcaccttggagactcgccaggtggagtcccgctctgcagttcctcgcggactgacttgtttcgtctcgcgccggttttgaaacgagacaagcaaatcaaagacgccgcaacacagtttgcagaaaatccgacggtccttgcatggcggaaaggagctgcccgacaagaacaacagagctggcgagacgaggagggaagactgcgcgcagtgtgtgtctcgcgcgtcgggcgtacccagcgagacagacagagagagggcgaagagcgaaaaaaggtaaaaactcgagttcttcacgcagcgcgagaaaagtttgcgttcttcgaaagacaaaagtgagaaacacgcgcatcttctggccaaaaagggtgagaaaaaaccgtgcctgggcagccgggtcgacagggaggcgccagcgagagattttgagtgggcgtcgatcgaagctgtcgcggaaaagggggatttctctgtgcacaccggaagaatgccagtgaaaaagcatttttccctctacaccttaatgtgcatttaagcaaccgtccaacgtcgtccagagatttcgcttcctccgaggagttcctctcttttgctgaggaaacagcccctctcattacggtccgcggacacaaggtctgcagcctcgtccggcagtcgtcccaccgggcgagttccgtacttcgcgcagagtccgaggagacaagttttagacttttcacaagaaaataaagaaggaaggctgaatctcccgtgtgcccgttgcattctcggcagggagggctgtcgagtttcacggatatttggaggcacaggcaaccacgtagattacgtgtgtaaagaagcgatgatgtgcgcgtcaacttcactgtctgcacctatatatatttatatatataaacgtatatatgtattatgtgtatttatgtagccccagttggattcagcaacttgtcttaccgtgcattggtcttttgaggagcgcgagcagtcgattcactttcgaaacgcgaagaaaggcctgtttccgcttggctcgaaacgtttttgcggcagcggacgcgccgcatgcgcggtgctcgaggctgctggttgaacggtgcctttttggtgagcaaaggaggggtgtctcgtagagtccagaaaagcaggcttgcttggctctctcgtcgtttttttctctttagagaggagacatttccaggacatccgacagcttgagcgggcagacggtgcgcatgacaaaggctcccttctttctctcaacgtctctccctgcattcgttcgagagacacgcagatacaagaaaacacacacaaaacgacgagtcgttgtgcactcaagtccatcttactgcatgcagcaaatgcgactcaacatattcgcagacatgcgccagtttgtgtgtgtctgagcttggatctgttacctcgctgcctgagaagctcgggagagcacctgaacgcaagctgctgcggtagaacgcgccagagctctgtttgcaaaagtagcgactgtgtctcgtgctcacctgtgtgttcattcgtggtgtcttgtgccactagagccgttcttcgcgca

SEQ ID NO: 3746 - DNA, 4348 bp, Toxoplasma gondii
  source 1..4348: mol_type = genomic DNA
tccaaaagtttgataaaatgctagtctgcatacgcacacggtgactctaaatttccatcctggctagcgcctcctgcgtgcgaaaggcttgaaaggcgtcactataccccgattaatcggaactgatatcgtctaatgctgcaggcgtcgaatgcccctaaagttatttgagcagaagcgaaacacctaccgcatcgttgtcaggttcagattctgactcatcagacagttcactcatgcttgacatctccgtgtcactcttcttcgccttcaagctgtacgtttgacgccgtctcatagggcgctcaggtacgggagcagcggctccaggagacgctgccgctccctgacacagggcacaccaaaggacacaccatatgcatgttggaataaggaaactgtccataaccatcaaccacgggataggcgtgtcatctcaagtcgtactgtttataccaccgctgccacttccagtatgaacagtctaactgaatcaccaaaatcgggaacggtactcatgttcgtcccgtaacttccccagtggtacaggaagctacgctaatccagtggctgagattttagccacgtcgcaatcagtaccgtcacgtcgagtctagagaaaaacttcacttgtttaactcagacggggatccctgcagttttgtgtgtgcgagctcttacggccgctgcaggtgcaggtgctgtgcttgccgccgcggtggacgcagtagaggcggcttgaataatatcgcttcctcctccagcggttttcgctttgatgtgcagaagcggtccatctggagcccgcttcccccacctgtcaaagcagctcatagtgttccccatggtgactctagggtagcgaaaaaatgcaatcgaaagtaacaaccgtactgcgggttcagcgacgcccgtagacgagcaacggcgaccttgaatcgctcctgcttccactcaaagttgtgaaaatgataagtggaagcaaaataatgcgcagtggggaacgaacggaacgacgattccccgagaaaagtgtcagtttagacagtggagacggaggacacgcacgggaggaccgtacccgacaagcgactagccaaaagtattagcgaagaaagtttcgaacgagtgggccaccagtttacagagtacgcatcccacttggaaagcgtttatttgcttgcagcacggactgcgcaacaaaaacatgcgaacgaccgtgttcgctgggtaaaaaataaaggctccccagcgaagaagcgtacacgcaaggccgtctgaagcgtcgatgttggctgcaacacagggttccgcccgaattatccagcatgcggtgtgcgcaagaggagcgccttgccgtgggactcaagaggctgccactctcagcggttaaattccgcgatcaagtgtgctgctgaggttgcctcctgttgcttctgttaatcaccatgaataaagttgtttttttcggtaccagcgcaaaggtgcatgcacagtctgcggaaaaggatatctcgaaggcggtccagagatggtgttaaaatagtcggaacaagtcccaccaaaccccctagtgaatgggataaagaggaggtcagtcggagcttccacagtggttgtgtctgtgagtccgcttcactacttcgtggaagacaacagaacgaaggagcgactgctgcctagcaacgttacgccagcaaaaagggagcggcgcctcgcaacgaggcttaaacatacgaacacacggttgatgcatctctcgttggtaagcagcaagcttcggtttttgacaacgctatgcaccttgctacgcttcctttaccacagagttctaccaaagaagaagtcttccgctgatcgaagtgtggcctccgtactttggagggcatttggatttgaagaacgttgatctgagtgtggcgacatcgaggcgtttctgcgcacgtgaaaactgcgagcacaatcgttgagcactgtaaagctggtggaggtcatgaacgcgaaaaaatgtctaaaatgcccatccgacctgaccgcttatgtttttgaagtattgagcttgactgagcctagagacggtgcgcaacaccactgatgcacgatggatctcccaagatcggaaaaccaacgcgcgtgtgagttgtctcagctgtcaggcagacagatacccatgaaagtctcatgccgaccgcactcgcgatactctgtttcagctcatgaaagccaaccagggactgcgatgtagagcgtagcttccagcacatgttgtagacgaaagtgacagcactcactgtagggtgtgacagagaggaccatgtgccaaacaacgagataaagcgaagcaaccgtatctgcgagttcaggaacaaagaataccgctacataacataaatgtgtaagaagcggacaaagaatactggcatgcactgcgagcatgtaggccgtccgagagcaacagcagcctgtttcttgctgcttgcaaacaccaccaaaaccgccgcttgagtaaaacgttccatctcaaatgagttcttagagaaacactatcaaattccgtcaaaatgtagcttatcctcatcccaagtgtttggtcaatcttcctttgttcagaagtcacatgcgctcgctgggctaggccgacatccacagtctggcttcttcgacaggcctgctgggcccatattgtttacggatcctgaggtgccagtgctattgttgttgttctcatattgaagattgctcttcccgaagaatgcattttccagaacacccgtccatatgacggggaagttaacagttttgaaaagatgtcgagctttcctcgtacaaaagaagtgctacatgaggcctgtcaggttcacaccgcgtccttttttagttctggaccaacacagtcagagacatgtctttccaccgcgatagagatcttaactattcgtgcaatcaatggaataccagcgatgccgcagcagaatgccggttggttatccaacactcggattcctaagaaacagtgtgcacaactctgcagttacatgactggataattctttgaggactaaccagaacaaaaccacaaaatcttctccacaatctagacaagtaaagagtgtaacacaggcggacgatggaccctcgccaacaagacggaatcctggtggctggtacttgcggcaatctgacatcataggccgccccctttgctgtgagattggcacgttgttgacctattgcatcggtactcgtgcgttcgtgcttggttcatttaatggatatcgaatcacctactggcttgtcccagaaaaacggtggctgttgtccaagcagtattccaagaaaacgatgctggtggcatccttcttttccatccatgaatcgtgcgtgcgaaagagtggcttccatgtgttttaactcgttgtgcattagatttaatcccagtgagtgaaatcagagctgcctgctatcgaacgaggcattgccacaagacatgcacaacgagaaaaaacaggtcaacgtccactccaattgacgccagcactagcgccgccaactgaaggagacaaaacagtcatttcgtacaaagataaagaagcgtgacgccgctaggaagctgtctctggaagaacaacaacattagcactgaagtacatatcgcaaagagggctctctacccagaatgcgcgtgaaatgtatctgcaatgaacgcaacagctgacattgggaaatcccgggatgaaagacagaaatcaaggctgacctgtcagttcttcatcacatggaaacatataggccacactgttgacgacaaagagtgttccacgaaaaagatttcaaacgggaaaggccaatatcgaggcctcactttaccggcagacggtcaggggcgagaagtcttttttccagaacgtgatcgatgaatttgctgtcgccctgcatgtgaacaacatacagaaacgtgcctttacaattgagaatcctaacgtgggtttcgtttagacgctaccaaagctgcagaggcccttttttagcgttggaaaggctgtgtgtgccttacgtgtgtcggccgctctctgcgcgcacgcgcaaaataccgccgaaaatagataaggtcctttagacgatctgagaggtgaaagacagcaggcgagtgaaactcaacggtgctcggatagagactttttttgtggggactctgaaggccaatcgggcgtacacatccatagtgctgtcgctggcagcattaactcctttttgcgaacggccgaccggggagaagcgtttctttcgcctccgttttctgtctaatgccttcatgtatccaacatctgtaaacggcggtaccctcaaa

SEQ ID NO: 3747 - DNA, 2073 bp, Toxoplasma gondii
  source 1..2073: mol_type = genomic DNA
tctttccttcatgttggagaaaagcggtttcctctgtccctttcgttcggataaaaaaacgtaaccgagaaacaggacacaaaagaccaagacttggacgcagagtcgcgtcgatgctttcgcgaacacaatctgacacgggtatagacgaggcgatgtataagcacaggggggaagattcgcgtttccttgttctgcacagaggctgatgaggaagcagaagtgcacatgtagggaagacagagaggcacggatgagatttaaggaagagacggggaaaaggtgcaaaaaagcaggaaatgcccacttcgaacacgtagattcaaacgagtaggtctacaagcagaaacgcaaaaaaaaaaatagaaagaaagcgcgtttcaacgaatggtacgaaagtgaatcgactctgggggctctgcttccaggtgaacaagtcaaaggggaaggtgcttgagaggaggcattctcagcagccggaggcaagaaacacaccttccgggtattcgtggtggcgagaaacgaataaagcgaaaccggaggggaacgaaaaatcaacgtcagagacggagagagtctgagaacaggcagagcccctcttgcaaagtgcacatagtccgaaggccgccgaactgtttctgtaggactctcggcgaaattagtttacagatcatttataaaagaagcgtggcacatctggcagcttcaaaacgagaaagatttgggaggcggtccaacgtttatccaggtttgctctgcgacaagtgtttcagcactggcgaagcgccgcaacgcagacggggctctttccgactcgaaattttcctttttaggcagcatcaacatacatgtttacggccggcggcctgtgtgagacgtcaatgcgtttaaacaagaaagagggaaattcgcggagacaaacgacaaacggtcgaaaccacagccacgaaaagtcacggcagtcccgcccaggtgagtccgcgctcaagaaacaagcagagccaaattcgttttccttctcctgggaaacggataatgaagtttccacaagtctgtgtcacccgcattgcctgttatgcaagaagactagagaaaaggcagacacacccgaacaagtcacctgccgctcccgtgtgcaaagttggaaagaattgcatgttgctgcaccgcaagaaaccgttatgcgcccccctttcatctctgtctcgtgcggtcacttcgtctgggaacttcagacggcaggggagggtgtttctctatcgaatggtccattttccagtacttctggtttcatcttcaacgagtttggtcctctttttttctcctcggtctgcagagccgcgtccgcggttaagctaaatagttgaacgccgtgcctgagcagaacaggagaaaagtttcagcgcttgggtttgtgggttgcggctatctattccgcaggcatcatcctgtggttccggacaaatttgttcgttttcaacaattggctctgaagaatgacttgacgggtctgtgatgcagcaagcgatgaatcgaaggtgccggtttccaattacccgacttcttgccgtctgtagacagatctgagaaaagtttactgggcatgcaggcggtcgtcttcgggaccagcaggcaaggcacgcgagtggtgaggagggtggtatgcaaagtgttcgtggttagagaggaggtgtatgtcgaccattggctcctcgaaccagagacaggcggtattgttgttgaccgtacagtgtagttgtagttttgacctggctttttggtgacgtggtttcctctcaattcagcaagccggcacattcggatcgtgcccatttagtgtgacgaggtccaaaaacaagctgtggtcgtcagcctgtatttttgcgtagggttcccgccccatctgcgtcctcagcatcgactgtccattttttccgcgtctttctccgatctttcgatgctctcgctgcgaataacaagggtgcgttgtatgagtatttgctgggacgcaaagaggtggttatgtcttcgttctcgcccgccgtcccttcacgcgcgtatgtgttttatcga

SEQ ID NO: 3748 - DNA, 2303 bp, Toxoplasma gondii
  source 1..2303: mol_type = genomic DNA
tgttgcttccattcgtactgaacaacctcgacctccttcacgacttctgtcaccttggggatgatcttttccttgacatcgacgacaacttctttttcaacgtaagtgtccttgtactcgatttccggaacctcaacctcaatcacctcttgctcgccctcgtacttgggcaccggtcgcggcacctcgcggacatcccactttgggacaaactgaggtgcgtagcccaccagcacgggcacctcgacgtctctgagagtccacacgaagggacagccggaaagaaatggcgaactgaggaaaagactgcggggaatgaacgtagcagggcctcacacggaagaatctgccgcaagcgggctgtatgcggatctaaaaaccaggttgagcattgcgtcatcgcttggcatggacgtaggtgacgctcaagacttgccgtgcgtttccacagacaactgcctgatggagtatttttgacgaagaacactagaatgaatcactgctcacctgtccactagtttctcggtgtgcacagcgacctccttctcctgaaaagcgatgtccattttcggcacctcgtgcacggcgctctggttgtagacttttggaatgatggtgtcgttgagttccacagtggggacctcaatgtacttgtctcgcttgtacacatcctggtacacgggaacggggacgacgggctggtcagcttgcaggcgaacgttcaccctttcgacttcggcattttccgttgtgccggtaatgaacatcgagcctcccgcaggagactgtggctgttgaaactgagacattgtgtgtgtgcgaaaagggaatcgaggatagcgttaggacgagaacacgtgcccactcctattatcagaggtcctgcgtgagtaggaaaagccactggaaggtttgtttggcgattcctgaacaacgagcacctgcaagcatacacaggccacagacacactgacaggcctgatggacatcaagtacgttagatttctgcggtcagacgaagaggatcccaccaccgagtcctgccaaaaaaactgtcgctggcagctgtgatggaactgtttgtcgcgtcagaaaaaaaagtatagctcaatgcgcaaaagcccgtttctgccttcccaaggttcccggggtacacacgaacctcgagaatcgaagcacagcgagcttgctcaacagcgcgaagtgcgcttaacccgaagcggctgcgacacggtacagttaaatgaagcgtaaaagactagtcaggaagggagtaaaagaagatgtgccaaatctgaaacttagcagaaatctttccgacagcggcgaagaaccatttcacaagacgttaccctgtagctacaatgaggttgcgagcctacttgagcgctgccaagctttgccctctgacggagtggacggcgtgagctgcgcgccaggacggcggcacgagctgggcagtgcggaagaggggttttcgcaaagaaagagcgcagacaaaagaccgtcgaaatccctgaaacgttggcagaagaggtagcggcaattgcaggcaattcccttggaagaaacaccgaacgaggccacgctaacgctgagcggagtttctttctcgcgctcggggtagatctgccgtgcaagccggactacgtaaaatgactcacgtccttgcactaggttggctgccttgtcagagaggctcgattacctgacggaagaacaaagcgagcaactctgtgaatgccaagtactgcgtgtcagacaacaaaattcctggacgtggaagaactgtgtggaaaaacaactgggagaaaagaccgaaaaaagagacctcaaaagtgccaggctcttgatacgaacaggaaaatgtgatgacatggcacaggactagcgaaccagccgcagcaaggcaccacgcgcacgcgcgggcctggcaagtcgcgtgtccgtgtccatcccaggcgacccgcgctgggacctctctacagagtcgaacctcgtgacagcgatcgatccaactcgtctggtcccggtgttcctgcttcgagctcgagataagatgtcactagcaggccaccccacgaatgcccaatggcactcggaacacgttccagaaatcgccggctgtgcgcacgaccggggtttggctgagacagttgctctgctaacctcgttcgctcacttgctttcgcacgcggaataacacggacccacaccttctgggatccggaaagcagcgtaaaaagctcgctgtcgcccggttgctataggaaacagtattactttgatcagaaagagacaga

SEQ ID NO: 3749 - DNA, 1190 bp, Toxoplasma gondii
  source 1..1190: mol_type = genomic DNA
tttcccgcgttcgattgctgtgctaatcgttcatgcactgctgttctggtcactcggttgaaacctgagacagactcgacggtgaagggcccgttcgtcatcccttgaaaaaggccagcattcacccaacggcatcctccttgagaagggagggttcaaagctgaagcacatttgtgtgagcacttttcgcagacatagcatatagagcccgagttggtttctctgcgatgtattagccagtgcacttcgagtcactcacctggtttcctccacctctgggagaattcacaggcattcggcgcggttgcgttcccaggattctagccaaatgtgatctagtagctccctcgaggaaaagacaaccggagagtgcgtggtcaactggatgtggctaattctttaaaacacccctcgttccacctgcgtttcctgcaaaagtagaatttacgatggcttgaagccttgcatcgtcaatgacgacttcctgcttcaaagcgctcgcaaagcagaggttgctcagcagggtcgttttttgttttacagtggaagggactggtgatctgtgcattcccgtagtgcgggattcactgcttttctcaacggcggctacgaatctgttggaaccccacagacaatgtgtttgtttgttgacagatccctgaaggcgcccaagaacagcgctggatatatattcttatgtgtgtttgaaatagacacaagtgaagccactccgagagtggttttgaagtagctttgcgccaattcaagtctacctttttttggctggtgtacgccatgactcactgaatatgcgctgttgatcctggggactcgaaaccggagcggattcagcttccgtttgggatgcttgcagctgtaaggaatatggaatttcgtcatccacgttttcaacaaccgatcttgattcttttatatcactgaggctctacgaaaagccgatgacctcgatttccttcggcatcgagttgcatgcgcatgcaactgcgaaaagagagacgcatcgtcggtacgctgtggcactgatttgtgtcattttttcgcgacacagtattttgtcgccgttcccttttcgacacgaaaacactaccacgtcggctccaattctcattttcgagtggccagttgtcaccgagaaattggagtcttcttccctttcctgtgttcgcga

SEQ ID NO: 3750 - DNA, 818 bp, Toxoplasma gondii
  source 1..818: mol_type = genomic DNA
catttccactgaaaaggcttccaggaggactcggaaaacgcagtgtgagacaagccccgaaatcctcgcagaaaagacgctattcacccgcagagggagcaccacatgctcacgtctaaaaatcgatgtaaatatatatatatatataggtatacaaagttataagcatgtatatacgtaaatgctctttagacatatatatacatacatatatatgtatatatgtatatatatgcaggtctgtatacaggttgctgcacgtacgtgtacctacatcttaatgcgaggcagttctcagaaagtgggcatgggaactaaacatagatggacgtatatttacaggaggatagacttgattatgcatgcgtgttgatctgaatgagttcatccaagagggaagaaggaattggagctaattgcaaagggagaaggcggagagacgaaccttgatctcctttctttgtttctgaagaagttttcttcgactgcctcctccctcttcgctctcgctctccgaaggttctgccccaggtccccacgaactcgcagcgctgttttccatctcgcttttctctcttcactccgttatcttcctcgtcctagtttccttctccttcctctccgctcttcacttctgtgcctccttcctgtttttcgccgtccttttcttcgccttcctcctcttcttccctgtccttcttttcatccgtcttgctggtcctctttttccttctctcttcttctttctgtctcgtttcgctactcaagacgagcgtcctctctgtctcctgtctcgcctgtgcttcgtgcgtgtttga

SEQ ID NO: 3751 - DNA, 2831 bp, Toxoplasma gondii
  source 1..2831: mol_type = genomic DNA
acatactgctttctgaaatctcctcgggtgcctacaactgtgtcgcttcgctccgttcgttacttttttccgaggatgctatccagccatattatatatatatatatatgcgcaggggtgttgacgaagtgaaacgtgaagccaccttctggtttttgtgttttttttcagtcagaagtttttgaactagttgacgacgaggcatgcagcggctcgtgcagtggtctgcgggatccgtggggaggagtgaagcctttgggcgggcattccgcggtcgcgaagggaatgaggaaaacaatgagtcgcggcgaagtgaagaatttggacaatcgaaataaagacgattctctgcagcatgcatcagcagcgaacaaggacgcgactgacgcgctagaagaagcctatcgacatgtcgtatctaaagcatagggacgaagcgcgaattgaatccacgagcttttcaaagacaaaccttctgcttgcatgcgcggttttgggattggaaagactgggagagtctgggtggaactccgggatgcgtggcgccgaaatctgcagtttcgacgcgattcgatgtgtgtttctcgtgtgagcgaaattgtgaggcgtatgtggagaaactttggtctgtcctgtgggaagcagtggtgcaatgacgtgcatacactggaaaaagaaaccagaaagagaacgcagtctcccagaggcttcatcctagagacttgctcccgcttaggggctggactgccgatcctttgaacaggaacaaaatatcagaccacaattcttagactgctgcgacagaatattaaacctaagactaattaactgagttaaataatacaggaatgaagggtaggtttgtttcaacgtaccaggccagtgcgaattgctgttctgtagaagccacacaacaggcactttcttctgatgctggcagcggcaagtgccttgagaaccagttggtagcaagcattcagaaaaataatcctgtcgcatttgttcgaagatgacagctttccttcacttttacctgcagcggcgtgacagttaacgcagaggccctcattctctctgtagctgtataagtgtacatgcgaattgtgtacgccagaacagtagaacacgcagaaatcgacataaaagtgcacatatgaatagcgtggcttccaggagagttaagcgcatgtctgcaggtgcaaaaagaggcatttcttacctgtgcgtttcgtgtgtcatcttcctgagtcaggtagagaacgtgtgaaaattggaaattgacgattttctgacagcctgctggtgtctagcgaagaagcggggccacagcagaatgtacgtgacgatccttttccaattagattcctttctgccgcttccagaaatgccgtcgaccacatttttgacatgctaaaaccattgccacaccggcctgtccctaaaaccgtgtaaccaccgaaggtcagatttgcttagaaggcagagcttctcagaaagtgaaccccgatgagtgaccaggaaagagttcagagaggcttgaaatgagagacatgttcgtgtgaacgaaatgtcggtgcgttgggagtggatgaccgtctcaaagctccgcatctgtgtattcaccttgtattcacctgttctaacagctagactagagtacaacggccaaaagaagccctcacgcgaggacgcgtacctcagtacaacgctgtctttaccaaatacagacatgcaacacaagacaatgctggcactggccgtgtttcaccttctgtcttgaagtcttctgtcgtcaaaacagagaacagcagactgaactggatgcctctacagtataaagacaggcgtcctctacacgccctccctcccccctctccgcggccgtcctatcggcattccgatgagatctagagctgtccacatggtcctgaagcaaaggtgcagtcatcggctgtacattgtcctatctgtgtgtggttttttgtgtggatcctttttctcgtctcagagacggcaggcttaccacgtttctccgtctccccacacttactctttgcacttttctatgtctctcctgattgggtcaattcccttttatccaatcacgagaaactcgtgacatgcgggacggcaaaaacgcagagtgttgagcgcgcgtcagggacttcaatcgggcgacagaatgatgacatagaggccgggtggtttgggtttcccgcatgaccctgaggcagcgaggtggttgtccctcattgcttggggttgctgtttctgtcccttgctcggacttgcggggggtcgaaatcgtggaaaatgtggctgtgtgggtgttttttccgggtgtcagcaatttgcagtctggcagaacgtgctggaatgcaaaaacacactttaacgggtaaaaggctgggtggaaatgcagacggtggccttgcaacggatgtagtggtgtctcttgaagtagagccgtctccagaaagcgcgtgtgtttccccaacccctcacctctcgcggcagttctgtcgtcttctgtgttgttcctccgcaccgccagcaggggggacgcgggcgaggaaacgcgtggaggatcggtctgcactttttgctcgtggggtgtcgtacctgtcgtttctctctcgaagatagtgactcgcttcaaagcggacactcgtctcagaaatttttctcccgccgtcttttttaggcagagaaagctctacaccgtacgtttgttcttccccaccagtcccgacgtcgcgttcctcggttgccgttgtctgctgtcgcgagcaatcccactttgttcgtttgagttctcccccgcaacaaaa

SEQ ID NO: 3752 - DNA, 2097 bp, Toxoplasma gondii
  source 1..2097: mol_type = genomic DNA
tacgttcacagagtttgtcgcatcatttgcgtccatatgtgttactgagcccgtgtgtccgtcccgcttgacgcatccaccatctaccagttccggcgttgaccgcgaggcaatcgccgctagagatacagcgggaacggccgagaaggttgctcgttcagtcgcgagtctcgagcgcgtcggagctaacggcgattggagccgagtacatcgacagaggaaagcgtcccaattagcgcatgcctcaggagccgccactgctgaattttgctgcctcctccaacctatgctctgcttaacaccggtgtctgtgttataccgcttctcggtgaaggtgcgtccagaacgaggaatctcggcaccacctcgacaacgcctgtcaacagacatgcagatgaaagttcgtggcaggcaccgctccggtggtccagcaacagactcccccgggaagtacgacggcgaacgactaaccgcccctcgccgcgcggctacgtccagcgcccgtggtctcatattgaaacggacagaggaaaaagcctgatgtgccgagatattgagtgtgtgtcgcacggaaaagcgcagaagtgttgaacatctctcgtctccccttacccaagcctacggggcagcgattacacccctcgtagacgggcagaatgatggcattttcggtttccgattgcaatccccgagtttccccctttttggacgagcacctacaaacggagaagagatcaaacgaaatgattctcgtgtgtctacccaatgacgagcgggtgtaagcccgtcaaaagcgatctgactgtgcgggtccctctcagttcctccggaaaacgctcacatggagagaacggtcctttcgaggatggtgtacggaacaatggagaggaagtgacgttggtttgacttggttggatgcaaaactgcgcaaagagccataagggaagcgtgtgagaaatcactcaacgcagcagaagtaatcaattcactggagccgccccggagagtcaccctcgtatcggagagcaagaggagcacacgagtttttcgagatgaaacaaggagcatcaacagagatcagagaaggctgatcagcaggtctacacttatcagaaggctcaggactgtcttctcaagaaaaaacgggactcagcaaaggccccagggtggcccgcctctctcaaaactcatatccccctgctgcattaaatccgcagcgggaaggaaccaccgttgcttcctccattacagtcatggcaagattctcttccatgatgctgacatggcctacatcgcggtccccgatggaagcgatttttctggcgatgcaacaaggaaaagatgcaaaaattgcatgtacgctgtcgtcgcctcaggccggcgtgcatgcttcagagtccaatagtgtgaaaagggaatatcgaggcccgaggccagtgtaagaatccagtgtaagattgtgaagaaaggcgaatgagcatgtcaacaatttctctgttacatttcttaagacgcctctattggataaatgatactgctgttcctctttcagagtctgaaatggtggagctgacgtgtcgctttccgttgttgaagaggtcagcaccgttcagggtcacctccaagcgcacacagaacaagaaaacgattaactaaaagtcgtggtgttttgagctggtagatcgtgttctgtcaaaatgagtatcatttgaagagtcctgaatttttttcatcttccaaggactttgacgcccaacgggacggcgccattgcgtatctagcggttcacggcctctcttcttctgttcccgtctgtttcattccctcatttcagttcggcctttcatgtttgcttgaagtaatcatccataaccgcacccaagatagtagccctcattccagtgaaactagcggattctaaaagcgagagatgttattctttcaaagtgtgcgtatgatgttcactctctctagtgcgtctttaattcgtcctcgttcgtggtacgttgtcatcgtttcttcttttgcaaccctctgttgcgcgcttggctttttgatgctcgataaacacgtaaagggataacttcagccagtgga

SEQ ID NO: 3753 - DNA, 3845 bp, Toxoplasma gondii
  source 1..3845: mol_type = genomic DNA
acactctgactaatgttggaatccaccaaaacgcgtgcgctctcttactcctgcggcctgggcctcattgcgggggaagccatcgagaatgaatcctcggcggcactcaggtgtcttcagcttctcgtcgatcaaaccaagaacgatttcgtcgctgacgagctcgccagcgtccagcttggcctttgcctaaaacagcaaggaacatgaaaaggacagacaacgaaattaaacgtggccccctcatttctcgtcagtgacccgaacgggcactgacacattcgattagccgagcaacgcaccctctcatgcaatacgagttccgtcggtttccactgttcgcggtgtggaagccacacatcgccagcacaactccatgaaaacaaacaacggttggtaacgggaagacacaacctcgaacctcgacggctgagaagcgaagtagtcgggatctgccttctctacatgcgcctatcacatgttctgcctgtagacgagcacaattacgtccatgaccagatacactggtaaaaaccgacccactcacaagtgtctcttgcctgcacgagcacatgcataacccgtctacaactaggtatgcacatcatctacagaagtgcatctgagaagatcaagtacaactttatgttcttagaatgtgaggagcgtgtgggtctcgatcagcgtcaccatcatgttaaatcagtccagttttccatcctgtggatctttagttcttcctcggccattcccagttggaccccgacgatcgctctgagcccgtctggcttctgcctacctgcttgccatattcggttcccgtagcgacagcatgacgaagcatatcaccggtgctaaggtggcagaggcagtggctcttcttcagtttcacactctgcgtgcccttcccagaaccaggagctccgatgaagatatagcggccttcgggtttcgcgaggcatgcatagcgtctcttcagttcctcgagcagctcgaccgtcgccacgttttcgaggtcaacgccctcgcgtttccctgacggagctgccatagtggtcgtggtaagttttgactgggagagcaatagagaaaaaacgaagacacaaacgaagccccgagcaagcacgacgcagccgcaggcctaacggaatccgtttttggtacggaaaaaacgtgcttccgatggtgaagcacaaatgcgttcgggttgaaagattcgattatgcgttgactacgtagtactgaacaaagacagcgtaggaaaaaacgaaaagccaagataggcccagcggtggtgtcgaagaagagaacctgtcgcatgcgacgagctgtgcccgcggatccccacatagatcatctgcattgcaaggcgaacggtcttgcacagccttccacacagaaaaaataccggggcgattttaagaaaaacccggtttttctcgacactgagagttctacagtaaacggcgacgcacaaaccaggctgttcctgtcgtcaactcacacagacagggattgtgaggcgggtgagacggaacaggcaagttgctcggtgtcactgcaacgataatgtcgaacagtggcagcacactcgtcgccacgaacctcgtttgaacgattgtgtcctgcaatttcaacactacatacacacaaaagaatagctgttctcgtctagtacaaatccgaactggcatgtagaatcgcgaatctacggaggtgtcctctgacgcactcttcagaaaatcccattcatttggagcaagggagtttacgtgagaatagacgccagttgctcttgcagtctaccctgtgtcgttcacaggaccgaaaaggtgggttttttaatttcggaatgtttcagttctttaatgcttccaaacctgccggcggtcaattttggtgcgatattacagtggagaccaggtgcggcaaacctacacccccaagctcgtttactgcgtactggactgtttgcccccaacaggtagaaaccgagcaaagggctcgacagtcaaatagtaaatccttgaataataaggaatagagcataatatcaagattcttgcctagaggtcacaaatgtaagatttccaaatacgcgttggaaatagctacttcagctgtactaccggattgattagatttggtattctgtaccacctggtctaaagctacggtgacacgctacggccggatataccttgctgtgaaggtgtgggcgcttgagtattggattacttgacggacggcagtatcatccagtcaaaagcgaatgagcagctgcagaatggtacggcatgtcatatcctgcataaatagatctgtcttgaaagtcgtttacgggacctcggtcaccgcgagaggcgatctcaggcgctgccatctcacagcgttcacttgtcggtgacaaatgtttcgatcgtagactttattccctgttccatttgccccatgctattctaccaccactcggagaagtgttcaagtgcatgcgcagtcttttggcgaatgtatttaagctcctcgagtaacagatctaccaaggattgcatccagacgctctgaacaacagtggccactcaacacccgtgaacagatcgtctgtaaatgatctgttggtctgcgatttctctccaagtgtgtaggtcaaccaaaacaagaccaagtgcgagcgactgcactcttttagttcagttttttgttggcgtcacatgcgttcggctctctctcctacctgctgctctagaaggtcgacaatgatgatgatgattggaggttctttttttgtgtctcggaaaaaagggtttacttcaggtcgaaattttcctggtgtcatctgctttcccgtgcactcggaaggtttcaccgcttgtccatccggtgtttcggaattgccagttttagaatctttgctacatacacgtccgaggccccttttcgctgttcccgtgccgcatatgcagcaggatgactcaatcgcttggcgactcaggccatcgacagagctcgtgtagttttcaacttcatgagtgtcatcaaaacaaaccgatttcggggccccacgttttatacgtactgccccatttcaaaagaatccggacacgcatgcgcattgatacagcgcgcacgttgtttgcggcttggaggagaaattagagaaacagatgctttcagaagagccaaattagctgtcaaggatacacaaggaggacacgagcgcttgctgttggatgcatgcatgatacctttagatacgcttcacggagcggaatcggaaacagacgattacgctcagttgccattcatgcctcctgtattgctctgaacaaacgtacaggccgacgctagataagcatagtttaagttacattgagtcgaatcaatgttgtcgtgagatcctgatggggagcttggttgagttcaagcgtagggcaacaatcgctgcatccgtctggcaaaggtcactggtatctagtatctccacgtatgcctcttctcgtctcttcattcttctccgtctgtacccttctgcgtccttctctatcttttaatcgtatacttactctctcttactctcggggctcccctcccttggctcctgtgagcaacaaatcggtttccattctccgcgagaagaaatttgacatttcttggtatcgtggacgaggaaattgctggctctgtttcatacctctggatccttcataaatatttccagaagagatgttttgtcactagatatccgggcttccgcctaccttcacgactttttgtctttgcatgcgccctgaaggaaacaagaaatcgtttctgagttccacggtttattatcaacgaaacagcaa

SEQ ID NO: 3754 - DNA, 5045 bp, Toxoplasma gondii
  source 1..5045: mol_type = genomic DNA
agaggaatgcaaagtcgaagtgcagtttacacgttttcgttcaaaaagaccggaagagaggaaagatccattagacacgacgactacgaggggtgggacgccacagtcgaatttacaactgtgaactatatgtgtacactgtatggacatcgacgctctttgtggccgacagcgagtgctgtaaacctgcctccccccctggcatcatccgcggaccgtctttcgtgatgtatgcgagaaaacgcgagcggcctgtagtagtcgtgttaggttcagagcgggaattaaggcagatggcccagccttccacggatggtctttgcacgtttgtttgctcaatagtacagcaactctgacgacctctaccgagaaaaggctgtgacgatgtatcagaagaggcactcagccattttcattaatagaagatctatcagcgacatcgcctcgatgtcgaccgccatacgatacaagtgagtaaggctttcagtttgggtcgccttcagggtgcgagtgctccaaatgtctcgcgaagttcaggcttcagcagtcccgtctccctacattgggaccagtggaaacgattctcagcgctgaacttcttgatctgaggaaattgactcacgagagaaggatcttaagacatttctcgatgcaggtgtggtcacctcggccagcgtgctgcaccagttggaacatatctggcagacctgaattgagttcagttgtccccagtttgtttattagcaaagaaagggaaaacaaaagaggcgaatctacctttttgcagttgctgaagaatcaatctggggaaacgaacagaaagaaatgaagcctggctccgcgcttcggtacgagagctccggaaaagagcgagggaacaatcggagaagttcgggctcagctggtaaatagcggcaccaacgcgcgcgttagcactcaacagaacgcaacagaacgtcaaaaaacgaaaaggtcggacagaagaaacggggaaaagattgctgaactggcctttttcggccggggaaagggccacccttggaactcagagagacaaacgttacagaaccgaacaagtgggcgctgcagctccgccttcaactagaaggaaatttcgcctcaagtttggatagaacgacacagattgctttcttcccagaaatgataacacagaagtcaaagttgggagtggaatacctaggccctgtacgacgcctctgcatgcttcgacgactatgcagcccgacttcctcctcagcgcttttctcctgcacctccgctcatcacattcagcgcagcatctccgctgactgcagcgacaaactcttctcttcgaaacgccgtgccgaagtgaataacgcggtattttccaacaagatccagtctttaaaattttccagtgccgaaaagcaaacgaccaaacatgaagcgctcgggagaaaaaaatcgatttccaagaagcgggcctacgcgtcgtcgttcaccttcgtcataggtacccgaggaagcgaaggcccggccgcgttaagcagcgggtggtaccagaccgcaccagcttagctgcccagcctggttacaagcacgctcttctgattccgccatctaatgagaggcagaaaatgcggcacacggaaggacggaagagtgtctggaaattgtgcttgatattctccgcacgatggattcgtccggaaacccttccaacgccagctgcgaaaatcggacagcgacctccggtgagggaatctagggtggacaaatctggcatagactcgcgcaggcggaacggcagacagcaggaagaactattgcagaaccgaaaatgaatcctacctcgaagaagaaccatgggcaagaccctatgagagacgaaggtaagtgtagggaagcgccgaaccttcacttcgattgtctttgcagaccaagccgccttggtaacagtcaaaaacgattcgagcaatgtctaccggacgtggggtatccaccacacgggagccaggctgtcgaaaacggagacagaacactatagctttctgtcagaaagtgccagtgcgggtgcctagggaccgtaccgttcccgaagatggagactcgagaaaggcaaacgacgtattctcgacaggacactaaggcagaactgccttctccagttacgtagcacagcctgccactccaaaccaatgccagcgtgagcagtagtggctgtcgctggtgccaacggtgggatattccagcctctacacgtatatatctttatgtatttacagtggagtcgtgttaaaacggtcgactcagctcaaccagaatatgggcttccctacccacgacgtttacagacgtcagcaactaatagatctttagctggactctgtcagctttgacgtaccccatcttcgcccgcccgtagtttctattttatattcatcagcttctaggcgtggtgtcgttctgtgcaatcccagactaaatcggttcgtcactcgttgggtgctcgacatcatttgctcttctcacatacgtggaaaaagtgtagccagtcactttgtcttcgctccatcgcccccacaacggtctgggagtcaagagacagtcgaggtactgccattatgcaaaaggcaaaatgtgtccgtatcttctaacaacgcaattcgaaccagctggtgacgtatggattcccactctgcgcacaacccacggagcaattgagcaaatcagtttatcaaaaggaatagaatgggtgaatcactgaaggcgtcatctgtcggacgatggaatttgtcacacagttcggcatacttgtacttcgttgtctctgatcttcttggaattggggtgctttagctgtatctgggtgatggcgctgtggagcggcaattcaccctagttcttttcgtgcgtgtgcttcaagctcgcttaaaccgtgtaaaacacaatacactagctgaagtctgtgcgttttgtggttatggaaacccagagtccatcgaggcttggttggtcaatatagcactcttccatggaaacatgctatgcgtacgtatggtattaagtgcagccaaggtagaggattatgcaggatgaaacgtaacctaacagagttttctgtatggaagagaagcatcaaactcatcggcacccccttcccgtcctgtctttgggtgaacttgaaaccatgcttagtccatccctgtggtcctctaaatttcttcggccctcgagcgactagttcgctccatctgccctacacggatagtgaccgctccttgtgagagccacacccctccacgcgataatgctggagctttcccgatgtcacagtgatagtatagccgctccagtatcatacataacacccggctgtacacagcaggtacgcgggagcaatcgatcatagttgcatgccgccaggaaaataccgagacgcttaccaattacctccgagggtgtctagcggatgaaaatagtgcccctggcttacctctatgacaacaagggcgcagtgacacaaccagtcacgccaacagaaacaaccctataacttggggggagagggggagaacgcaaaaatgtgtacgatggcaagacgcaccatgaggtagacaaaacgttggttgcggtattaagtaatctttcacacaccaggcccttcagcttcccttgccagagagcaatctggtgaagtgttctggtttttacgaccttgacctggatataaggcgtttcccgaaccttgctgtagcctgcgagtgcatcctactccgttagttgggaaacacaagtacgcatacctctttcaaggttctgcgcttcaggactgcgtgacaagtcgagcgtttccgccggtggctgcatttctgttgtgatggctgcgcgacagaggcaacagtctactcgctggtcagaagctgacagtcactctatggccgacgtggtctagattcaagaagggctgccattcaccgagcaaaatgcacgcgtgtgaagcagatattgccgtttgctgtcgatcaggtatgccgcagggaaggcgcaagaaacgagatggtgatccaccgacatgccgttattagacagtatcttaagctctcattcgcctggcatccgccggacaccccttagtatcgaggcatttgtcaacatgaccgtccagatacctcccggggttctgcaacagaagcacagtgtcttagcagaggattcatcttcgttatagtcttgtggaagaacaggagagaacagaatgcaaacaaatagttttggtgttctcagtgtgtctgaagtctaggacttactgactcaaaccaacacctctacctctgggctaccccgagtaaacgcgaaaccgactgacgaaaagatggcgaggcagcagacccgatttcgatcctcgattccaaacagctgggcgtggggttcacaggttcactacgcgaagagagactaaccttcgggtttgaaggtttctatttctcgtcctgtgtcttctaggccgcttgtgcatcctcttgaagcctcgctacacatcacaaacttagcgttatttaggtttgttgccacagtcggccctcctcccggcaggatgcccgcgggtttcttcacgacccactacgcttcaggttgcagatgttggacgaaacacatacttttcagaccgttgctttgttttgcctgctatctccagcatattttcgtgctataaagttcttctcctgtctgctcctttttttgtcccctggacacgccgtcccctgaggtacgtggcggcgcaaaagaccagaggggcccgcccccccgtctccgtactcttcgatcttcttccttgcggctgtcaccagagcgcggcaaagagagtctttctgcttttctcttcgcaaaaaatcgtctacgttcatggaaggcatttctcttgtctcacattttttcccgtcgtggtcaaacgcgcagacgagaagaatccgcgcacgatgacgccgcgctcagacggttgccgtctgccggcgggagggaatccagactcttagttgtatctttgcagggcgtgacga

SEQ ID NO: 3755 - DNA, 1843 bp, Toxoplasma gondii
  source 1..1843: mol_type = genomic DNA
atacattgaagatctccgataaaggatgactattccaccgcagaagaagcccatcaatatgcttgtctcagagatggtggctccctgtacgatggtactggtcactctagcatctgagtagtcgtgttcagacgatttccattctccttatgtcataaggagcctggttgtctgtatcccgtaaatgggtcaaaatcagtgatgtagatgctttacctatgtggaataagcttcatgtgggaagagaccgaaatccagcgcttttaccggtcttaagcaatccagtgaagttgtggtgtgcagcactcgtaaagaacttggttgtctgcacttcataactggagtgtggctccgaagaaatgacaacaaaggaaatccgtacgttacactcagatcacatctattcgcaaatgcactgccgcacgctaagagagaggaccgcaacgcaggaactgctgggtcttcacggattttcagacgttcgtttccctttttcgcttcagtggtcgcgaaataaccaccagcaaagacaattccatatcgcaattccctttcccgtataagatcgaggaccatttcggtaaaagcggacgtgcctttctatttgtttgcgtcactggcatataatcgcgggagctctgtggatcgcgcttcatgcaagatggaacgaaagaaatctctctttctctgcgcctttcttgtcaggcggagcccggtcttgtgttgttccgtttcctagagggtcgcctctggactgctcccgtttttctagagccaacaagactgataagcgtgtctagcgctgggcgaagcgacatgtttcctacccacttcacttagagatccccgaaaggaagaaatcagtctcgaaaccgacctcaaatgagcaagcaccggagcacctctttgaaacgagcaagggaagaaactccgtcctttaagacacataaacaacgtgacaaacacgcgccggactccagcgaccgaataagccactgtctcgttgttcatttacctcgatcaccccccactgaacttgtgctccatgcggttttgaccctccatttttctgattgctgaaggcttgctcagctgttgtttacgagacggcattgtggcaagacgaagggagccttgttgtcacttgcacccatttcactgggtttcagatgagtctaccaacttccaaggattttgtcacttcctgttgcagccccagtcgcctcttttgccgaccctccactccacagaaggcaaacaaactccttcacttttaaacgaatctcttcagcttaatcttcaccgttactacacctttctgaggaactcccagtccgcgtccccgccgcatgctgccatgtccaacctgatcacgtcctctttgccgagcgatacgggactttccttcagagggccaaggctgcagaaaaagaacagtaatacgattgctggctttctttctcgtaatctttcttgttcctctgctgtgtcttttctcagtcttcttcggtttctcggcttctgaaggcgtctttctcgcgtcgcgcggtcgcccgcaaagtctcaaccaggcgctgcaaacgcgtcgattcacagcgtttcttctgtgggtcgttcgccaggcagacgctatctccgttttcagtcgtctgctccacactgcctcttttctcgctccgctccactggcttttctgtccggatcgaacgaagttctcttcacagaagaaccaacgacgaaactcttgtctcttccccgtggatacctcgcgcctcccgcctggcacatcgactgtgctcacaagaacaagcggtgtctccgcatctccctttcctctccacca

SEQ ID NO: 3756 - DNA, 4906 bp, Toxoplasma gondii
  source 1..4906: mol_type = genomic DNA
taggttcgcggacttacctcctcctcttttctttgcatcttaactgtgacaaaaagccagtagcattcagttgctgcggtgaatacttgttgagttttctcacctgcgggactatctacaccttgcaaaatgtcctcgatgccctggttggaaaacaactgcgtcattttccttaagtcacccgtgagacacttcgttgttttcacagtataaaagatgtcgtactgcatttcagcagagggcttaggtgcattcactacatacacgcctgctccctttatagcatctaaaacgttagcactatccactaaagactggcagatacaagcccgaggcctcttaccggggttcgtgagagcaagttctctaatttgcatcgacagacccgtaagctggaaaaacgggttcgcctgtatggcatccgcgaggcctgtgcaaaccgtgaggatgagctccatcgaccttgtgtttattttagtaagcacaccttttgtcaaagactcaaggcgttccgctaagataatccgttgaggtaaggttcgatcaacaacaatggcaaaggtcatgtacctgctgcattcttcagtggattactggggttaactgaagcgtgcaataagcgcatatacggcactctcctacgaagaagtagaaacattgttaccggcttggttcgcaacggcagcgctggctggaacaggtgctgcctgcatcgctggtggcgataccggcatttgagcagcagcaggggcgccgacagcggctagcaacataagagttgaagcaacagcgttcctcatcctgtaatgcggaggacgacaaatgtagcaatcgtggtcgagaacctgtgcaaagtaatgtcggatcaggggtgggcgtgagcaaccggcacctgccgtgtgccgctgtacctacagctgacaccgaactgggttgcaccagtacaacagagtaattaatagtggataccaatatgtaccgtggtgtctgtgtataattttcaccgctatgcagtggaaactttggtcacaagaacggagcgttcgtatcagtggcagttgcacaggacccgaactggactgtggttgacggcacgctcctgctgttgtagagataccaggacgcttactcatcatactgcacattataatgacaagacggggttccaagccgccacacgtcagcttgaagatgtgccgatctaaataaccgggacgttagcaaaatctagttgtcatttactatattgtgagtcgtcgcggtcctggaagaccctgtacaccggtccccctttgtgagcagctaccgccccatgtggtacattattttctctgctcggaactattgccccatcactcttcagcaacggcgtatactgtacggcatgtccaccgatggacactttagacgtcagagaaggggagccggagtcgtagtagcttctgccagtgtgcacgattcccaggcaaggcacgtgccatcgtcgctgcccgccgtacaccgcgacacccttgtcactgaatattgtcgctaaaaatgacactttaccaaggaaacaagtgagcatcctgcatccagggcggcacttgagtccgtcatttaaactttccagttcacttctggaaacagtggaaaaagtcatgagagtcattgtcgcgtaagactcacggggtaaagaggggaggtgcaggtgtgtgtttttccactgaatgttttgtctgacaattccgcagtctttcccgctagggctgcccagccaatcgtaacactgtctcgattgggcaaagcagttgaactgtcgttcgagagtcccaccaccagtcaagacgcgtcttaaccgcacaccgccatgaaagcggcgacctagtctcaatctgaagtcacctgctgtttctgatgaatcccgcccgacgccactgataccttctgcgtttgaaaaaaccaaggattacaatacgataaatttccattcatgctcagaagcgtttatgtctgccggcaagttagctgagaagcaaagaggctcaaccgcctccctgtcacgccactgtcgcaacgaaagataaaccagccattgaacgtgcagagctagaagccgtatcagaaacgccaaccgatagcctgacgcagccgctaccgccgcgcgggtggtattcgaacagctgtgtcaagtaaactgtcgacgccgttcatgcatgccggaaacgtcagagtatggtacctgggtcagtcacactttggcacaaattccccttttatgtgaaatgcctgctgctgcgaagccctgcagttccattgcttctttggcgtgcaggtggtccagcccaattgaggactctggatatgcaggtgtgtacagaacgcagcacattttgtcatctttccattcccacacagaacactgttggcatacatcaaagcgatgaagttcatcccctcgtccaaccacagcccgatagagctaaccgcgaagtcatcaagtgccttgcacatgattgaagctcatgtccgcgtcaggtccttgtcctccatcgttttgtcaacgtctgcgcgttcggaaactgcgttgttatcctcaacgacgtttccccgcgctgcgttgactgtttaactcctcgtcgccattcgtgccttccgcaccagcgatgcagtcgcttccccccttgtgctcagcgctcgcgcccgtttcttcttcacctccatttgacgcatgtgcctccgtcgctggcagccctttcttcatttccgtcccattcccaggagttatgttgtcttgacagttccctcggccgtgctcattgccaggggcgattcagtgggagcccatgcgtcaccaaacaaagcagatgatgtaaatgccctttgcaaaaccgaatcaccgagtccaacagcgctgtctcccccataaccggcccagagacacttggctccgagttccctgcgcaaaatcttggcgtcaccgctttcggtggatgaaagaacgaccatgtcgtgcctccgtatagaaacaaaacttgatagcagatcgagcagtttggtcacagcgtacgaagcattaattatgtaagctcgtgaccagcttttgcccgcggcatttttcagtgtggtgttcgcaagtttgaacattcgtgataggccactccacaggaagaagattctggaggcagacaagcctttcatatccacaataaacactacgctgtcttctgagtcaatctgtttcacaacttttctccagaacgtctccagcatgaatctcaagaacaacataaattctgtgactctctcttctgatgtcaactcctccaacttccactgccctagaggcaggacaatctgtatgcttcctgtagattctgtgccacaagttcgacggtatacgtgcaccgggcattcttgtatgtatttcgtgaacttcggcctgaagaagtcgaacagatcatcttcccaaaagtcttctgtatcaacatcctcgatatcggccttgacaaatgtgggtcgcgctggaaggtccgttttggagccccaatcctgccgtccgacggcacagcatgctagtagtgccacaactagaaccgcctcagcgacccatcctcctaaaacgcggactcccgtcctctcccgtcggacgactccataaaacgggcaaggtaaatccattgcagaggcgacgataggaaacaacgtaggacgtaaacagtcgagagttgtcgcctctgcggattcgggccgcccttcttggaggttatcctacgaagcacgatgtaccccctttctgccacggtttcgccggtgcttgtgttgcactgcatttacgacggccgctggggggccaaaatcgcttatgtcagagacggatgcatcaagcgctcaaataatccccaaacggtctaccatttcgcctatactgtggcagcgacagtacggagagtgagaatcgaggagcgttggttgaaagaaacgcctctaacatccttctcaagggcggtcgaaacagtccgttgtcgccgctcgcttccagaccgttgtctgcacgcgccggagacgcgatgcttcgcgccttacgacagcttcttcctgtatctgctttgcatgcacagtcggggctgtctgtcattgcatctgatttgcctcagtgacaaaataccaactcaagagcctagatgacaaggaattgatccgtctcattctaaccttttggtacttccatccaatcataacacattgaacttcgcatataagagtccactgccagttagctcctacggtctgacactgtccacgcgcagccacgctcaagcacaagattgacggtgtctcctgctctcctgcatgctgtgcgttccatgggtcgcgtgatgtttttcccgaaatagagtgtgaaagctcgttttccagctggagtgacagaattgtttcttcatcgaagctgtggccgctggtcacatgtctcctgtttcttatgaacagcgtctgattcttaccctgattgcagcgcggcaggaccatcacccttcttgttacttttctagatgttgtggtgtctcctttctgactgactgtatgatatcattgtttctacgggcatcagaccagttgatgagtgtggaagaaggggctattcttcgcgtgtgctgatataaacgtagaaaattgcgactctagttgctctaactcgcaatgtgtagaactggtgggtgacttccagcgaggacgcagtaccatcatggtgctgtaaatcaagcgaattcacaccatgaatcaagcttcctgcacagatatcaacaatgttttgccacgctgggggaggaaatcagtcctcaccacgaacagctgacagttacgcggaatgaagtcgttctgcgactgaggccctttgtcacctatactactgcctcgaggaaaa

SEQ ID NO: 3757 - DNA, 2126 bp, Toxoplasma gondii
  source 1..2126: mol_type = genomic DNA
tacaggtaattcggctccgaatgttatgtgttttatgcagcccgaatgctggcagtccgaaaaagaccgtcgcgctggacctcctaagtgaaggcaactactgccccatcagtggagaattactaggtgtcgcgaggctgaagaggcgccacatgaaaattctcggttggaaatacgtagatgtgcgaaggaagacatggcttaagcttcgcacaagggaagaaaggtgcaacgcgctccgcgatgccattgccactcagattctttgttagatactgcctggctggagttaaacattcagtgacgggtgttgatgcaggagcgtacacagggattcctttaaggaaacactcatactttcctttttgggggtcacgtattatactgccaagtctcgaaaacgatatcttcacgattaagtaagggacaacaagtggaaagatatttggtttatcacgcgagtgagggcggctgcccttccaccatggctgttcccgtattatcgaatgtcttgataaaacaatagcttccgtaatggttgaaattcagtgaaatgacacactcacttttagggtcgctgttgaaggggcatgagtcgagaattcgacgcgcactggtctgtgcagacgaggatggtcatccggtactggatcatcaacgagaaaaactagttgcgtaccctctggcgttattaattagaacgttcttgttcgcgtttgtgccaaagttgcgcacggtcgtgttcggcgaattcacgatgacgtactctgcgtagtcattgtgggaatctggcaggtattgctcccctacgggaaaaattttcaatagctttacggtacccgcggcagaggtcagcacaaaagcgcacctggttgattcacaggaaagacatctgaattgtatacacgtggttcccgagctctgagactgacacttagcacgactgttacccgggacgccttcttcatacatgatttgccgcgcctagaaaaacagtttatgcgtgagcacgagggggagcggtcctgcaagggctcacacaaatctaccttaggagctttaacgtcgagagtgttgacgggatactcctcgtctagaggatgtgccggtggttcacggtccagatttcctctaacaacagagtacgcgcaacattcgctatcaagagaagcggcaagtgccgctgtcacgaaagccaccttcatttttggtgcaaaggctctgtccattgcttgaaggttgtaccactttcggttatgctatgcgccagggacacaacttaactgaagtgagtgtgaaatgtgtcactcaacgttgagctgtatgtaccgagcacggcttgccgttgctgctttgcctcacgcctcatccaccacagcggagtctgcgagactgggccgatccgcgatgcacgaaaagaactgtgaaactgggtagaattgcattaacgaacattcatgagaatctgccgaagagaggcatgcttctatgaggcgaagttatggcaacatgcgtgaagttagcgcctaacatggaaaaccgacgttattgagtgactagaggaacacaacccggctcagcttgggacaggactatttaaaagctttttctgggacattgacagtgctagtttggcacaaccacagaaccggcaacttattttatgattcttattaactggagttggagcacagtgtgttgctagtgctaacatttcaagacaatgtagatcgggagtatcaaaaagcggtgccgatgctacagtgtgccatgccatccgcacccggggattctggctggtaatcttcatcttgttgacaccttgagaaaacaatgatctcttcgacggcattgcttagacagatgtgtcaagcatgaggcacttgtgtgctgcgtccgcggctggcgtggatcgtacatgcgccatggttccatgtggagtgcatgcagcagacggggctaccaaattcctttccgaactcgggtgttcgaatgttctaggatacgcggaattgacatacatgtttgcctgtttgtttcatgtgttgtccgaggatacccactggtgtactggatgcctctagagatgtagtgctaaccgtgcgcaagacatcacggatagcaaa

SEQ ID NO: 3758 - DNA, 2384 bp, Toxoplasma gondii
  source 1..2384: mol_type = genomic DNA
acacatgcaccaaggaattcaggagaactcaaagactgttgtcgccgccctctgcaagtccttcagtccagtcatcagtcgcaaagactcagaatcgaagcaggtgtcgccccggcgtctcatctctcgctctggcgagacgcgcaccgaccggagcttactcgctcgatggcgtccatcaccttcgggctctggaactgcgtgcaccgctgaacggtcgctgcatgcagaaagaacccacagagcacttggccgcatgcaggcgagggcagaaacggaaaaggcgtcctgtggaagtcagagacgaagaggagagtcacagacaggcgctgaagggattgagggaaggaagaagttggcggacagagagcagcgagagcaggactgctcgaaaggtgcagccaagagtcctgacgcgagcttcatgaccgtcacagccgacgaaggcgcgacagagaagacagaaggcagcgagaaggagggagcagcaaacaacacgaaaagtgacgaagggacgagaacctgccgagagggagaacaggtggcgtcagacagaacgcacagctcaaaaaaaaagttaccgacagagcgccactgttggacagagcgccactgttggacagagagacctgtagcacgcaattcgtctgcttccttcgtggttctctacatacacgcgataacctgattgtagagggcgctgatgttgtgaggagagccgagacgctgcaggagcacctgagactcagcaaggtctccggcctctcctccacgcccttggcgccccctcttgagcgcggccggctgcatgctggcgaagaagcgcagcggcagagggcgagaacaggtcgagcgcgcgacaggaagtacggagagaagaaatccgcagcggcagtggaagagagaaggcgagaccgaggaaacgaaaggcgagcagagagcagaagccgagtcgtggcgaggtttggactcgagaattcgcgtctggaaaaggaggacgctctctcgcagaagagggaggacaacagggaaacgcaactcggaggcggagaagtgaagagctgctgcataagaaaatgcgaaaaaatggggatggtttccgttgtgtctctcaaaaaccgaagaagaccgagtcgaaagacaccctgtctctgggagtgcgcgctcgcagctctccctgccccttccgcagacgacagaacgaccgactcgcgctgcacagactctctctggggacgggcagctgaaaagagagggtggaaagaaggagacagcggagatagagagacacaccgagagacgaaggggagagacagcggagaaggcggtcacgagacatctgagcgcatcagcgtgcacggcgcggtgagtctgcgcgcgaaaaccggcgaggcgggaaaaagacacgcactgcagcgcagaaaagaagcgagcaaagagaagcaaacgagtcgaagtgaaaggagaagtccgaatgaaaaagaaagcagctgaacgggacacagaagtgaggcagacaaaaatacgcgaaagtcacacgcagccgttcgctgtgttccggcaacaacgcgcgcgcgttcggaaaagctgtctctgcttcttccatcttgttcagcgacctctccattgcacccttttatttacatgtgtgttgtctatgtgagtttctctccttgctttctgtgtccaacagctctcctgcttctcgccgggtcgcgcttccactcggagtggcagatcgggtgtacatacacacctgcctctgagttctgcgggcgactctcaggaacgagagccctcggagtcgcttcgtcctctttcctccagtttcctcattcccttgactcgagccaggacaccgttttctggtgcttttcagtgtcgaacgcggactcctccgctgtagcgcggctcggcggaagcgacggcggcgcgcgaggaggctgccgagcggaagaggacagccgctacgtggaggaggagaagagccagtggagaggagaagaaggctgagcaccgagggggcgaggccccccgtgtggagagaagaagcggaaacggggagaagagacagaaaagaagaaacgtcactgtcagggcgcagacggcatggcgagggaactgtctgtcgccgacgccagacactgagaagagagagaagacttggatgagtgccctaggcctttgtcgagcgacctcaacgagaaagattggggcggagttcaggaagtagacatcagccaccacgcattttccttctctgtgtctctctccgctgtcctgaggaccagcaagaccagcaagagaccctcttcttctcccatgcgcactctctgcctcttttctcgcagctaagagagcagtactgctcgaaaagagcgaaa

SEQ ID NO: 3759 - DNA, 2832 bp, Toxoplasma gondii
  source 1..2832: mol_type = genomic DNA
gttcatgattcaagagatgtgaagattctcagtgtctatccgtcgggccatcccgatcctcacatgcgaggattctttttgtcaaccagaacagttgtcttggcagctcggttgacttcgcgggagctgcacatagaagactccgtttgtttttcgaagcgggacaaccaagtcaaaacgcgtgctgtcacagctggcgaacccgtttcgttgaaaacgagaatcggaaacacaagtcaaggctggagcgtttcgatccacaccaggttcacccttgtagccaggaaacaaacacacgccacgacttcacaagaccacaacaacacaccttcctagtcttgctttctgatcagtttggtcccctcgtgaacaagcattcagagtcctaacttcatgtggacagacatcactattttagctcggtacgtgcagcatatcaagacgaaaatacaaatcaactgagttaactaatacatgtttaaaggggtgtactcacttgcccatcaacgcgtgacggcgaactctttttccccactcagtttttgttattttcaaaaactgaaatggcgtgaacttgaggccaaggctgtgtggaggcaaaccataggcgaggaggggcatacatgcacacggctatacgcctacagggtctaccgtcagaggaaagaacttccatgtatgcttatatattcatttatgcatatatatgtagcaaatgtgtgtatctatataccgtcggccacagacagtccccctatgtggcggggatattgtatgaaacacgttcagctcaagagagtagaatgttacagaatcatgtcggtgagacggagacactcgcagctgcacaccgcccctgagaaagtcgatatctgtcagaagtgtagttctacgtcatctacgtcaaaggatagatacagctgcgggcgtggaagatgctacgcacgccggggcttctgtcctgtccttgtaaaggcaagtttgccttggttgagctgagctatcgtttgcgttcatcgttctgaaaccgttgcatgtgctcggatttacgcttttccagccagaaggatccccgattatcaacaactaaggtatggggcataagggagcctcgctggtatggcggcggctcaagtttcatgtagtgcgggtgacgattctggcaggctgttgaatctaaaaatgtattagcatacctcgggcgtgtctttgcgaggacaatttagtattacacttgccaaaaagtgccatgggactgttcagccgttctcttcgctttgtccagagccattccaccagcgagatacacggaagcgccagcgcgttgtctctagggtggacttcgattatatatgaactgcgtggattcctctaaatacagacacatcggatacacagagaaacagacttgtaaactccctctccgtgcaaggaaacctatgcacggattcttcgccgagtgtattgagtctgcatgcacacgtccatgttgcgggttttgactctagacacacacagccttttgtgccaggatgtagccaccgagtaacatctgttttcactgggcttgtctttgctcatatttcatctggtctcagctggtgacggactggctttccgctttcttaattggaccatccaagcatctcgaggcggcggtacaagccggcacacgctgtcggtaaagagtctatggcttgcaagcgtgcgttggggcacaactgtcacttttctgcgtgttttttgccacgtgtctctcagttttgccttctttgttgcttgctgtctcaacctcgcgaatgctgagagtgtccggctcaatgctgtgaagcgacctcgcatgattactgtggcaagcgacagttcccgccgtgtgtctcgttttcgtgcgacgtcgttctgaatcgcttcccgtttggtgtgcccgcctcagctttttagctggcttatttgacttttcctttccttcaccagttgtagttacggccgtataattgtagaagcgccataaaatccgaacctgacgcaacgacagcgtttgacttggcgcggtacggactttgccttctatcggtgtgttgactaaaatgcccaaaacacaagcctccagaaggacggagacggaaacgaaggtggatccgggaatgttctgcacctcacagaccgtacaaaaagccacactgaaggaaatagcggaatgaacgggagggtatctgctcacgaggcgctaatgcgttgagtcacgcgcacacaaatacataggtagttctgtgtatgtcaagtatataaatacaccttcacgaagttggctaacgggtgtggcaacgccgacatcattagtgctgtctggagtgaatcgacctatcgtttgcagcctatcgttcagcatcgtctacccaatcacctcaacacctgcttccacatttctgttcttgtactgcagtatctgctttttgacccggtctccctgcttcgtatgaaggttgtttcgcagtgcctccacgtgtaatgctgttcccttgcagttctgcctctgagatgcatgcttttccaaatactgctcgtcatttttctcactttcacatggccgtgtttcctacacgtctgtgctctcgccttaattttttgtgacccttccacactttttagctttttccactgccatgccatgccgtacatctagcagtctatcgacagtatcggccgcacgcatttttgccgtccgcgtttctcccctctgcctccgtgccgtttgcccctttgccccccctccgcgtatcttcgcttattccccctccactctccccgtccctaccctatagtcgatcagga

SEQ ID NO: 3760 - DNA, 2624 bp, Toxoplasma gondii
  source 1..2624: mol_type = genomic DNA
ctcatcctcattggaggtgttttcatcgtcttgagcacattgctctcttttctccgccggtgttttccgttggcccgtgaaaaagtcttgtttcgtggtgtgtcctgcgccggtgatgctcgtcagtgcccgctcgagtgaaggcgtgctggcgagtctcgcgagcatgtcgcgtacacgatctgaggcatcgctctgcgcgagagaattggttcgttgcgcgtcttccccaccttccgtctgagacggagacactggagagctgtcaccactgctacccccgcccaaactctggttgtctcctgtgtctgtccgtttcaccggcaaacctttttcatcagcagaggacgaagacaactcattcctcaccgaggtgccagcgccactgctttcgtccttggatgcggatggagctgctctgtcctcgaaagtcttgtccgttgctgtcgcactgcaggcgaccccgctttgtttgaccgcggaactagactccttcccaacattttctttctgtgcctccccgccttcgctagtgttttcagtctgtgtaccttctattttagcggcattcgcgctggggttgtcagctgaggaagcgacttccacagctttctccgctgtttcgtcttgccacggtaaccaagtctgcgtagcggtatcgaagtaccaccactgatccgcggacgaatcatagtaatattgaacgttgtcctgctccatctttcctgatcagtttcaagagagccgtcaaacgccaaaaaagaaacacggggctcgttttccctttactcacgttcgcactgagctcaccatcttgaggcaccgatagcgcgacagaactacctgcaggcgtacaactcgtttgttgcttggacgcgcgctccagatactggtaccggcgcgtactttccaacaactccaaaacgaatcggctactacagtgaaacacttgatcttgttcggcgccacgaagtggcttagaagttgagttccctccgctggcaggctgcgtccaattgcgtaggggggaaggggacaaatattgtctaggtctgtactatgctttaactggacacgcataggttgcttttaatggcatattctggatataaggtccctatccatgaaaaagaaaaatcgttcgacacaacttcccctgcgggacacgcatgcgatggagctagaatgaagaaggcctctcaatgtttcgcgatcgaagcgccacactaaccgtcagccattaaaggagttgaggaagtcatactcaaagaagaagtgtattttgaaaaaaggacgttcccccggatgaattaaagaatgccgcagcagtgaatgcgccacctacacttggaaccgcagggcgcagtgctcttccgccgccacggcagcttcgtcgaagcacttagggaacaagatgccgtttggaaggagtttctccgcaaaacattgtaattgccgtgcaatatctattgaattgagtcgctggttgcgcagcacgccccataagaaatggaaaaagtgtctttcaggatttaaaacatccaaagcacacacataaaacagcggccgggtaccgtggtacgtgccaaaggtcggtggtggctagacaagttgcatgtatggttcttctttggcatcggacagggaatgcgactagaacagccaaccaagaaaacattttacagaaggatcggtgatggatataattacggtgagggagagttcgacagggccagtgcctctctttgcgcgttcgaccagcgagcggcacggtcacgggcttgcttgcctgctagtgcggggttcaaatggatgttggcactttttgctcagcatactacagtagataaccccgaattcgacacagagccacaatacatttctctgctttgtagtttttgtactaacgtattaattgtagccgtatggggaaggaagacaggtcgtgtttcctgctgcagtggacgaactctgcgaatgggagcagtgctctactacactcaggttgttcaacactacgtagaaaatgtcccttgtctctcgtgatgcacggatgtctcgttacggaatgccgagtcattgggaaatggagagctcttatgtcaagattaaaaaccatgagacgacggcgcccctcgtagctcttcgacccaaaggacactgtctacaggacagagaggtggcttttcgttgtagctccgcggatttgtagctgcagtagtcgagtagaacatcagacagatgaagctggtgatctgcacaaaggaaggcgacttcatattcggcacaccaacttttcttccgatctactttttgtggagagctgacacgggaggtggggggagccactgaaacgcagctacggtaaacaattcatttattcgggtgcgttcctttttggctttttttctcgtatcacattactctgaagtataagcctttgccaattggtgtggaatatgtatcacttacatctgcacagaaaattttgaatatccggatctcctcaccagggattcctcccctaactgcctctcctggctctcgagcagaaccactgaacgactgcctgtaacggctctgcgtttcttaccgctttgttctttgattttatacaacagtaa

SEQ ID NO: 3761 - DNA, 1772 bp, Toxoplasma gondii
  source 1..1772: mol_type = genomic DNA
gagacgcctggtcaactcgtttctctctccagccaacagaaagcgacatcccggagcacgagagagccgtcagatgaagcgcccgagacgtgaatagccacgcatgttccccgaagagaacagaaagcctcacctcagaggcaccgccagctgtgtgccgagaagattgtcttgatggtcacagaactgaatcaccacctccttgttgaccccagagcctgggctcgcgacctcgcccccctgttgcttggcgcgcttcgcaggcggcgccgagacctcctcggcgagatgcatggtgaacagaatgaaggtaaagagagagaactgccgaggaaggagagagctgctgaaaagagggaacgccagtggagacctcagcgcaaaggccgaaactgcgttggcgttcctcagcaacgaaaaaggaacagtagaagaagaagcacaagaagaagagcaagcagtacaagcgggagagcagggagaagaacaagcaagagagcacgagagagaagaagaaacaaaagaagaagaagaagaaggacgagcgagagactaggagagagaacaagagaaagaagaacaagagaaagaagaacaaaggaaggggtggcctagatcttggttcttcagctgtttagacggggcaggttttcacggcttttcaggctaggagagatcgaagtatttcaacagacacaccaccgacggtcaccagaaaacagatggacgaaaaggaaaggagaaacaaagatcggggagacgaggaaaaacaattcgcgaacggaaataagcgaagacaagtcgagcagttccggggcctctccgacttggtgccgtagatggaaacgccctcaaagcatagcgaaatgggagagggcggggcgtcttctttcttaatggacaaaaagcttttttcttaaactggggaaaacagactccctgcgggtctttcgcgagttgagtcgcccgtgggatggcgcgagggacatgcgcagcagagacggccgacaaaggagaggatgtcttcaatctcctcgacaggagacagaaagacttttttttgacatctggtcgtttccagaatggttcgttggcgttcttcctttttcgcgagaggcaaatcgcgctatatggacgtcgtagtttcccgtgcatgcagatttctttttcagccgcatgcaatgaatactcgcgacgaactcgagaagcacaaaaaagaagaatgtggattaagacgtctttttcgggatttcagtgactcgcttccatagctggtatttgttgtgccgtttgtgcatgttctgtcttggagacaggttctttaactcctcgggcatttgtgcagccgcggattctcctcgacaccgttctctctataacgaggcgtttcgtctcccttttttccaacaccacttgcatgtactgtccttttcttttgtctccgtcacctcgttcatgtttcccccctgtcctttctcttttgagtccggtttttcactcttctcgccaccacccgttcgtcgagtatgccgctgccccggcctccaagcctagactcttctgcccttttctccagcagtcgcgcgccctcgcctttcgccttgccttccatcttctgccgatattcagtccagaccctgcgtccatgttgacaaaggtggtgttcagtctctcctctcctcttgctgtctgtttctcttcgaaaccctctgacgttcgtgcatgcggagaaacctgttagcttcgtctacaaaaagcttcgcatccaataa

SEQ ID NO: 3762 - DNA, 1700 bp, Toxoplasma gondii
  source 1..1700: mol_type = genomic DNA
tgagttgaggtatccgacccagactttgacctggaaagggtctctctgcagctcttgttcgtagacaatgtctgtctcctttgtgacgaaattgaattcgtcgagagacaccgaagcctctccacctgcaacggcctcgctggaggatgcgtggtgagacgaggcgccttcgtcaggcgccgtcgcgacggctggcggcatcctgctttcgggggatctctgtgaatgttcaacgtcaagttgcagaagacttgcgcgaaaagcgctcgcgcctttcttcgaggttcttctgccgtcagtccgagaacagagacagacacgaggagaggaaaaggagaagaagaagaagacgcagcagagaagaagaacgaaggagaccacagaggggagaagagagcaagacctcgtggaaggacgactgcgttttctccacaagacagcaggcgaggcaggccaagcaagaaaagagacgaaagaaagacttctgcgagtacaaagccgaggaaactgcagaaaacgaaactttgtcaaagaggattgaaggctttacagagagagacagctttccgctgcactccaggagaggcgaaggggtgcaacgaggataaaatgcgaagcagaaaggaggaagcagcgaaacaagaggaactgagggagcaaggagacgaaaagcgagaagcaaagaacgagggaaaacgaaggcgagcacagacgaaaagaagaacgaagagacgaccacgacgttaaagccgcagcagtgtttctcctcgctcgcctgttttcttccgaagaaaaaggcgagaggtttgttttaaaccttatgaagaaaaaggagagagttttgttttaaaagggagaaaaattcacaagttcctactaaatcccccactcgtcagtttgtggtcctccagagatgaggagggaaagcagtccgacaccgtcgaagaagaaatcgctttcgccaattttcttccgtcgacctccgacatgtctcgtctccccctcatcgcattgctgcttctcgctagaagagcagcagaaagagaaagtaaatcttttctccaaaaagagctgcattcgtatcgggttcgttttttctcgacaaggcatgcgcgcttgtgtccgccgccctcgcgcggcctcgcgcgccctcgcgcagatgcgagaaaagtggaaaaagtcctgtgtttcagaaagatacagtcttcctctgttcttccgttcaccgcgcattcagctctctttcttctgagacgttctgtcctccgtcttttctgccttctgcttgcttgccatggccgtacctctcacacgacaagctcctgtctctcctcaacctgctctttctgggtcgtagaaagacatacatgcatatacagtcaaaacaggatacacactatggagacttgtggatactttctatgtgaaaatgcgcacttgtgcggaggtgtatcggtcaatcgacaaaatgacctacacaagacggtgtcaacagatacgtagtgaatcgacagacagacataacgccatacatgcttttgttgcctgcatcgttatgcacaatttatccagatttatccatatttatatgtatttatccataattttccacatttatccataattatacatatgtatatatgtatatgtgtatacatttacatacataaataaataaatatatatatatatatacacta

SEQ ID NO: 3763 - DNA, 3545 bp, Toxoplasma gondii
  source 1..3545: mol_type = genomic DNA
ttcgcagacacgacagcggaacgttcttttcgaatggtgctctcgggggctgcgttcactctaaaactcttcacagtgtctcctctctctccacactaatgctttctgttcatgcaagcttgttttccagttcgcggtttgtgattttctcttgtttttcttctttctcggttcagacacgtgtctctgacgccggttcaaaaaagtttccgaggtgcgtgggaccaagaaaaacagcaaaaaagcctaattaggctgcttgacaatatgtttctctcgtcatcacttcgagtgccatgagacctgcatgtttctacacggaagatagaatcggtttggaaagcctgaacatgcgtggtaagagaagtccgcattaccacgcctagaacctatgcttaaagtgcatgaagttgactgtccactgcgtttacttgtttacttccctaataactggttgtcggtgaggataactcgccgatcatttcttgtagtttagagatttttattgcaggagcttgcgctttggtgtgttatttttcgagttacttcttgtcgctttcgaagaatcacacggagcgaagcgtgagaaccatgtagcaaaccaacagatgtgagcagcaacgaaaagggaagaactgttcagatcagagggatttccggaactgataatagagcgcatttcccgagggattttacggcgtgcggatgtccttctcgagaagcaagcgccttgtttgactagcgtcgtttccttttactcactgaaagtttgcgagtgccgttttctcttgttcagcatttctctcggtcctctctctgtgaaagcgcctggaggcgtcggagaaactttctcctccgagcatccaccgctaccacaaacgcaccgcgaaagatcggaagcacaggaaaccgagagagcagccggtcgtgtgtttcctatctcgcacgttaaagaagaaatgcggagccgagtttatccagatcagagttttgcttcgcaggggacatgtgggcagcagcgggaacaaaccctacagagcacacctatcgacgacacctcattgttaatcgaagatttagaaggtgtagaggattccgacgcatttcagaaacctcaagaactctttcgggactcaggcggcactgggaatgcctttgtatcagacgcgcaaattttatcttgtcgttctgtttcaactagcgatggtgatcgggaaagaaactcacgggaaagcgcactgacatgcaaaacgaccttttctggcatggcgtctgcgacagatggagcagaaaaaggtgcctctcttcgcgaaagagagtcgaactcggagggttcggtttcctctgtctccgttagaaaatgtagtcgaggagagactggcatagatgcgggtggggaaggcactgacctcttttccagagacgacggcgaagaaaatggggtggcattttttgaggaactgagcaaagcagaacgtcaagcgcttgggccgccaacgccagccgaaattgcggacagagaagcgcacgctgatgcgcgggacagaaccgtcggtggagaatcggatatccgagcaagtgtcgacactgcgactttctcttcaactgcacacctggacgatttgctagatattctcttagaagaaccagacgccgatgggtcgtaatttgtgttttgatagagccggagtcattcccccccccaaaagtgatggcgcctgaaggtgtaaaacctaatgtggctgctggggtgcgtttggaaaatgcagttctgtccaggtccgagtgcctgggcatcaaatgtgtctcagttcatctcttgtttctagaaactgctctaaaccgcgtcaggaacttcccttttcttctggaaaggtactttttctcttgcaaatgtcgaagagactgagagccgatgcggccagactgtaagagcattcacgcacttaacaactgtgactgctgctcctacaggccccgagatcgttgcttgttttccgagaactcaaggacgccaggttgccgtaccctcttgggttcgctgcattcgcttgcttcggaatcctctcacttacaagggaagcacataacgaaaaatctgagtgaaagtagtccagcttttaccgaaagtctgtcacgttgaatgtgagatgaatcgaaatgctaacttcagtgagaggtgaacaaagactttcaagatctaaacccagggtctagcttcacgtgtcgcttaggtggcatcgagaacatcgagcatcacgacagagacatcatgttgcactgtccgccagcaacctgtgcagcttagttgacacgaaaatatgctccttcgatgcaaactcgtcggctgacttttctgactcgtcaaattggaccaggttcggtagtccgtactggtcaagtggaacgttcgcggaacgctgagagcatgcagacgaaaactgctccgactgcgcaacaaccaagtttcagatatcttctctagtccttgctgaatgtaacactgaagatctgtgtgcaaatttgtgcttctgcggaagaagagaaatttccggaaagtcagtacgggtatcacttaaaccagctctgaggatcggtttctgccacccttcactatgggcgttactcggttcagcagcaagcatgagacttcctccgagacaggaaacacatccttccatcaaactctgaaataaaaaatctcccgatttccaccaaaacgtgtctcgcgacgcgtggcgcggattccgactccgcgaaacacgcaagagggtcgagtaaagttcgttacaggtaaaaaggaaattacaatcctggaaaacgcctttccaactattcaaagctatattggagacattctgaagaaagtaggaggctcactttcttttctggttggccagtttctagaaaaccaccacccacgccgattctgtcttcaaatgtcccagtgtccgttggctaggcggcgtggcgacagctgccaggtgcttcatttgctattcgttccctgtctttgaatttgagagaaccttccgcacaaacttttccactctctacggagaagacatgcactggtgctattcgcaggctcttgagtgtgtcgcagattctcgtttttcagctcctgaacggccctcccgcagaaccctacgtcgtgcatcgactagcttcagcgtgtggaactcggactcgagagattgtctttcgcaaagctgcaacggaaaagcccttcctgcagcgaagtaaagtgaaaagtgatgccttaatccagttctggtcttcgttttgggattgtttctcgatttgcggtgaatgtcgcatctctggccacattcttgcttacgtttcgcgtatatacgcaaacactccgggattcgagcaatcttttctcccgatggggtcgaggcgtgtcttgcactttcctttgatgtgcgcaccgccagtttccgacaagatttgttaaaagcgaccgctttccacccgcgaatctccttcctttctccatttttgtctttcttaccagcaaaagaggatctcacgggaga

SEQ ID NO: 3764 - DNA, 2034 bp, Toxoplasma gondii
  source 1..2034: mol_type = genomic DNA
aagactgtagcaaactgcagtcacgatcctggcacttgccaaagcttctcctgccctccgtcccacacgattgaaaacgtgtgcagtgagagtgcaaaggatagcgcgtgtgtgttgactaagacttctcacagctttcttgcgttgagatacggaaaaagctttctttattcctgcgttaagtgtgtgctgttgtccagggcaaaggcgatggtgtgtgtctatctgtatttcgatggactggagatgccactaaataacacgtagagtgcggcacgtgtcctgtcggctcctactcagttcaagatccgaaacaccttatgtgctctatctcggccacccagaaagcttacttcaaaatctctctgtgcccccagagacgcaccgtcccgatgctgcacaggcagatggaaactggcgacacatcctactgtacgcggatgacgtcaaagacttcgagacagtgagaaaaagtcattttacgtcacgtcgaggagaaatctctgaacctgtgtggactggtgacgccaggctcctgacgtttgcttcatcgagctgttctggcagtagcaaagaccgaataccggaagggtgcacgcacccacatttaaaggttgccagcgttgtgacggagcatgacctgtatacacagcagatgagtgataagaatgtccgcgcaccgcctggacagggttccagaggatgaaggtggtgaatcagttttggccgtggctacgggatggttacgccacagaactaattatgctctacgaagcactgcgttatttagaggcgcctggttcctaatacaaaaacaacacacagataagacgcactgcaaccgtctaagatggatcgaaactcgaagatggcaagacaccttttttttcacgagttggaagcgctcctctgactcaccgcaccgcagtcttaacggacaagattttcgcagaatggccaaactttaacttccaccgactccagtccagcctgttccgttgttgctacacgaaaatgcaaagcaagaacttgggggacttcctcgacgagggaggaacctctaattcgccttccgcaaagatccgttcaagcagcgagacaggcgcatgcaaagtttgtgcgactcaccgtccagcgtgttcacatttccaccagcagctacagctgctagtgtgataaagaagacttaacttgccatacaacaatgctggaaacataaacagttccgctatggctaagggaaaacaatccgcgatgtggacccgccgaaagctgtgttctgtaggttggacagaaaatttaacggcgatgcatgcgttcgagaccccaagaggacgtcaagaactgtagttcttagaaccgttcttgcacgttctacaattctatcttctttcttttccctgtaacccctcctggctgtgagcagccgcttttctcagcagtttctcccagaaatggaggaaaactgtttggttaacggagtcacggcgtagttttccagtctcgtcggcgggtctgtgttttcgggaacttttcgtttttggcagatttaggggattctctgtttttttttcgtgagtcattcacctgagaacttcattcgcctggaagatctgtacatgtcctccagtatcggctcctgtaccgtaaaaatccctagcaacgctagctcgcgttcgattttcccccgccacccaaacggggttggaatcctacttccttcgcccatttatagttcccccgtttttttgagggccttcaagtgaccgtacattattgggcggttgactgcagttctgcagacctaggccaccgacaccggcgtatcggatctgtgcgcgtacattccttccgcgtatccgcgttctctttggaaagactcagcgctaccttttgtctgagcgtcgactcgtgagagaaggctgcacttcttcattccggcgccacgaccagaccgtgcacagttgccggtttccttttcacttttcacttgccgagagattgtttgttttctatctgagagcttcccagtca

SEQ ID NO: 3765 - DNA, 5036 bp, Toxoplasma gondii
  source 1..5036: mol_type = genomic DNA
ttcgattttgcatgtgtctctcctttgcagagcgaagcggcgcaagcccctgcacaggtgtcctcggatgccgccaaaggtgccccgacgaactgaacgggtgtgtggagactggggaaagtgggccgcatataagccgaaagcaacacatagagtcgtctgtggaagagactgttcgtccacgtggattcgcgcgaggtggttttcgcggcggaacgtagtgtcgagcattttaaattgggtagacttcgactctgttctgcgctcctgaagcaaatgtagtgtttgagtggggcggtcctgcgccaggcacacgacaaaagtccgtttaacagtctgtttgctgccgtagtcacagattgctctcaaacacgcagacataatgtgtgagtgtacactacagaagtgcacacacacacctatgtgcagttgtatagaataggcatgtacgcataggtgtacacatcagaaaaaccttgcccgaggcggcgctgtccagaaagacagacaggatgcagaaaaggtcaggcggtggtaacaattatctagtatcctctcttgtctcaagcgaacttttgattcgtttcctgttgagacccaaacaaggcgagtacggaaatgtgcgcgtttctgaaagaacgggaaccggcggtcatcgcgtgcgtccggttttttgagatttcgcgaaatgtgccaggcaaacagagctagcccgtgaagccgttgttggaactttaaactgtcaacttgctgtcgagtgcgcattgtgtgagcatcgatacttcctagctggaacggaacgctatcgcgtacggcatgccgggacatcagaacatccgagaaacgaggtgtcgctgcaggacggttgcatacttgattcagtttttctattcgaaagaaaccctgtcgaacaaaacttgcaaaattttccgtcccaccgaaacagcacgcgaactgcacacaggaaataaccttcgtctttaaaacgtgcgccgaaaatcgcagttcctcttaaaaactgacacggattatgcacacagaaaagctcaaactgcccatactcagacaagttccgtgagacgaactcggtcactggtcaacccgaaacaaatgccgagtgtagtaaaggagttcgtcgatgctttcatgtatgtcttcgagtgcgcggtggttggccgccttcttgaccagtggcaactcgggtttccaccgcatcgcgagttcctttatggtggacacatcgattattcggtagctgagatgtgctatgagtcggggcatctgtttcacgagaaactgcctgtctacgtgcacgctgttcccacctagcggggcgacgcgcgtcgtcgcgacgtgtttctgtacgaattccagaatttgctcctcagcatctgcgagagtcagagtcgacttccggcaggctgcagttagccctgactccccgtgggtctttttgcaccattcatccattccatctagaagttcgtcactggcgtgcacaattaggttcggtccaacgatgcgttttttgcactggccgtccgtcacaatgaccgcgatttcgattatttggtctgtttccacgtccagtccagtcatctcacagtcaacccaaacgatgggagcctgcagggtctcctcatcttcagttatcgtaacagctgttcggatgggggctatgcggtttgcatcctcgctcgagacgctcttgaagcgcgcgggtgcctccatcatgccctccatctctgctgaagcgaactgtgaatgaagtgagtgaaagtggaggtcgcacccggtcaacaaggaaagccccaatttgtcgactcttcgtgaatgggcgccgctgctcgcagtgaggagtgcgggagtgttttggtgatagttcactcgtctcccgtggcagggatcgtgaaactctgttctggtggaaacgctcttgagcgacgcttggtagagaacaggcttttcctcgaaggtggtaaaaaacacaccgccgcagcgtttgctccactgcgaccaattcacttgaaacgaattcgtcctacgcggtccagacaagcagcgccctaactcacccgcgacgcagtcttgtgagcggatgctccgactgtcccacgcacacaatggatgctttaacagcaccgttgatgtcttgctcaaaggtgggtgggaaaatctggggaacaaacgcattccaagctatctcggggaagaccagtgactgcgaagcactgtgtgcaagtctcccccaagcaacttgcatggaaagctgaagccagtggaagtttcagcctttgctggggctcttttttgggacaatatccgatccttacgggtgaaccgtgttttagccgcccgcgaggtcggacacactgcgagaaacaacacccactttcaggacatgatgcaagaactgtagctgcccttagcgtgttttcatcccttctgaaaaccacaccagtccacgacaggagagatgcgacgctacacacggacaagtggcgacgcacacactcgacaagttccaaatgcgaagaatcgtgtgcgcggacaaagagccgaaagttgactgctgtttctgctgcagttagcacgaagtcgaaaacagaagcaagggatacacacacttgaactcgagaagacctgtcaaattttctcggagtttctcaaccctgcaaacttgcgtggggccgggtcgttagattcccccgctgtgcaacactgcgtgcacccgcagtcgacaaaattccagaacgcgcagaaatccagtttcactatcactctccctccaaacggcaaatacgacaatgtccattcatggtgacaatcgaggggaggagagtggtcgtcgagtgccaccgttgattcaacagccggcgctgcatgcgtattccttgaatccctggaaattgagatacacccggggtgacctggcctcggtgaattcccaattcggcttggtcacacgtggctcctaaaatttttcgctacccttcgcttcatagcataagtcagctcttctctgcgggatactgcatccttgtgtttgcactagcataactgctgatgtcctctgcacgacgattcgaagttggaatcattcctgaatgtgtcgagaattcccgcctatgcagaccctgtttgtaatttcctaaagcgaagtaaagtgtagacgaacggactccgttgttttgtgatttgtatccttgagaaactgtcaagagcggagagagtcggggagacggtgacacttgttcccaagtttccgttccagcatgacaactctgtggaaagtgcttttcaactaccgcatcctttacttggggtgcagccggtgcaattgataaaggtactccgcatttgctgaggaagcatctgtagttcctgtcgatctcagaatatggcgtgctgcacagcggtgtgtcttctcattacattgttttcttgggggttgggaaacgcgtcttcatgtgtttagagggaaccccccccccagcaatcaactagcgagtggcacatacccaagcgatcgatccgaacacgggaccgcgtctgcttcttagcaaagacggcccaccatgcctgttacaagtaccaatctgtcggccacgtttatgaagctgtcggggcgtctccatatgaactgccacatttctggcaccccgaatgtcgccaacgagtctcaccgacctcccgccgctcagggaaagatagcttatctcccttatggacgaaagtatgaagattttactctgtgagccggtaaaaagccaaagttttctagggggaatgacgtgcaataaagtagtgacatccggatccgtgttctctcttgtcacgcctccggtgcgtcatgtgcacgcgacacctgaacttgacaaacaatagattcaggaacattgttccgaatatatctgagcaaccttagtggctgaaaatgcacgattcagaaggtaccgggcaatcccctcgtctgtgtgatgaggtcggacgccggcgtccgagacaccgtgtgggtgtttcggcttttcctgtgccgtagtgaacaagcacgaacaggcgttttgcctccaccacttgcgatctcgattgatgaatgtcacaagggtactgaagcttcttgcatacacgtccctaaacagagcaaccgcaactccttcacttgcacgatccgaagcatggcaagttccaattttcttctacaggattttgcctggcacatgtttcgtcgttaagcagaaagtggattggacatgctcttcgttgcctcggatgaacacgtgagttgcgggaacgcggaagggagctcaaaatggtgagacgtgacgtgtgccgaaatatcgcgagcgtactagcgagaaagccacgccgagccgacctccctgttcggcaggaggcactgcctcccccgggcgcatgcagagataaagaaaatagccgcaacgccgagaggagaaacggatttgcctggaaagacgtggttcttgtccgttgaaaggtagcggagacactaccacaatttttgtgacgcgtgtttctgttgaggtgtccttgtctttcacgtgaattcctatctgttgcgcgccgaccttttcgcgcgtgcgtcccgcctctcttttcgtcctggctcttggctctggcacagcgtccgttctgcgtctcctgtctcgtgaattcgtcttcggtttccccgaaaaagttccgttcctcactcctgtttgtttccagagttcgcggtccacagacagcctgaaatcgttcgactatttgctcctgctcctccccaccacgcgtctcccaacttgcgccctgctcgtctggtgttttcgagttcctgttcccaccaccgcaaaactttttcccatctacagaactctgtgcttactcgtcgcctcacggttcactctgtgtctgagcccccccctttagctggcgcgccgtgcctaaccacagcggttctcatacggctttcttgccgcagaactaacgattgagcgggagctccattcgcttttcacctcaccatttcgccgcaa

SEQ ID NO: 3766 - DNA, 1788 bp, Toxoplasma gondii
  source 1..1788: mol_type = genomic DNA
tccgtatgcttcgattttcagaagaataggcttaccgcctttccctgcaccacccaggagacctaccaagaccactcttttgatcaagaactcggcagcgtccatagatctgatgatttatgttgacgtatttgatgacgacggcttcatcgactgttgtgaaagtaagcaatgcgttcatgccatcttccgtctggacgtatttctgtcgccctaatattccgatgccttgaactgctcacacacatgctgcagggttctacgacaggaacgtcgcggtcttcgagattgccggtgtgaacgtcaaatttgggctattctctactttgcggaaggatgtgggggatgactcaaagatctccgaacaaattgttattcgtgcaaacagaataacaactgaggaggtcttttcaggcgtcccagccgttattgctagggaggacgccatcatggtaagatggatcaaggcgaactagagatctggccagtccgcacggggacgcccagaaaactacgtaaacaagctcaaggttatggtgtaccgcgcctttgttttgaattagaaatctaaaacgtgattctgtcgaaaacaatatgtttttgatgatgcaggcacagtttttgacacggaagacgattgattttaacatagacttgggcaggcacatggcgataaagcgctgttccgatatgctgaaaggagatcggagcgctcgatcacctgtgttagccagctgcgtccgatttaaatatcatagacaagattttgtgttctaggcagtatgaaacaacgtatgttttaccacacttcttgagttgattaatcatgtagttaccaacatgacgacgtttgctgctaaggtcaaactgtgaagacggtcgaagctcgtgcctttctgtggacttgaacgaatttcgaatcttctttctccggtatatgccctgtgtgaaacagacaaactcagaaacggtggcgaagcaggctgggacagccagagacattgtgtatttccagtgcctggacgagtgccgcgtcagcaaccagatcttcaagaacacaaaagggtacaaatatgtccaggtgactcgcgagctccctcctaacagaaacatgtcttgaagaaaacggagcgaaatgtcgttgccgcccctgacctagaagcttgtggctgttgaccactctgtagtctgtgtgattcggttcctttgcatgcatgcaacgttggcaacaaattcaacttccttgtccgttgccaccgtgggttcgttcacggcgtgtttagatggttcagtgaaataccagaggtgacgcagtgtaatttgtttccccgtccgcagtggcgtgtcattctcgtggtgaaacaatatctcaacagacccatttcccgttatcgcgagcaactgcaatgcacatctgcatgcatggcaatcttctaaggacggaacatcgcggtcatcgaagcccccaatgtcgttctagtcgcatttcatgcaacaccacaaagcgaagcgtctcagaaacttgttagaaaagcgggactgtatcctgaacagaggaccgccctatggctccgtcgtcattgtccagctttcaagtcgtaatgaacagctagaccgtctccaaggaatctccaacaagagatctcgaagaaagttgcacgttgaggtgcttgacacctattttttgtcaagaaactcggaggatgtagcagagcagatcgaaaccggtcttccggattaacgccgtggggtcttccgcattggtcttgtttgacactattcagcgca

SEQ ID NO: 3767 - DNA, 3278 bp, Toxoplasma gondii
  source 1..3278: mol_type = genomic DNA
tgtgacgaaacggttgcaaattcagcggctgaagtagttggaaaccgctgagtgtacgtcccggctcatttccccagatgacttcgcgcgtcgtcccctgcttgtcgtggcgtcatacccgcgaaatgccctgggacctccgtagtagcccatgtcgccgtacatgttgtagggaggcggaccgttgaatcgtccgccatagcccccgtagtagcccccgccgcctctgcctctatacatccctccgccatagtagccgcctgcccacatcgggccaccccctctagccccgtaacctcccctgcttccatacccgcctccgcggccgccgctgaacttctgtccgtcttcacgatcttcgcggacgaaaatcaaccgatctgaaaacacaagaaacgcgaaccacgctgcttacacggtcacacaagtccatcgcggcagcgctgtcccagggtaccagaaattccatcactcggcaaaacgcggatttgcaccaaagtcagtgtcgcctgatgaacacctcttaaagagtaaggcctctagaatggcaccagctgcgtcccgctgcctgaccaaaccgcccgccgcgcctcagcagaaaaggcaatccccagctcgtgcttaccaaatagctccgtatccgtgagttccttgatggccttctgggcatcctcaacgtttgtgtactcgacaataccacaccccttgctgcggccttgaaagtcctcgaacacatccgctcgcaaaacttcgccagcctgcttcatatgatccttcaagtgctgccacctaactttccacgagaggttacccacgtacaccctgcaggtgggttcctgaacaaacacgcagagtccaggcaaaagcggcgcactgacccctgttggcagctgaatgtgttcactggcaagtccagtccacacccgagctgagcgcgctgcgcagtggcgttaactcaccgtgctggcggtcccctcccgcgggagttgctgttgctgttcgtcctgatgcaccacaaacaaaagagcaagcacaagaaatctcgtccacccgtcgtctgcggactagaaacgcatcggtgcacggcaaaacaagaccggtccacgcgccgcgctgttcccccccgaacgccctcatccctccccgtgagaaaggcgaggcgccgaccactcgagtccgtgttgaaacatctaaaccatcgcagaaagtgtgcggtggcctgttcaatatgcaaaagacggccgccatggacgacgtgcgcggcaggcagggtaccgcaactctcagggaagcgcgggcactgcgagcaccggacagaaaaaagcaccacgaagcggcagcgtgtgttgctagtgaaaaccgacagaaactcgacaaaaattcatgtcgcctcgtcattgatgtctagtgccgcatgcaccccggcaaagaaaattgaaatcactccatctctgagatatgggcaagaggcaaggggatcgggattgtacagacacctgctccaaaaaccggaaaggggttaacgtaccgctggcatcctgtccacaggtatgaaaagtttcctttagcgaacgtcgccaatcctcaaacctcacgattcctgaccgaaatcccaacttcacaaccactgaaagccgccttctcttcctcgacctcactcaaactatcgactatcttctcaccgtacaactccctcgctacaccagcccacagagggcggggcgtggggcacactgtggagaacggagccacgcagaaaaagcggcgtccccccttcggtcgcccacctcgatgacggttgcgcgtccagtcccgaccactttttctcccagggggggggaacattggttttccaccatccataaaagtgcgcgaaacagtatacgacggcgaaggtgcgttaacactgaactccgtccccaagtcgaaacgcatataacgcaccggaagtgcgtcctcaatttcgactcctatagaagcgaaaacgcattaactctccagcttcacacattcattcctgctgaacgctcgacaacacggagacacagattggccaatgacgccttccgctgcgacggtgcacaggccggtggacagtcagtctctgttcgtcgtctcctcgggcacatgtctgcttaattcggcacacctcccggagttcactggttaattctagtgtgatgcgggtgcagagaacagttgcacagagtcgaggtcaatcttgaatttctagggcagtgcagcagtgtggacagggacgttgtagtagagacagaggcgaaatctaacgagaaaagcgtcattggtttcaccatggagccgctcggtcccacgtcggtttcacagttgggtacacgtatgctaaaggaatttgagtccgtgcccagaggaagggaagcacgtatgttttcagttacacttcagttcctatgttctaatggtgcaagtgccacgggacacggcgttgtttgatcagaggagacagatcagccgataaagaagaaatagggaagtgtcaggcagcgcttccctcaccttaaaaaaaatggcagcagctactggtctcagtatgcggtacacaggatccgcactacacgtttgatgcagatgtgctgtgtagcgtatcaaaagaaaatgaagccgaatcacagactcaaagtcactacatctcaacaaaactgtcgcttcttaagttgcgaagtgtcatttgggtaaacaaggcaggactgcaaagctgagagataaggtagccgacattgcgttttgaaggggtgatcagcagggtacgttagaggttcgtggcctgcataaagtctggaggcgggggacgtcgccgcactttagtggttattcgtgggctagtcttcacaaaggatcgaaatcgagtgtctgtgtaccatgggagctcgcttcaagcgattcgactagccacaccctcccagtttacgaggacaccgaatcactttgtgttccagatagacaacctctaagcccgctcgagaagtgaagaggaattgagttttttttcgcatttgtcacgtttggttggtatagtcaaaataagtgttgggtcaatcccgcgttcttgaagaaggcgccattgtcagaagaacaacctgtgcgtggaggatcattgcacggggcaatgttcgggtgcaacactggcatcacgagccatgagaaggtcatgcttgtttccaccttcggactgctcattatgtcttgtgctggaagaagctttttcgggcaaggcttcaggaacacgaatgaaccgccga

SEQ ID NO: 3768 - DNA, 2618 bp, Toxoplasma gondii
  source 1..2618: mol_type = genomic DNA
aatgataacacactgttgcagtgaggctcgcacgtagacttctgaagttatgctgatcttaggtaacaccccctatgagttgcgatttaaagctgttttcctgggtagatctttccagagttgccgttgttgccgattttcctgatattgctacgacacgcacgcaaaactgttcttgagcagaaggatcgctttcccgaatttttcgtgtctgcttctcactgttccctgtcgaagatcaaactagcggagcggtcaaccgatgctaacatgttaatatttccagtattcggttacactggagcaagaatacctaattcacatattctctgttcagttgtttgtcccattaatgtaaaggatggagggagaaacgggtatgtaagtgttcagtgcacagtttagcctctgtgcatggagcgattcaggcgcacgtgggataagtgaaaagccgaccgtggttgagggtctgcaagtaacaggaatactgacacttgtctcctcaggagagctgctggagacgaaaacgagaaacagaacccgtttgactgtggttgttactcagcgaagcgcgtggctgatctgatggtgtggtatgctgcatgttgtggtgtcgcgcacagcctgtgacctggtgctgcagacgtccgcgagaagcagtatggtactgaacactctggctatattcaagagtactatagacttcaagacttgcagcagacgagggaaactcttcaagagtagagacctaacgccagccgattattatatcctgattttacaggattcgattcagttttgtggttgctgtacctcagcaaagggaaagactgtccactaagttttagatgggaaagccggagttttccttcccgtttcggtggtccgttgttcttctctctagtgttgaatctgcatctgttttctgtgtctcggttccaatactgagatgcgagcactctgttcttctgtcgaagggattaacagcggaggcgattgccactactgagcgaaaatgcaaggcaaacgctaatagttgaagcgtgcctttaccctgcccagatctgctgatcaagactatcttgctgtagatgttctgtgaaggttaacggcgactgctttgtgccactttcgatgatttcgttcctaggatttcaccactggaccgcaacatgacatccggggcgtcgttttgaggctcacaaacgggttctctccagacacttcctgaaaccacccttctcttggttcaaatttgcatttttccttttatcagtaacgatgctgcagtagtgggcatgggtggaccccgcccgatttctccgcacggctatgcggcgttgctacccttgtctctgttggtttccacttcctctcggacccgtgttggagtcttgtaccgtgtaacgcacactaaatgatgaaacggggaaggggaatttacagtattcactttagtcctgtgctcgtcagcccagacgtcgcttctccctgtggcacgggctattccgtgccccagcgtaccccgtctccttggctcgcgtcgaaatccagctcacgcgttgacttaacaaagtgggtttgcgtgcaactcacctctacgcgattcctccataaagttaaatggatgtatattgattcgtcagagacttacaaagtatcgttgttcggtaacgctgtttgcattttctgtcttgctctgggtgcgttcgtcgatggtaggaaaaggcttggagacgcagactgcccaacgaagttgctagtttgcgactggtgtccgaagaagcgcggtggtatcgatctgccgtttgttacctcacatggggaaatgcagcagtttgccggggattttttgacttccctgcgactccagggcacaccggtcgtttggccgcttcacgtgttcccgcaatttccttctggagcaagtcgttggcaaggagcggtgcgttttggctgcctctaccactgcgctctttgccgagactacaaagatctcaacgcttctaaacgccgtgtcacctcgtgtttttcatttgattctggttaggtggaacgcgaatattggcagctttgcccttttccctgttcctttgttgtggtgcaaactcacgcatcaaaagagctcgacccatggactttctgtctgtagactaggagaacccaaagcttacagatgtccccattgacggttccctgttacacattttcctgttcaatcaacatactctcatcaacgttcatgtgcgtctggtccttgaacactctgactgggtgcgtgttaattcgtttccggtaagccttctaaacggttctactgtgcagcggcaacgcgctctgggcaggctgcaaaaaacgcggaaacatcctcgacggtatgactgtgtttctgtctgccttctgtcgacttcaacaactctgtacctctcgctgtgcctctctgcagcatcgccggtgccatgcgtcgccttttcccgctctctgtcttgcccgaaatttgaaaccgtatctgttgattcactgtggaggccgagtgtctacggataccgaggtgtgcataggggtttgcatgtggaagtagtaatttcggattcctttcgaccctcctgtacacgcca

SEQ ID NO: 3769 - DNA, 2002 bp, Toxoplasma gondii
  source 1..2002: mol_type = genomic DNA
ctattaagcagcagtcacaggcttttgtcactaacacagccgcggactccagcgggcaacgttaaagacatcactttacgtagcgtgtgtcctgttgtttcaccagtggtgaacccctgcttttgattaagttcaattaagttcaccgttgcgtagctgcagctctgtgcacactgcaactgttacactccatttccagaatcacgttctttcggaacggattcgtatctgtttgttagtcttcttgattttcgttcacatgtcgatgtgtctggggtcattcccatttcggctcctgcagcgaattgctcaaaactgaaattagcttcacctctatcatgttcatgccctcaaaaaacaacttgtttattgggtggtcaccctgcaccatctgcgtagctttgtatctgtgattcgcagctttgtctgtgctccatgtggtctccgacatcgacaacagagtgttcagtgcgtccaagtgctgaacccaccttgaggtgggttgcctcgaggattagtgacagagcagtcgtcactagtctgccgtgcacaactaacacacaagaaatggcagcctcttgttagccgagctcattcatcttgttggaatctttaaccgttacatgactttggggggaggcaagtctctgtccatgcgaattttttcagacgccaattgagacaggagccggagagacacgaacgagacacagaagcaacagctgcgaatgaacacctctttatcgtttattcatctgtttctacatagatcaatagagctgcttatgggatgatagaaaacaatcaatctggccatacgagctgacgtggcgcgtttgcaaatgcagttgtcaaaccaccgtgctttttggtttcctgactcttgattaaacaacttcgaagagttcatgaggcaaatgtgcacttgaatttgattggccgccatccgttccagacgaagcgtcctctgtttgtacctgatcagctatatttcggctgctgggcgacatttcacgtagatcggtttccttcgacgtaacgctttccacccccagtagaagatacaggtagcgttgctgctcgtcagatgagggcatccgtgccgccttcagatcccattcgggagaagccagagagtgaagaactgcctgtccgttctgagctagtaaaattgggaggacgaccacgagtctcttggctcttatcggtgcttctgcatgctacttctgcaaggcgcatgcgctaccgcgagggtgcatgtctcatatgttacctctcttcactgtttaccgccgcgaatgcactgcgttatgaagcggcataaaacccatgtatcaggtacatataaacatcttgagtctactttcctggtgtttctgtttatagtggttctcacttttaaagttagcccaccagtccgcaaacgaggtgcgtgttcgccggcgaacggcgttcacggtacgcgggatcccttccgaaacggctaaccggtaggatccaaaaggctgcctcgtttccaggagaaaaagttgaagctttcagcggcgaactgtcgtcgtctcagtagcgatgagttttccagttccctcttttgtggtgaggttgtaccaacaagaagcttttcccgagtgtccggcccgtgctacgcaaggccgtctgcctgattgattgtcccgacatcactggaattaagggatcgagtccccaccagttttttttcactgtcgcaagttattgtatagctgaacaagtgtttttgccacgaaaaacggggtatttatcgctggtgaaatatacgctgcttgctccctcgtgtcaattctgctccgtgtagaaacgtcgcatctcgaccgtttcgcgccgaatcgtcttgcgatttgcggtctgcccctcatatagcaactgtatgtcgactttctggtactcatgatgtgggattgctaggattccacgaactgcatatagctgattctgaggctttacgtcgctgccgtgtccctta

SEQ ID NO: 3770 - DNA, 1584 bp, Toxoplasma gondii
  source 1..1584: mol_type = genomic DNA
cagtggtgagagtgtacgtcgtgtggtcggtcgcggtccacgcatttgtgccttgcgagagacagcgattcgcgaggaagtccagaacgccctgaacagacagaataggaaacgagggagaagggtgtcgctgtcgccggagagagagaggaacagcgagaaggaaaacggaacagaaagatcgcggacaggtggtttgcgcggccgcagacgaaacggcgcagagggaggcgacggagcaaaggagaagagatcaagcaggacgcaagaagagaggaaacgaacgcacaggaggaacgcagaagaggcatagaaagacgaatgagaggaagacggaaagagatggccgccaggagcgagaagaaagaagagagagcagaggtgggattaccttgtaggggaagcgtcgacttccgaggaagacgagatgttcgagtgtgtgaggaagaccttcatccgtatgagcttccgtgggtagtgtggcgtagagattgcagaggggagaagcgatgcgacagaggaggacgcgcacacccgtctgcatgcatttccactcgcgaatgcaaatcgttttcaaagaaaagtgctgaaccaactggaagccgagcgcctccgccgagttgcccccttctccctcggccttcgcagacccccggcacacgcaacacggtgtacatacactcggagtcgcgggacgcagcgcggcatcttcgccggctccagagacagccgctggagagacaacagctgagaggtcgacgacctcggaggaggtcggcgactcttgcggagacagtgccatcttggagatgcagacggaaagtgtgcggcgcaggaagggaggaaaagtgaaagacgggagggaggagcgggaagaagaggcgggagagatcggaagattcaccggagacgcgaaagaactcccgagtgtgtcctgagtctgttcacaggagacgggttcgaccgattttgcgcgagacaggctagagggaggacaatgacgaagccgagggtgtctcgacagcagactatgtctcgagtttcttgcagaaagtcaaaactggcgaaggaagaaggcgaaggagatgcggggaagcaggagaggcctcaaaacttgaggacgctccagacctttttgccgtgcatgcacatacagagactctggacgaagtgcgcatgcataacagaaaaattctctgagaaggcaacgcaggcgagaacgaagaaaagtgaaacagacacgcttatttcttagctaatattcgaccatctggcggcactatgtctctcctccctccggattcgcaacctccgagcggcgacggcggccgtcgatgcgttgtctgcttcctcgttccttcttagagagtctgttcttctgaagcgggaggaaaaattctttcaagtttcacagagaaagcctgtttctcttctctctccgtttcttggcctcaggttcgcaactggtccccgagacagaagtttttgtatcacgtagcctcgtcttcgtttcatcgccttatcgtttcttcgtatgttgccgtctcgcccgggacttttcttccactggtcttctctcccaaa

SEQ ID NO: 3771 - DNA, 3834 bp, Toxoplasma gondii
  source 1..3834: mol_type = genomic DNA
aagaaacaggaacgctggttgtgctgctgggcacatctgcccagtttttttttgttgagcgccacctagcggcatcttgtgcaaccgttcgcagtggaagatgcctgctgccttcaagcaaaagctgcgcgttttacactggctgcattcaaattgttggagaagtgcttttgattgtgcatgagaattcatgcccgatcatcaggttttctcctgagtaaaattggcctggtgctgacatccagcaaggctcgtacagggacaagtgctttgttacatccaggatgtatgtgcagcatctgcttttcactcgttaatttgaaagctagagctggatcagaaatgatcctcaccggaaggaagccacacagtgcatgaaacagtagttcttttcagttatttctgcgtctgcacagacagaatgtggctgctcagttcacctgagaaggctgttcgattgatctgcaagaatgccgcttggtgaaaccaccctgtaggtctggttatgtagcgttcgtatcatttgttgtcttcctgatgttctaccacatgcgttcctttccgtgtagccttctcgcttcgacacacattaagttgaacagtgaattgtacttgccgttcctgaccgcgtacgcaacggtggaggactactgctctcacgaagtggatccgatgtgggtggaagctgagcagcctcaaatcatggcgttgacagcgatgacacagatgcctgtagagattgtctatttcgatcagtcgcccggcgaggtgccaggtaagcgacaacgtcatgtcaatcgcacacttccatcgattcgtcccaaccgtcgagcccgtcatcctccagcaagagatcggggcacaaatgatgcggtacagtggcgcgtatgctaggagagcagtttttatgtgtgaaagaagcatcgagccataaaaaacggcgagaccagattgtgcaacgcccgactgtgtatttatacgcatatcggcgtatttatctctgtatctatcccctttccgtcttgaggagaagacgagagaaacgcgaaggtttgtgattcagctgcgcggtaactccgttttccgcgatgaaatctttcctatctcaggaattggatagaggagagcgctcggctttctcatgcgtttttgttattgaacggttctctgacgcttgcccactcgcggctctgtgtggatgctgctcacagttcgtcatattttcccgcactcggacgacgcccagatccatttgatttatcggccgggacactacgactttttcttttattcccctcgacaggccggtgctcaccagagcacgtaggatgccgtcgagtatcaacactgtttcgagccacgcagtgtgaaggacgtgtagaccttgactatgtggaccaaaacgtcttcacaattgcatcactttttgcaaagtatgctgcgcagtggcttacggtggaaagcggaagatgacatgcagccatggttgtcagtgtctctacgtgctaaatgctagtctaaaacaacagcgtactcggtgctctccaatgcatcaacttattattttctattcggcccggctacttcggccgtacgtcacttagcttgagaaacgcggctacgttggttttcactttgtgttcatttgacggtgacgaacatttcctcagtgctcgttgttcagcgaatgtggtcacgacgtacgtatttgctcccgaaagccactgaccgtgttggcgtgttggaaagcggccgacgcttcgtcacgaacgccctcattacatgcgttgtacccggcgaagcaatcgagcgcagaatgcctggtttgcgcacataactccgagacctgagtgaaacaggtgtaccagaaaagcattcatagacccctcagcaacggttttgttacgcgtacgacttccgggatacccaccatcaaaaggcttttcgtccgtctcaagaaatctcgttttcggtgttctacaggcccgcactcatcctatgtgaacgtgcctaatcgtgaattctcagaagcaagctgcggtaagatcgcggactaagtcgccctagtagaacagtggttagctgctgtggtcgggcagagcagaccatgtgcgtgaaaaggtgatgcacacgatgaggatcactcaatactgcagatcctgcgtccgtaccagcattgtattccggtagttttcgtcggcgcagtctatcgacgctgtttgtgcaacgaggctcaccaccacgttgacagttacgccattggggggcaacacaaattgcgctagtcacttggcggatcacaaacacgaagttgacgcttcacgacggcggtcgcagccattggcctattggaggatatagcagctagaagatacggctaaaagaaatagcactttgaatgccatcgaaattcataatcagtagcacggttttagacttcgcagctagacatggaaacggccccgccaggatgcgaataacaaaaacacggcggcgcagacactctgagcgatgcccaacatactaccaactccacaaatggatctgacgcatggcattgccaactcctaacgctcttccacagtctctttgtgaagtccgatatgcctcacgtaactgtactatgaggcagccacaagtctcgccttcgctttggcctcttctaccacttacaggggatggactttgtgctttgccgtagtggcacattcatggaggacgaatgcgctttcacgttctgaggcaattatgcaactgctggttgccgtctcacgtcatttgtgtgctgcggttccctcacgatccctggttatctgtcagcccctttttcttttatctgttttcaccctcgaaactctacagggatggatgctcacaccacgactgagctggcctgtgcaggaacactgtcccacgtcaggcactacttacgcgtctccatctccacggtttgtcaaggaacatgccacctcgctatttcttgccactactttcgaggcgattctgtcgttacggctcgcaaagcaaaagcaaattgaagacgaacgcaccgtcccacgttattcaaattcgtcaccacatcccacgaaaaatcacccacaattccaaggacggatgttactggttgggagctccccttgcaaggactgctctgttgtaaatctccacagtatgtcgctttgtacccatctcgtcgcggtggaggatctcgctggtccggggatgccgaagctgacagtacgcggcgtggtgaatgagcagcaacttccgcgcaagtcgcgagttactggacacacccggaagcgctttcaggggtcgggttctcgagtcgcaagcctacaaagcgttttaataaggtttctgcggcacggatccactgctgcggatgcaaatcacgttttctcgatgagatcatttgtggatacagctacactgagagtcggcgcgagggtgtgaactcgaggtttcgattcaagaaccgtgatgactgcgacagttgtacctatcggagggcctgagccgtttcgcgcgcatgcctgtggcgttgacacggtgcttttcatttaggcttttcgcatcaccgctctcttcttccagttttttttaacttacagagggtgtttggttcgccgagcgtcgtgggagtgtgcgagtgttggagcaggaagattggatgcctattccctgaatttcgcatttgttgtggacccccccgtcgtcagtgatcgaccgggacaatccgggcgattcttgatgcaaccatgagtttttgacgacaatgtttttgggagtggacacaccgttcggagtggagggtacaagcggcgtggttta

SEQ ID NO: 3772 - DNA, 2811 bp, Toxoplasma gondii
  source 1..2811: mol_type = genomic DNA
tgaaaagtcggttttgtgtcgtccggactcttccaccaaaagttcgtttttcgtcctagtggctttgttccgtggacactctcaaactcattctcccccaggtcagagttgccgggagtggctaggaacagttccacaaattctactaaagcagcggcctgcggaaagtgtctggagtcttcggacaagatgtgtcgctgtagctttccatgcatccccgctctggtggaggcttacacggtgtggcagtggcgacgcctgctattatgttgcaggcgcagttgcacagatggccttcaacaagaacgatcggggtctaagaaggcgaacgaccgtaccgtgacaatcacaccgattactgctttaaatctaaatggatgtcttatgaaacaatcttattttggatcccgcacagtgtaggaaagaattgagcaccacatatattacgtgctggcaggtcaaggcgggaacggcttcccccatggtttagttaaggcctggttccgcgacaacagaacgagaattgcaaagcctcccaagactgttcacagaatgagttcacagagcataccgccatggcgccagttgtagttttcgtaggagtttttctctttcaagacacttcacatgggacaaagtgcggaaaactgtgcattctttaacctcgaaagcaacgctacaccagtgaaagataaaagccgttccggtggcacttccgacgtttttaccatcccggggcataggtgtctcgacgaagttatggttttgcactcgtgagtgcctctcaataaccatccgagtgttgtacgataattaaatcaatgcattaccaattaagcagtgttacggcagagtggatatcgattcacgtcacactatctctgaattatgaaacggtcgacccgcagtgtaaggattactgttagcactcgtattaacaaggttgggaaactactactcagatgttttttttaaacagttgaatggatctgtgcaggcgttttcaaccgaaagtagttttgcctttttatggccagtggcgtggaactcaggtggagtttagttgcgtgaacgaagacgagatcaattcaaagcacagatccactcggtaaagaaaacagtcacgacagtttgcagtggttccacaggcggaataacaatggttttgctcagcttctgcagtgctcttagtgatctctgcagtccgttccctcgtttgaaaaatgaatgatgtggtgttgtctagttaagaacggaatgaatattgacgtaccctagtaatggaaactttaactgtctgcgaaccagccaatggtggagcgtagcgtctatttgtaacttcacctcttgaagaggcggtataagggtgctgaggccgaactgcatgattccatgcacacagggtggggggtccttgacgttgcttgcaagctgtgagctaactgttcagcgtcttctgaaagaaatgccatcactatgtcaaaaggatgcgccaaaactgggtcagttgacttcagctccattagattactcatttgactgttgcagtggggcactcgttttacccgtgtacttattggtcgacgtgccggaatacgttggggccggaggggaccactagcccagcaacgaggcgacggtagagcttcgattctgccctgaccatgataacgcaccataatcggaaaatgccaaacagatggtctgcaactgagtttgaaatagggatgtcgaaactcttggtttcagccatccacagggtcacttcacagtatacgatttttccctaacaagtggctccagcattttgcttcccgcggccgaaacactaacggccaacgaggccttcgcatcacaagttgctacgtcccctgctctgtcctgtcgacaacggcctcgagccaaagcgcgtttatcggcaaaacaaatgcaccaggctggcgtggactgcaacgcagcattgtcccgcagcatgtgagagatagtctgcctgtgtattttctttaccactggtaaaattcatgatgctcctggctgaattcctgtcgaagcgtactctgaaggcctcacttctggtgctctacgaaattcacatcgtaagcacttaccgatgggtccaattggagagaacaccaggcggtccaaacaaaaaacttctgctttatttgcacgtttcaacgagttgtaaatcaacaaggaacccagagttctcgagtcgtagttcctgccccagcatccaactccctaatatgcgtccatgccgctttttagtttgctgaaattcttataggtttgataggactcgctcttcagaaggatgctccttctcgagacgcatcatacagatgcccgacgaccggcgttgtgcccgtcaacagagccttcagcgccaaaatcaaggcaccctcagcaagaaaaaaaaagtaccccccactgatggtcagacaggcggcaacgagtcaaacaataaaaaacaaaactgtcgcaacttccagaacagcagaagtgacgaagttgagggcgacccgccaagacgcggcctcaagcgagctagttgacgcggttatcgctttactatttttcgcagtaccgtggctcatggattcaacagttgcacttttctagtgatcaccttaaccgccagttccaccaatggacccagagagtcaagagctccgtggcacagttgagatgcctcttgtgagcacctccaagacgtacccactgcttttttgaatcgatccttttacatcagaaaaaagcggtaaccctgttttcttgagttcatatttattttcaaaatagtcgtga

SEQ ID NO: 3773 - DNA, 4506 bp, Toxoplasma gondii
  source 1..4506: mol_type = genomic DNA
cagaactctcttgacacaaggatgaaggcagagacgacgaaggaagcccggcacaggtaggctgcgaaccaggagagacatgtggtacgcatgcagctccctcagcagcttcccctaacggtttgctttcctcgtatttagtccctttgccttgccgtacgtctgccgtctgccgccctcgaagcagctgcgcccgcttcagagcatgcgacggggagaacggagacgctggcgaagaagacgaagagaacgcagaaggggaacagccagcaagttctgatcgacacagggcctgcgcaacgtacaccagggcgtcgggagagggaaggagacactgttccgtatccccagtgcgagaagccgcgttccctggagaagctcttggcgaaggcaaggaaggagactgttgtgtctggtaaacctgcaagatcctctggaggcctttccgtgtccgacagagcttccggataacagaaaaggagatggaatcgggcagcgagtctcctgcccccagtccacttcctcgaattggcgcccccgattctgctgatgcagccctcctcagcagatgtcgggaagccgccatctgctcacacgccgaggaaagagacctggcttccgggcacacttcgtgttttttcggtgagctccaaatctaaattcatcttacaattttgattcaattttgattcaaggagggctgcagggagaagaaaccacaaagagctgcaaacgtcattctagtttcccatatcgctcacaagcatcctaaacgacaggcggcgaggaaagagaccaacaggacgagacgacgagaaggggaagcggctgtgaagacgaaaaagcgactgttgcgaggcaggacaaagacacaaagtagaatgtagaagaacagagagcagattcaaacaccggaatatgccgcagtaaggagactggcgacgaggtcgacgtgccttgaaacgcgctgcatgcagctagatcgagactcgcctatcgcaaaaaaaaattggagacagccgatccccagaattcaataggttcgtctttctgaaggttactctctctcttacctttcaaatatatgttttttggcctctggcgctttcttggttccatttagtgtcaacgcgccgtctcttctccgcaaacaacagcatgctgggggggggacactagctggtctcaaccagaggcgggtactgtgtttctgtggcatctcgtccttgaatttcttttattgagtcggttctttgcatttttcggtccaggccaatccagtggcatatttccctcattgactgcaggcttgaaggagagaaggagtgccactgcgagcggtccaagatgaggtgcaaaaagcgcaagaaatgttgacccacgactagacagtgcgcacaagccggttaataaacgtccacgtatcgttatatatttacaggcaggcacgatcacacacaaatatacacattgaggaccggatacgttttctagtgctatcatactccagaaaacataggcaaatgcgcagtgtctggggcagtggcagaacgcgagataccgtgcgcagaaaagcatcgacgctggttttgcgcgacccagtatctgctgggaaacgtcatatagcgtaaatagaatagaattggtacagttctgacttcattgtgaccgccgtagcgtgtggagaagtccctttatctcgtagccccctctgagcactgtagggtgttcttcgccgctgcagcgtgcatgggtacatcttgctcggagtcacgatttatcactccttatctgggtgtctgtacgtctacagctttatcatgcgccagtttcttgtgtcaaacgtcgtctccgtgtcgcgttgcctttaagtggcacagcccgtgtgttcctgtctctattcgtcattttctcaactcaggtgtctgcctttgttcatgacgactaaatacatgtgcttcctggtcgtttcttatacttcatctatactgaatattcatatgtgtttgtgtcggcagaggtgtgtcgtgtttctctgtcactcattaaaacattttcatcacccgccatcaaaggggatctcgctcaaaaggcccaggaaaaacgaacgttgaatgtgaatggcgattgcaggggcacacctctctgtggtaatgaccattgacagcatagacgcttatacttaggcatgcatggcttaatctttacgacaaacatatgaccacggtcaaggtcaaccaggtcaatatgcctctgaggtagaccacttccaaaacaccaaacacactcaatcaaccgcccagtcgcctgtcgctttcgtttttcatgtcacaaattgagatgagagcctgaattgctcaaggatacatgccaacacgatgttgtcgcctggtgcgccttgagagcagcactagtttctggtgatagtaacgagagcgagatgtgtccaaacctgcgaaaacctcgtggaagcggtcaaacccacgggcatggcgcagcctgccgattaccattatgtatgtaacaaataagaatacgggtttagtcgtcaaagaaacgaacaggcagtacggtttcgcagcgttgcctctccccagttgttctcaaccggaaagcatggaaaaagacgattcgctgcgtctctgcacgttcgtatcgaacaaaaaattgaagcccttgatggggacaagacccttagtgtgtagataagtgcctctacgtcaccccacagcgaaagttcggggctgccatcgcgttttcgagcatgccaccggtgtcaaactctggctccagagaaacctgacttccctcatgtggtgtaccagatcattcctcctaagaatgctaccccagtgtttgtttgtctctcgtgaactgcacattctattaactttagtatggatcagttgctgccaccggagtgacggggaaaccctcagcaaaaacccaaagaaaatatcggacgaaaagcataaaggtagccatggcgtgttcctctcgaaactgaggaaatctagcagctcgagttctgagcaggaatatcgccagtatccgatgtttaccatttcagcatacttctatcacgctgtgcaggccatcatatatgacactcaacaaaccacattttgcgaactaactactcaaatttgcatacagaacgtcctgttgcggaggaagaaggaaagaacgaaaacccttccccaactccttgcccaggtgaacgtgactttctcagtcagaggaaaatctcgcgtgtgtgctgtcatcttcaccgggtgcccgagagccactctcaccgccctaatatcttagtccatgttgaactgcccttggagaatttcgtagagtaggacactttcagaagactcaggacagctacgcttttccagctccgtcaatggagactccgtgagtggcctttcacccagccctctctcactgtttttaattccgcgggtatttagacagctccctgacacctagcagccaaatgagactacgcggccttctccccgtggctactactctaccacttttctcgcgaccaaaaggcggcatttttcctccacggaagagattaaatggtagagacagcacgagcagaaaggagatatatttgtgttcgtgtctgattcacagccgtctcctcacttccgttgagacagagtcaggattcacacattcacaacactgggatgcgctggactccatcgagtcgagtgtttgcgcgagaaaagtcggggcagctcggggtcgttgaaacggcaaacactggcaacaaaacgggcaaacggtgcttcggaagctcagacaaactggaatgcgtagcgataggatgtggcgcgtgcaaaatgtactgacttggggagtgcttcttctcagacgctgccagtacctcgacagcgtccccaaagccgttccagagacaccgagtcatgtcgacactcgatagtcaccgacgaaagaaataagaacaagacttcactttgtggtaacctttcgtcgtcgttcgtagtggatcttcttcggggagtatatcacatagggggtcgcttgagttgctcgagtcttcaggcaaaatatggaaataaagctggagacgacacgctgagaactttggggctctgccctgcgcttttctcgcgcgtttgccgagtttatccctcttcaagcgtgtagctgaattaaaccgatgctttcagttgctcgatgggattaccactcgtttgttaccttttcggggctctttctttctgcagtcacgaatccgtgcaatgtcctcgactcagcgatacccacgtgaagtcacgcctgttcgttggcttttttgctatctgattgcgccagagcttgttttgtgcatttcaatctagaacgaatcgacgagttcttcgcctgtcaaatcactggacaaaaaactgaggaagctcttttcctttcgtctctctccttgcactcccgtccgtcgttctgatcactgtggccgtagctttttgtttacagaga

SEQ ID NO: 3774 - DNA, 2580 bp, Toxoplasma gondii
  source 1..2580: mol_type = genomic DNA
aaacggtatcagatggcttcctccgcgtcgcagggcatcttcttcctctgcctggggaacgcctcaagaaggcagagagcaccccaaaagggaggtggagacagaagaagacgaagaacgtcgcgacaagagaaacaaaagcgagaagagggagagaaagaggagtcccgagaaaggaacgcgctgtctgcgctttcatggctataccccgacgtctgtgtagtcgcctcgaccagcatacagagcagtcaatccgtcgcgaagaatgcgaacgtagtgaggatgcctgcggcagttgagggcaagagggccgctggatgggcgccagaataggaggcgagaaacgccgtcgagaaaagttgctggggcgccttgatccttcccacagagcggaggtgacgaagactcacaagagagcgaagaagaggaagaagaggaagaagaggaagagaaacttcttccacgaccagatggcgtttgagtcatcgtggggagccggaagaagagaagcgagggaggtacggtgggaggggagacagctggagattgcgggagaagaagagagaaactgcaaagacagaaggagaagatggaagacgagcagaggtccgatcgagaggagtgagagaagaagcagggagagtcaaaaacgtgagaggaaggaattctctctcaaggctagatcctggcgagtgcgttgacgttgcagatgcgagcagagcctggcacatgaaaatgcccccgtggatgtagaaactgcgaaacgcagcgcaaggaagagaactgaaaagagttgagcgtggagaagaagaaaggaggaaacgaacgagagcaaggaaacgggagagaaacggccctgtggcttcttctcctcgggggtctcgtcctcgtctgagagtagccactcacacataggtttccggtgtctttttttttgcgtttcgagtgaagtcgttgtttcgtttttctcaagaaccgcgagaatgagaaggagggaagtctctgtcttcgagctcgatttttccactctgtttttgtgtgtcaatcccgcgagagacgcctgttcgctttcgcttgttgacctgtctcgctttccccagtggcactccgcgaatcagagacacgagctgttcttctgtctctgtctcggtttttctctcctcttcttctcctcttctggcgaggcacagtcgacctttctgcttctctcctccggccctcgccgtccttatcggcttccgtatcagcggccggggacccagcggcgcgagacctctatctctcgctcgagcgcgctgcgacggctgcgtttgagtctgaggagagaagaagcgagaaaaaggcagcgcgaggtcgccgaaaggctggagagacgacgaagacgaaggaatgatgggaggaacttgaggaagggggaattcaaaagtcaatgcgaggcaaactttcgtcaaggtgttacctatgaacagcgtggacagcgggtgaaacagcgggagcgcaaccggaagaagaccggaggcgaggagagaagcgcggaatgccgcgtttcagacgacaaaaagaaggagttttctctttgtacgggggaaaaaagaaatcttgtgcgtgtgtgtgtcgcatcgcgaagcccgatgcgagcttgggaaaagcaaaaggaggctttcgaggttctcttccagtctcgcgccgagacgcttcacaaaaaccgaggaaacaaagcctcccgcttttccctctctgagctccaggtccacggtcgctgcactcctctggactcgctcgcctggcggggcttgcctcaaacgagaagcgattttcgcatgcagttcccaactgatttttcctccgttttttctcgatatctgcctcgagaaaaaagcttcgcagggcaggcgaagctcgcctcgcgactttggcctagacgcacttcgtctcgacattttcttcaaagcccccagacaccaactgtcactccgtcgccaaatctgcaagacaaagacttctgcctcgtcaccttttcttctttctcttgtcttccctcttgttctccccttgctctttctctctcttgttctccccttgctctttctctcttttgttctccccctgctctttctctcttgttctccccctgctctctctctcttgttctctctctcccttctcccataggcgtctgagggccttcctttcttctcttacgagagaggacggtgaaaaaagattcgaaaagaaagaagaaagaagttttatgcggaggaaagggcaggagaggccgcgcaacttctcttttcctccgtcgttttcgcagtgggaggcgctctcgcatgcttctgcgtctttcgctggcgttcactttttttccgatgtcttcttcgcgtcgtgactttcttcgagattcgtcggctctctgaaggaagtttctctcggagcaggaagtctcccctcttcgcctccgtcccctcggagttccccgtggatattctgacagccttttccctctgctgttttcttctcgccaagttcaactcttcttctccgtgcctctcgcaggccgaagtacgcctcgcttgagaaaga

SEQ ID NO: 3775 - DNA, 2292 bp, Toxoplasma gondii
  source 1..2292: mol_type = genomic DNA
acctctctgagaccctcgacagacggccgcaaaatcagagagagaggctgcaggcgacttgttcgcgtcctctcgcgaagtgctcaagaccggcaaacgaagtggattcgttgtcggcagcaaatggctctctggaggctggaagttcgcacggggccgacccagagggaagtctgcgtcggcgaccgcgtattcgttgaggaacgaagcttcgctgtcgtcttcgagaaagccaccatcaaaattggcctgcactggcgacaaagaataagacgtcatcgctgccgagaggttgagcgtagggagagctgaggggagaagggagacccagaaatgctggaaaactccagaagaggaaacaccgaaagcagaaagacaagaaaagacaaaaaaagacaaggaaagaacacggacaaaggatgggaagtattctcgtctctcgaatgcggcaaggagaaacggggaacagagaaggtgactctctcgtctttctcggttgcctcaggtgtacagacactgcgaactccctggaggcgcgtaggtggacagcgaggagttcgaaggcgttttcgggagaaaggagaaaagctgagttccggacctgaaaagacgcgcgagtcgccgtatctcgagagtgaacgttgctgcggcgaacagccgaacaccgagcaacgagaaaccacaaacttgacaaagccgagaggtaaacgaggtgccttgaccgcgcagggtctgccgctgcatgcgcccccggacaaccggagaacagggtgacctcagggaaagggaagccggagacaagtggacagcgcgaggcctccggattataatgttcaggcgcgagggccgctttctcttctgccgagcgtctcagagattggacggacaggaaagcagtcacaggcgagacggaggaaggcttctcagcgcgtttgactcaaaaaacatggccaccagagacgcagggaagtcgcgttcttgggctgttcttgctgcagaatcgtttctcgttctcccgcctctgaaaagatgcacgtcttctgtttcgtctgctgaagggaacagagggtcgcgagaagacagacgagaagaaaagggaggtctgccgctcgatgcctgttgtatggccgagtctcgagttctgcacacgaaactctcggaggtcgagaaagaacagatacacgcagaagtccagaaatctgcgttcctgactcgcctcttctttgttaaaactgtggagtgacccggacttttttgcctccaactctcggactgatttcgatgccggagtcgaagaccgcagcgccttgcacacaaaaaagttcgcatgcaaaagatatgccggcgccttccggccagcgcgtttccctccagaagtctcgacttccgcagaaacccagaacgagacatctcttgttctgcagagtcagcaactgccctctcgctgcgtgcggtggcgctgctccgacagtctttcctcgcgaaaaaaccttgccctcttctcgcggaaatgccgcggagaaagcctccggagaacccccaactcggacagacagagacggcaacagactcaaaaaaagccactcggggctgtgccctcgagaggcgactttgcgaacgcgctagtgcgaggacgcgcgccgctcagtgagctagcccattcgttcgagctgacgagtaggggcttgtgcaatttcggctcgagcagggggcgagaggcagtttcgcgcgcgaggattttccggctttttcgctttgcgctttttcggtttctccaggcgattttcgggaacattcaaggctcgaggcacactccttgtggccgagtttgcgcggaaccggtggagcgtcgagtgcgagctcgtgaatgcttcgatctttcagggaacgagagtcttccaagttggtggatttcctggcctccggcggatcctggagaaagcgagtttgtacagtcttgaaagttgcgcagaagcgacgtttctcctgggtctcgcgggagctcgctacctcgagaggcgcgcaggcgcagtggctggccgagttcctcgcagtgtgccggtgaacgagtttctggattcacttctcttgcgaacagccccaagtttcttccactttcctcctctctcgaaggactctgaggttctttcgagtttttccttccacagagcctcccagttccgcttcgcttgccgaagtccttcagcttctgccgccgtctgctactccaaccagacgaggtccttctcgtccgttcccccaagaattcggctttctgctcctcgcccaaca

SEQ ID NO: 3776 - DNA, 4713 bp, Toxoplasma gondii
  source 1..4713: mol_type = genomic DNA
ttagcgatatcccatagcagtgacgttctcagcgcaacacaaggatgcctgctgtcccctgtgacttcctgggccgactgggtgtgtcggcgttcttttctctcgaaaactcggactcttttcagtggttaggtttaacggcacaaaggaaatcgaaagtctttttacctctctcgagcagtccaacggcgtggtggaatctccatctgcttacctataacgatatatacatgaatatacatatatacatatacatatttatttctcctgcgaaaaagctgagggaaaactagacaacgggagagacgagcgagagactgaagacacgaactgttgatcgcgaaagaaatcctttcttgtcgttcgtttttgatggcctacggtcgctgaagtgtctttgcaaacgcccccgcggatctttggctttctgcaccggcaaagaacgtcgcctcccccagtcggggaagagtccctcgcgaggagagtctcgcggccgtgcagaaggggaaccgagagccggccgccatttcgttgaagtaagaaggagagcggagaacaagaggaggagcagaaatcagcagaaatgtctctcaccaagcagcgcacaaacacaaagcagaaacgcgcgacctcaacgcagaacgcgtcacggttcgaaaggtgggtggagtacagccagcagggaattccgacaaagttggaaggacacgacagagaggcgacggcaaaaactggaggaaaacgaaaggcgggaaaaacaagaaatgcgagaaacgcgtgccggcggccgcaagaaggaaggacctcgccaggctgctctttgtgtgctgcgaaacggagatggaggaaggcaagagaacgcgctacagcgtccgtctcttgctcgttttctttctcgaccgtttcttctgagaagaggcgacgccttctgcgagcaaagaatcgaaggaaaagaaggcacacacgccgaacaggaaaccgaacaagtggagacgtcctcagctgcagaggcagggggacaggaaaaatcgcgaaaaactgattttctcggtcggctgcttcaaatgagcataccgtcgatctacgaaaaacgaatcgcttttctcctgcgaaaaaaagcgaagaaaaatcataaaacgggagagaagcacgagagactgggagggagaaaagcatgagcaaaaaagacaccggctgcatttcctgcatgcgccacacaaacccacgagacgcctcacgggaggacaaaaatctggcaagcgcccaaaaggacttggcgcttgtttctccctttctttgctgtctgccggtgtctgatgtcttttaccggattctgcgcccttccccctttcttccttgtcgtttccgccctctgggcagccctcccatgcgtacctcagttcgcacccctctcctctctctcgcattcgttgtttcgcggcctctccctcttctgggttgctctcccgcgttgtccttctttgactcagacgctgctttctccgtccctctgcgcatttcactttttcacttggtgctcgcggacctcaattttcacacacgcgtggggagaaccggaaaacgcacatgctagaggagcgtcacagttaagaaacatgagcgaacagaagatgagactttcggaagcagatgtcccgcgttcaattccaaaaccaagagttgagaatacatacaggtgtattcaataagtcagagtttccctgggggtcgtcaaagctcgagtcgcagacagcgtcctagaagaagaagtagagcaccctttttcagcgcagcaatcgagtgaacacagacactggagtacataggacacccactgcgactctacagttatgagatacagacaaccaagcaaaagagagatacatccagtcgacagaagcgaccctgttgtcgagagacttcgcgaatttagaggaaagggagtaagcgttaacaaggaaggaaaaatcggaactatgagggaagacgatcaaactggaaatcacggacttttttcagctgtgctcgcggaataccccgacctataataaccaagaatagcgtactgtatacgcaaatagtcacccatccatttgctagacttcgagtgtgcggctttgcttcatgtgttgcattttttcgtgcgtctttcatgcagtaccagtttgggatgaaatcactcttaacactgtcagtgcacttcaagaaagcggcatgtaccgagaaatccaacactcgtttcgttcacagaaaatgaagccgaaagtttggagtcggaatctaacagaagtcggagttctctgtgtgtacatgtgtgccttatctaattggttttgctctaggcttttcgaattgccgcgggacttctaatattttctagacgacatgtagacgcgttacacagctcagagaatagcagacaaatgcacaactctttgaaggcttctttcaatcaaatctgcagcaaaatccgctgtcccacacggctagaaatggatagaaacgttagccaacgttgttgtttcggcttcgaaaaccggtggtaacagtcgttcagacaggatctaatatcgttacgcattttttctgcgagggaaccgtgactttttgtcttcaaaagcgcagagaccaggctttccgcctgcgtcccggagagcatagagatgccacgaatccgaggactaccgaaacgtaactcgcttgcggatctgattgccgtgcatcacgagaaaacgcaccctcgtcatctaccgatacagaagtttcccagctttgttgtctgacgtccgtttcggcgtttaaactcttacgccgatctcgaagttcagaccctttatccacttcctcagatgctaggatgatcagcagcgtcgtactgtgagtatgctagaaagtaccgttcaggtacaatataaatagatagcttcccctctgtattaacgacagacacacgaagttcagtttccctgcctaggcgtcaaccgttcaacaactcgctcgtgttctgtggaatcagacgtcgtccaccctatccggaacagctctgcctcgccgaggtgtcggtggattctgccttgtttacgacagaaaggacgtaatggcgctcagggtcgaaccgtcggggcgtctcgcccctcacattcgagattcgcaaaatgtctaaagtcactgccctgcaacttgcagtgctgaagcacatagaaggctaactgaaagtacgtgctgccctctctaagttgcagggaatgtgttctatgtttacggacaatccgaaaagccacaactactcattccgatgagtgctctttgtgtttaggaccgactctgaatgagcgtgcgaaaaatctgcttctccttccacagaaaacgccactcgcactcgcaagagcacgacccagaacgggaacttgagttcttgttccgcttcgcattaccaccaacggacgaactgtcaagttcaccctgccatgtaactcctaggattccgcgtcgtttgccgttcgtcgattccaccggtttttcgcggagaaaaccggctacaccacggtgtcagtcgaatcaacaggagagacgagctctttctcttccttcgttgcgtgtgtctgaagggaaagaaaggcgcacgaagttatggagcagaggtaaaaaagaggaacttctcgacgtcaagcggtgtgctgttggctgttgcaggcagagctgcaggctgcaagaaccgttttcgcacagcctcctcgccgtttcactttcctcacactcaccccaaaactcagcaggttccgtaacgcgagcttttctccgttaagcgagtgtttctccataaacatccccacgcaatcgcgcaaactggcgactgacacgaactcgcgagacacgcgcagtcagtcctcgcacatgcacatacagctcatcttcgaactcgtcagctgcattttcgcaaggttacgcaagcggaaccgcgtgaagagttccctccctccatcctttttcccctttcccgttccgctggaaatagcacgtataattgtctccgtctgacccgaaaaacgtggcttttgcgggcgttttactgctcaaaagcctcaggcgcgtgacgcggactccaagaaccgtgtcttggtcctttcctcgaggtagcctgcatcgtccggcgacacaaacacacacaaatacgtgtgagacttttcttttctccgagcgagttgacgaagacgcatgcaacacatattttcctttcccccgttgtgattcgcagccgccttggtgtctcggcgttctcgagccgcgtgagaaccctgagcacatcatgtccacgttggaaaagagtcgccttctgtagaaggtcctgtaactttctacccccatcacgccgaaaggatttgacgacttctctgggactacttcggtgactgggttgcctagaccctcccttcagcgtggtccaggcgtgagagcatacagtgcagcgcagtgttctcttgttcttagagtttgtttttcgcgcttccccttcggtcttttctgagtcagtgcctgatttgtcagctacacaaagagcctcgcaaacgtgaaaaaaacagaagctctccacgacacagcgaagaccatctcggcttgcagcgacctttctgcgccacagaggggacctgacagaaaggacttgggtacacagagagcggtggcctggcgacgtctctttctccggggacccta

SEQ ID NO: 3777 - DNA, 2525 bp, Toxoplasma gondii
  source 1..2525: mol_type = genomic DNA
gtggcagaagcactcgaaaagacgctcttggagagtgcgacttagaccccgaaatctacactttcgcacatacacatgcagccaacgacgttcgctcacatgcatgtatagacctacatacacataaacgacagactccttttctagtcatgcttgagcgtgaagattggcggttactccagatggcgacatgcctgcctgtgcaagcgggtccagacacgagcatttgctgctgcttcctcgaacattctatatacatgcaaacacacttgctccatgcaggcactgtcgttccctgtagaggcacagatgtgcgtaaagcggagagcttcgcggtgttgctcttttcccccgttcctcacgaatccatctttctcaagcaggaaaaatgctaaggtgaaagcattaaagagagaaccgaacccaagacgcgtgaccctctctctcccatcaggccccagctgctcaagaaacacacgcggtcataggacagcagctgcagcgcgtgaagaaagaaaccacgacatatttttgacacaaggcacagagaatgtcgagaaacactcggtgcaacagaaatgcgtgaaggtacaaagatcaacgtgaagctcgggaaaaactgggaacgatccgagaggctttccccgccgcgggggcaccgcaaagtctcactggcggctgggcagccgctgaaaaccaatcgcttctccaaaagatgccccgtttctctggaagaatgatgaggtggaagtgaagaagaatgtcaagtggaccgcaacttagcaggtgtgctcgagaaccccgaaaaagggccggaaaagagacaagacgggcgacgaaacgaggaaagcggtaccgttttttgagaagcaggtagaaggaacttctcgaaaaacgacatcttgcattcgactaagggaaaaaagcgccggaagttccctttccggcaaaggctctgcaaaccattcccacccccccacaccgtttcccgtgttctccgcgatttttacaaaagtctggaccctaccttcttcgtgcgcttcgccattgtgatagcaagaaagcggagttttcgcggcctcaaaagagtggggaaagttcggaagaaaaccgaggactactcacagagagcaagaaaaatggagctcatcgcacaatggcacgccctctgcgaaaacacgcgcatgctgaagcccacattcgcgttctgcctcagaagatgcgattcaagcagacacagcgtaccgccaaaatacaaagaagtccattcggccctcggcttccgagaaaaagccccgaggtatgtcggcttatatacggggaatgggagaacccaaggttcctgaatgtgttggcttgtgtgtaaggaactctgcccttcgacggccttccaaacgcggaaagacgagtgagcctgtagacgagtgtgaaaatgaaatgccttcaccaagttgtggcttgagggtttccacaaaaacgcaaagagagaaggggtgctcctggaggtgtgcccagccttacaccttctacagcgaaccgttgtatctagtgaatataccgcgcagcaacaccaaaccgtcactgtacaagagaatttaaccgtgtagacttggtctttttgcggcaaaagcgtagccctacggtgatcatggtcggatcttactgtactatgtgattagctaacgtgcctggcaccgggcgtcccttcttggtgcaccaggtcgacttcgtgtttcctcgagttcgtcgctatctaaacgcgtgcgtactgtcttcgttgaatctctgagcccactgcagaacggcggtggtgggtaatataatagaggagagtttatggcgttgatttaaaagaacagctagagattctctttctctgtcggtccgtaataggacacagtcctgttgccgcgtctaagctgtatatagcaccgcacagcggcggcgcacctaaacggttgaaagagctggtggtcctacgaaagggcgtctgtctgcacagcagactctgttggcggaaatgcgccgaagttggcgtggagatttgcgatttgaggtttttctgtggaaagactggcagcgtttttgcagcagacggagatgttgtgcgagagcacggcgcttcggtgtcgaagagaggcgcggtcgcttcgccttcctagccacagcacccacggtctctcggcgcgcggcactacaccccctttttgcagaatacacgcggatgggacaggacaaggacgggcgccgctggggtggctcggactgatgttgcgtgtcaggaaatagtgcgacgcactccggagggtggcacaggtctgcgacaacttttctgaatgcgtgctgcactttaaaagttcgtttttcaaaagcgcaagtttcgcagtgttttccagtcccccgtcgcgggtgtggaacggtagaattcgactcgctttcgtgcgactcctggcgtctttgtgcagagccgacctctcggcagaagccacccttgagagttctttctctttctcacacactcacaa

SEQ ID NO: 3778 - DNA, 3184 bp, Toxoplasma gondii
  source 1..3184: mol_type = genomic DNA
catcttgttttacaatacctggaacgctgagtcactgcagctgggtacggaaaagactggtgggccgagacacacagtcggcttgcgtgcgactctggcgagggtggacgcttgcgaaggtgctgcggtgtacatacagcgggagaagttttgaagggagagcgcgggtggagtctcgtgctggtatctgctggcactcttggaagttttgcgaattgtccgaggagaaacgagcaggcaggctagaacattttcccaagccccttcaagttctgcggaaaaggggaagggtgtaacgtcacccgctgtgctctatgctttaacgcgggaagaacgcgccgaagagacccagaaaagaaaggcacagaaatccgtcctgttagagaaaggcgtgctcgtttgcagcgtgcacacacaaagagagagcgcgaaacaggggatgcagagagatgtggagacaagtaccatattagagtgagttaggcaactgtgtgtgtccatcttgctgatgctagcggaaaacagttggacagaagaggcagaaggaggaaacctgcgcagcgcagagacggaaggagaggagcgatagatcacagtacagacgagacggtgcaccgaacacggactgcacatatccgctacggtgtgcatctccttaaacagactccggagagaaaagcttcactacctgcgcaggttctcactttgtccccctgttcggcagaagagagttcgaccgcaagcaacagcagcgactctaggttttcttcggactgctagaaagctgtttttgagttcttttcgcggcgaactctgtagacaagaaagcaggattggtcgctgtctcgagcgcatgtgtcacgatgttttgtcgtgtagcgcgtccataccgtgatgtagttttaccaacaaagaggtctgagcgagggaaccaggattccaacaaaacgaacagcagcttcttttgcgtaaacgtgagtcgtattgcggttcagaacggagataccggaggagcaggaccgcgtgggcgtcgttagagccatcaccatgcacggtctttttaatccgttgttctggcagcaagaacagatctttgttttcagcagaacagccagaggtgtttttaccaaaggtgtgtctcagcggtagtgcgtctcgcagtgagcaaatggggatacacgtgtgggaagtgaggtgttgcgacttgtgtgtgcgatgctgcttgcagaagtgagcatgtttgcatgtccgcctttagtttcgcacttcactgtttcggagcgggcaagataaaaagaactcagtggtttgtcttggttttctgtagtggcgccgcatcacggaatccctcactcctctcctgcgttctggagtcacaaaaaacaacacaccaggctttgattgcgattgcttcatcagcgctgttactttttcccgttgggatggaagtttcatttcagtgtatatccgtacaagctgggtcacaggcgcaccttcagaaacagataagcctgtcctggtaacaacgcactcgttttgccgataccacaacagccctcgcatggcaacgggacagaggcgctatgcgtcgagtcgatccgtgggatctgtacgaaaagaagcgcgagtttttcatgcaatttctatggttcagcgcggcgtggtggggcattctcctatttcgcaacttgtgtacatgcacactgcgttaactcccaaggcaggacaccccaactccagtcgcagatgccttctaccgcggtggctctttgttcgtacaggtaggtcatttcctgttccctcctgttcctctcggcagcggcactgtcgcttctccgtcacccattggacgtccggaaggaaacgagaaccttgtgtgaaattacctccctagtgggcactgaaagtcccggcttttccactccatgcggcatcgagatgcacactgctttcgaatccaatatgtgtcatacacatgtgtgtatttgtccgtttccggcggtgtgaagccagtgcgctcgaggggcccagggctctgcctctgccagtgtttcgtcggctcccctggttctccagttactcaactttatgtcactggtaagtgacattttctcgagtccaaggactaaaccgaaaccgcgaggctggaaaggataccgttctccggcgttcagttgtttcagaaaatggtggtggagtgccgccgaggttttgcgcggaagtttcgcagtcaaagcgaacagagcgggagccgccggctagccagagttttcagtcgggcaaggggggtcgtgcacaccgtgatgcggcgcggtgaaagcgggaccgcgataaagggcatgagtacaggctgagagatcgtctgggagttgaggagagacccattacagtgaaaatcgtgaaaacagcggtcatttccctaccatgattttccaaagtcttgcggtgtaaccgctctccccgatttctcatcacccaggtgtataaccgcgcaacggttttttttgtatcgccggcccacctcgccgtttatttctaaggaaatcatctcccagttaaccgatgacgtgcctcaccttgtcgcttcctcagtcggcatcttccagagtgatccggataaaacccatgctgtaaaatcgtcaagtttgtcccgagggcagcaccgcgccgcttccagccctgtactagcaccagaggctcgcgtttttcggacgagtgaccgagaaaaggcgtgtgcattttgaggggattagctagttttctccgacatttctccgacagtgacggacacttcaagctacttaagggtcacaggagaaacaaccgcgctcacttcctctggttctcggcgtggttttgcggagagtgcattcccacgttgcagagcgaagccggaagacgctatcggctcggtgtcgtttcccctcttcccttcccagtcgaaacttttgagctacggaaaaaacaaagaaccagcaccatccgtctcctgtgacttcattcctcggtaaaccatctcttccgcccctaggttcgcaccccaatctcgcgttagcagttagaacctcgcgcttgcctttcgggaccaccggtcgctagggtctgaaaatctgttttttcccccaagttcctgcttcagtcttcctttttagcctgtcttccctctgttttgctccgtccgcca

SEQ ID NO: 3779 - DNA, 3048 bp, Toxoplasma gondii
  source 1..3048: mol_type = genomic DNA
caggcataaaattgtcgtagtcacagtcaaaccggacctctatttggctgagagacgttggattcttcccttgtggcagtggattgccagctcacgagccttaagacgatctttcgcttgaaggctccagtccgttacagaccagaaatagggacccgaacgtttctacctccccttgttttaggaccgtatacttcggtaactggacgtcccatcacaagcccagaggggttgagcgaaagaaatcagacccaccttcgttctcgaagacaaatgtgacagtgtcggaatcttcctcgttttgaatgctgcaagaatctgcgttgctgcagagcttgaagactttgcacacactagccaggttgaggccaagcgaccgttcgcggtcgcagcggaagtggacgaagccaacatcatcgagcttcagagcgaccagggcgacgtgggaggaatccatagcctgcatacaaaaattgacacaaaccgttccaaaacatgatgggacagccacagaagcttgtgcatatttacagagaaatgtaagtgatgtattcgcagatacattcatgtacgaacgcactcaagtgtgtgtgtgtgcacaatttacgcacagtcacacctaccatatcgagttacaggcatagatatgtgcgacctgtgaatcagttaacttgtacacagatgaatatctacttgtgtcgtgtaattaattcatggaacttagacgagaaaacccggtcgccttactgatagttaccctaaaccccggcgcacacaggaacaactgcttctggttcgacctcatgaatacgaacagtacactgcgtggaaataatgaagggaactcgtgtcgctttctcgaggcaagcatcgtgcacatttgctgccatcttgttggaaccacaccgggtgtgcgttgccggaaccgaatttccagactactctgcaggccacaacatttctctcagtcttccaaaacgcggcactcatgctcacctgaaggcggagaccagtttcatcgcagtccaggttgacgtcgctgaccatgtccttgatagactcaaacagccggcggaggacgctggcgtgctggagcttggcttccaacatcttcgcgggcacaaaaaaaaatcggggtaggagtgaactggagtcgctgagagcccagcgagggcaataggctcggaataaatcgcagcaatgcaggaaagaaaacaaatcggtggcagaaccgccagaacggcgtgattgcccacaaggcaagacgaaatggacagcagacggaggggcaagcagcaagaacacctgcgaaacacacgccgatcgacggggtaaccgggatgtttcgtgccaagagacagacggacaacggacgacgtaagcaaaccaaagggttcagaggctctctcttcccctagaccaggcgaaaggagaaaacagacggccaggagaacgcaagacaacttcaaaagtggaacaccagtccagccacattgggagggtgggcgtagctgtggtggaagccgcctctcttgcgcagcagatgttcaagtgtacatacagctgagattgttgtggtgcgccgctgacaagcattcgacgacgagacgaaaaccatggacagaacgccagaagctgcggtttgggcgagtgtgcgtgccgcggatttcgtcttggcagtatgggatatcgaaacacatcgagacctcgggtcgacaccggtgacatgaagccacccaccccggaaacggaaacacgaatgcgcgtccacccctctttaccatgcggcgttccacagcgcgcgtggttcagggcttctttgccaccatgccacttttcttgtcccgctcccacgctggcgactcgactctggcggtaccttatccttgcgactcgcgagttactggcgttcttcaggaaaactcctcttttccgctaggtttctctaaacgacgagagtttttctgcgacaactgacgattaacatccatgtgtagggtcaatttgtaccaggcgggggaggtaagggcaaatttcgggtcttcagagggaccctgtcaaagaagctggaccgactttaggcacaggcggagtttggtcccctggcgtctgcgagccctcgctgcggccgcgagaacgcgcgacggcacagttcgttacatgctccggaaaaattcgattcggaaaaagttgactgggactgacgttcttgcaaggtgcgagagatctcgcgacccacgtctgcttactcggttcatcccttgagatatttcctctttttggcgttcttgtaagataatgggggacggcaaaacaacgtcgacactgcgacagtagcccagaggctacattcgccccacacaaatatatgctctagccattcgttcgttttaactggcttttcttctcttgtttcgtcgttgtgggtagttttctcgtctttcctctttggtttctttcttccctttcatttccaatcttttgaatcggtcggcaagtcaccacctgcccctccggcgtcactttctgcgaccaacaagaagcgttcggcatttctggacgacgaggtcttcttttcttcttttgtttatcttctctccattttttcgtccttttgcacatctcaggtttacgcgcggcgtcgtccttttcatttccccagtgtttttccgggttcttgccaccccttcgccttccagttccctgccgcccgtggacgtttcccgtttgacgtgggtctctctcgcataacttcaagcaccgcaactgccgccacaacttcccttctgactctcctcgccttcctgtaaatagctctcacaacgctggctttttctctcctcttccgccacgcattttttgtgccgtcgttcgccatcaacctgctttcgctccttgttttctccatttctgtcccattcctctcacgaacaacgccgcgattgcgtcgctggcttcgctgctcgtatctgccttggcatctgcccgtgtgttccccgttttttccccagttgtctccggtgatcatgtcctgaatctcacacaaga

SEQ ID NO: 3780 - DNA, 1293 bp, Toxoplasma gondii
  source 1..1293: mol_type = genomic DNA
cgaggactttgtgtggatgggaacagtacagtattttccgctacagtcgcgggcaagagaaagacactcggagcgatagacagaaaggtgataagagaaatcgtgtcgttgtgtgtggttcaggagaggaaccttttgcaggtcagcacgatagacatgacttgtgattcacggagcacagatcctgcggcttatttagaaaagattttcaatcaagttgcgtcccttactgatccagtcagttcgggtaagaccttttcgcacggctggttgccactcgaacgcggcgttccacgtacctggttgatgtcctttcagtgggcttttgaaaggacgaaagagtatcgatgggcctttctccacagacagaagaggcataatcggtgcccggacgagacagacacaactcgtcctgccgccaaacaggcccgacggaggcccggcgtcactgggagtttctccatctttagaatcgtcacaacggcgcttgctgggggacgaggagcccagcccgataccagtcctgcagatacacgggacatacaagaggctggagaggtgatccagcaccatctcggctcaagctgctcacgtcagtgatctccgtgtgtgattaggttgaaatgcccgaacgtggcgtcttaatagcgacagagtttcgcaaccagacgagcggatagtctctggaatggcatacactcagtgatgcaagaaacaattgcgccagtgtcaagaggcgaccgtcacctggatccttgcgagtgactcgttctgcgaaactttgcttactgagccacgctcagggggattcttctcatcgcgtctgttctttcggcaggacaccatcgggtgggggcgtgcgttactcaagcgtgtatgcagttgcgagcctcagcgatagacgcagtcgagttgccgtggcatttttgagcgctacggaaacgagcagaacgccgaaattcaacggaacgcagaggagggacggtccgcaaagaaattggagaaagccgtggccctgctttacacccaagggggaaaaatggggggaaatgggacgggactcaactcgaactgtggacagagaagtcgaaaggcaaaaaccaactcaaaaacgtcccatttgcctaagaatagacgcttccaagtgtatggatgaagatgaacagcgacgcagattctgtgacactatcgttttacacagtgcactctgacaagacaagccctccacgaaagcgaaatcccgacgacttgcatgcgaaataagtggagacatccggaagatatcgccttcca

SEQ ID NO: 3781 - DNA, 2417 bp, Toxoplasma gondii
  source 1..2417: mol_type = genomic DNA
gaagcaggcatcaacatccgtgtgtgtcttcagaaaggaagtatagcagggcatcccacgtaaatgggcatctgacgtttgatggcgccagttccattattatgctgtgtcgcgagttaagcggctgcacgtcgtgtcacacgccgctactccacattatcgcgccgtagtaactttcatgaggccggacatcacgtccaccaaacaaaaatgtgagtctcgggaacccaacagctctgcaaaagggatgactaaaaatcggcaggctcttctgctaacccatacagacactgggtgcatattgtatccacccaggtattcgatactgcgcaatgactgcccagaaatgcacttccccctgctgctaatgcacacggagcagcgaaccccgtaagcagcaggataaatggaaatgcctggaaggcaaacgtcgttggcgacagtttccggtataatcacactttgtgcgaagtcactgtgttcaaagccggcattcagacgttgcacatcggtgtccacggcatgtttgcctctcgttctatggtcgaatggattgtagacaacacacggtctattcgccttttcacacccaggttcagtaaagagctcagagctcaatgcatgattgtgccattttgccacgtgaaacccatgcctagttgcgaggtagttgtaggttgctagcactatggtgaatatgtggccgcaacgaaaataatatcgagtgagcccgatggctcacacgatgctactctcgggtgtcaagacacgatagtggtagctatcaactcagaaatgtgttttttcgtgaatgactggtggctacttatacgccaacgcccagttgtgtcgcatttctatttcagaagttgtttcattctattgtcagaatgagatacgctcgtggattgcttctggtttgtgcctgcgcactctgccgcctggttctcgaagcaactgctgaatccggacgggctaccattcgggtaactcaagactatgacgtaagtgaacttgcaatggctgaaacgatacagtttacagtcagctgtatttcaggaagatgaagccgaatcgcgagcagaaagtgcgattgctgacttggaagaagcggacaaacggtagcccttttcgtcttagactgtggagaagagccatcatattattctgagatgctccttttgaagagaagaggaaatagatgagaaaatacagtcaagtcacgatgccgctgatgaggctgagattgaagaggtgaattagttgttcgatcttgataaaaatgcgagctctgacgcagagtgcacaggaagtcgctgagacagcagttgctgaaaaagccatcgctgccgaagatgcagtaagcagctttccgagcctccctctgctgaaaaagcatgctcatgactaaactctgcagatgcacaatgcatctccagacggaaatttggagagactcatgtccgaactcgttgcggtatgatagtcgcactacctccccgcgaaacaacgatgattaatctcgtcgtcaggcaacgtacgaattgcgctcggtcaaccaggtacgtctggcgggtagttaccttcaaatgccggtagtaaaactgcgcaaatgttcagaagctgaaactgcttgactaaatctaaatcggtcgagaggaaacaaacaaggcgggccccacgctgacgggtagtcagaggaaggcgtggaacaaatcggagccacttcgtcagaaaccatacatagagatggaaaggagcgcgtgaacaatcaagtgaaaacttgtcgtactaaggattatagtacaaagtgtggtagcaaacaggcaaatttggcgatgccgtttcttttgtgtgttaatatctgtggggcgttccggatgtttaaaccacaatgcaaagtcatgtcaccggttaactgttcgcgtctctggttttccccagtgaattgtagagactgcggccactccaaacggcaagcgcacaaaccttccaagcccgtctgcagcataaccacgccctgacagacagtcaggcgattgttctcttggcaagccagaatactgatagcgctactttgcacgcaaggacgttaaccgtgttcacatcctattaccccgctagtgagacgaattgaaagcaaaagcatggttctgtggtgatttttgcctacgacaaagggcagcacgcatgacacagcggtgaatcgtcggcactgaagttgtcctctagtgactttggctttgcctgacttgttgctttcaacaaaggagacgtgcacggacgtttcgttcttgaaggcagcggcgccacaggcagcaaaggaactgccagtccttaaagaacagaaaggcctgtgtccctctaacggtcgccacgctagatctggaggctgagttcaatactgtgaaacaaga

SEQ ID NO: 3782 - DNA, 4240 bp, Toxoplasma gondii
  source 1..4240: mol_type = genomic DNA
cgcgccagttagcgtcgaagtcatctacaatacttacttccttaattgcaagtatttcgaaaaattggcgttaagctgcagagcaaatggtgcacatctcgtccaaaagacatggaactgaatgtcggcatagacgcgatgacagacaagtctcgaagtcaaaatctgctgcttcttcagtctcgttgtcaagatcactgccttgcggcttttcaatagtcatggtgttttaaataaaaatggtgtcactctcacgatctctctacaccgtagctcaagagttttttctagcgcattttgtggtgctaaaagtaactttatcccaaacctgtggtttttgcttatttctgctgttagcgtaactataaaaaatctctaacaaaagttgacgttttcaagagaagtggaaaaggtgctcaaggtctgattactgtttcacgtcgatcatcgttttctaaaaaagaattgcgatttgataaacggcatatcaagagtccgaccagcatccaccagggacgatcttcgccctgcaaggattttcctaccttcggattttataatagacctgccgtctacactttaatcctccaacaccccgttctcttattacgtctgacttagaaaagcaatgaaggtggcagtccataaactctgtcggcagtgccgcgtctgaggaggagctatgctggcaaaaaaaaagagaccgcacaaagaaaggacaacaacgaaatgtcgaaaactagtcaagaggtgtattcgtgtaatgaaagaagccagataaaacaaagtatgtgccgatgtgggaaaaatggtaaggtggcgtgaaccggatcaggtgtacagttgtatcgttagtgatggtatttaggttcataagaggcaaaaggtaaacacaaacgtgtttcgatttaatagctagtaatgacaggtcaattcacgcaggtcaacgaagggagaacaaacagaaaagtgtgttataatgcgccaagtacgtggtacggagatgttttgggtcacgtggatagatcagttaggggggcagggcgcaggtgtcaaggaaagcgcagaagaaagcttattcttgtgcatcatatatgaggagacgtggatgaattcaggcgtatagctggatatggtgtgagctaatccatgcggcgcaccctgtggacaccatcaatggatattgtgtcatgaaagacactgctgtacagcagaaagttgtgtggaatttgatgcacatcccttgatgaataaattagaatacatccgagcatattcttaataaagaggagaaatccgcctgcagttgacatggtagaaagaccgaacatcttgcgcggcagcttgtcccctggtgagtgaaactatccctaccccacgctgccccagcaaatgacgagatcgttgtaaaaccaagaaaagacgttgacgttgttacaaggaaagtcagtgtgataatcgcaaaaaacaacatacaataataacagcacaagcaaaagtattgcacaagaatgtgagatccacttgtttctttccgactcgcctgtgtcgcttccgcacctggttcagccgtttgacccctaatacagcatgaactacaaagccatcaatgagccttttggtgtaattatgtaaatctatgtactgtatatatttatacatatatgaatggaaacgctcctcttacaactcattcgtctccccagcaactaacccgacctgtcgtcttattggattatcagttatgtcttttgatctgaccctaagtacgcagtaagctaattggatacaaggaacatgacaagcattgatacatttacatagacgacaaaaagccatcacgatagtggcaacacaggtgagcggcagcctaacgccgttccgcttagctgtgtgcaagtgtgaaacacgacatcagtcacgaaccatgagaagaactggtgccagcatgttcacgtagcatatcctaacggatacggactgaccgctaaaaggcgacaattgacacagctctaccccgtatgcgaccagcttcacacggctgtcgtctttctgactggctacaatgtaggcaccagttgaaccaccccgcttcacgcacgctgctactgaccaactaagatccagttttgttgttttttctttcgttcctgtaacgacgacggcagaatcggtactcgtggtttcccagacgtttcctccaccgtaagaggagcagctcttcattaaaacaatcgttagtcgaagagagtctcccggagtaatcttgttacgcggtggaagtggcacagacagttttgccgacatctgcactcttcgacacgatagaaggagagcatcgtccacttacctgaggtttgtaattctctaggagggagaacaaataaatctacgggaaaaactacaacgctgttattcgcgctgttagtcaccgggtagtgagtgcccagatggatcgaacacacacaccgcgttgttagtttcagcagacgttttctttttgtcatgagcatttaccggtgtcttcagcggacgcttgtatggaaaaaaggggaactagggaagaacgaaagtggccagtagttggggcaacagcaatttcaaactgcaagtcatttttcggacgccactccccttccataatcgctgctaattggccatctttgacctgcgttcaacaaagcatcctcctgtattcacgtcgcgcgggctgtttgtgtgtggtttcggccttaagctgccttacacatctgccgatatctgtaccactacttcggtttaatacaaggttcgtcaaactgctaagcggtttgatcaccggtgcggcctacgcaaagactgattatttgtgtcaccatcaccttcccctcaatgtacacatactcgggcgcctaccggtccaacagtacacctgtaaccactacttggctacggaataattgctcgatcaacgcaaccacacgatagaactagcaccctgttctggctagaaatcccctaccatcggcgtcgaaagccactgtctcatacagacgtttcatctcacaaacgaccgcacacaggttccaacgctaggtttcttcgactgcagatgtgatctagctttgcaggatcgggtagatcgtcctgaactatgaaggcacggtgactgagctttaccgttcccttggacgacgagctggtatgggtgaaataacggatgagacacggcaacagcatttgtcggaaagaggcgaaggaatgacgtccgaagtaaacgttggtggcttctagtgaagcctaaaagagctgtgcaagaaattgctgcggtttcattaagatttgccggataacttcttcaaacgatccatctacgcgcccccaaggttccagatatccttaagcgcgatcaatttaagaccgttcaccacggatgcggcgagcgagctgaatgtccttgggcatgatggtgacacgcttggcgtggatggcgcacaagttggtgtcctcgaagagcccgacgaggtaagcctcagcggcttcctggagagcaaggacagcggacgactggaaacgcagatcggtcttgaagtcctgggcgatctcacgcacaagtctctggaaagggagcttgcggatgagaaggtcagtggacttctggtatctgcgaatttcacggagggcgacggttcccgggcggtatctgtgcggcttcttgatgcctccgctcatgggggcagacttgcgcgctgccttggaagccagctgcttgcggggggctttcccaccggtggattttctcgcggtctgcttggtgcgcgccatttcgaaaacttctccaaaaaggacaatagggggaactcctcgtagggggaaagaagttgactttcgacgatggaacgaaaaagaatgttagtgaccgcagcgaccggcggcccgcaacgtacaccttcccggcggccacacgccgaatccaaccggagcgacgaaggaagacgagccgcggtcagacgcacctttcccggaaacacgccacttccacccgtcattcccactcctcggtcggggggtggatcggcgccgctgctcgctgaattttgggctgccgtcattcgtagaggtgcgtcctgagcaactcgccactcttttcgaggagctagccgcggagtttgatcaagaaggcgagggtgtgacgccgagagcggcgtcttgaaatctcccggacggacggcggcattttgcacgcggccaactgggggga

SEQ ID NO: 3783 - DNA, 4579 bp, Toxoplasma gondii
  source 1..4579: mol_type = genomic DNA
atttctccgcgctacggccacggcattctcttggcaaatttgtgaacacagaaaagtgaaagttcggaaaaaagagagaagctgctcgccgaagaaaaagtgtatccccgcaactgcctccggctcggagtcgatgacgacttcatatatcctagcgagacgcggtgtgaatgtgcttcgtgtggctgttcctttgcatgcgtggctttgcatgcacaggatttttcccgagattggtgggggtgtgcgccagacaacgctgtttgttccagccacagttccagaggctgagaatacccttttcgcagaaacgcgacaggtcaaaaagacaggcttcctgctcgtcttttgcgattctttcagtcccgaaaccctcacggcgtcagagagtgttttgccccgcaaacagacagtttttttgacctgtgtggagaaaagtgagttcaaggcacctccgtacgtgtctgtagagagaaccacgcggcccgacactcggctagcgagcttccactagaggttcgatgaacctcttgtgcgtaacttccttctaccgcaaagaaaagcactaacctgtctgcactgtacactgccgcatacctccaagcattcgcatgtccacagatttgccagtgcatgcaccgaaaacaaggacttcacatagggtaggttgcggagccgttgtcaggggttattgtgatatgagacactcaaaaacggaggcgaacacaacgctcgcttgagtcaactcatgcagtttcttcgtcgctagactcgcacagtcagcgcgaagtcgaaactagttaacggggatcccggaactggaaaaacacccttcagttatgccgagctcagttccaatacacacctgttctgcttgaatagagaaatgatgcgcgtctgtgtgccggagaaaggccggtgttttgctgtctcttcctcgactctggatttagtttcattccctgtatccctagagtctttctcccggtcttcttgtctgcgcggtgtcgccgcaacttcacgtgtgtgcaactacttgctcttctttccttttttcgtctcgggcctcttctttgcatctctcgcgtctttccctcgaggagatgtcggggtcttcccctttaccgggagcgcagcaggcgtgggcggtagggggagaggtgggagtggaggcgcttccgaaatccgaagaagatacacgagagcatctctgccgacgcactggtcttcgaggctcttttcggggtctaggcgactgcctctgtggacgagaatcatgtcatcttcctcgacacctagtcgggtcctgatgagtctcatcaacacttgcacgcgatccgccgcaaatacctcaaacccctgagacacacagacaatcagagaaatatggaatcatccgtgactggaccagtgtgccaaagtgtatctgggaagctagcgtccaacatatatggatagacagacggacaccattactccttgtgtaatttgccactcaaacctgttggattcgagaggcactcgcagcgtgttctaagcatgcccgggcgttccagaaaagacaacataacctgggcctagggaaattgtgggtatctacccccagatatatatatatatatggataaagggggagatggcgactttctggtaaggggtaagcatgtctatgtgcttggtggtgtacggctgtattcatgcagctgcgtccaccgacagggtttagagcaacttttgagtgagacgactggcacaccgaaatgcatatctgtgcatgtgcacgctcgtacgttgggacgtgtgcggttcgcttgaactcacgtgagtttctccagtttcggctagaacgacgaagagccttgtgggcatgccgtaggttgcggtgctgatgtacacctttgtttctggctgaagcacgtaatcgtcaattttcttttccatgtcgaaaagcaccccgttgctggtcagcatcacactggggagcccgtccgcgaggccgttctgggatcccgactgtctttttcccggcaaagaaaaaattccattttcccagaggtagcggagaagcatgctgaacgtccagtcaccgtgcgcctcgatatactgccctcggtcctcggcttctcccgcgctgtcctctggattgacaatacacagcctcattcttggaaaccgaagttcttccctcaggagagagagagagggaagcaacgagagagagacgcacgccaacactcctaacccgcaagagcatagaacaactgttttgctttcttctaaaccttctcagagaaggttccccagagaattccacgaaccagcgtcgctgatgccgaggaacctatagagaagcctacagaggccctctggttttcccgagtttgtttccactaacgtcttcccttccgtcacggtgtttttctccctcctctctttcccgttcctttgatctgctctgtcagccgttggcaggttttcttcccctgcttgcgactccggcagacccacgggacccttcttggtcgctcacgataagcccccgccgtcacagagtgacttgcctgcggggagacgaaagagaaaggaagaagccaggtattggaaatttccgaagcacgttcgttgtcgcgtgcgacggcgagagctcaacacgcgcaccgatttcacatgtagagacaagatgaacttttaccagctgaagcaactctgagcgtgacgcccagccttctccgcgatgtgtaacagcgagtttgcctcgtatacgctgtctacctccgcctcttcttgagcaggtggggtaagaagaacacctcatttgccagttggcaactggcaagacgccacgctctctgtgtgcgataagagggcagcactgcgttcgtctttttgataaagttaggctcttcttcgtggctcagagggttgcagttagagagtcgtcgtcaagttcgactttggtaagtgtctgcagggagagcgctggatctgtgcagagacacttcgttttcattaagctacgtcgctggcattctttccaggaagctataaagaggcaactcttcctccacgggacaagactagtctatgttcttcgcatagggcgtcgccgtcttccaactattcacagctcgatgcaaaatctctgcagagttcttcaccaaacaaaggagaaccggacggacagccaccccatgcgcggagtgcgtgcgcacgtgaaactgccgaagtttcctcttactccagcacgcgatacgaattatcaaggaatagatgtaaagtgcacgattacaaacgcgattctgctcacacttatttgtgtatttgcttctacggaagccatttgggccgtcttttgttccggggggggggtcttgagagcgctcacagttttgactcttgtttcgcggatttctctagagttcatcggggacctcccgaggtgacgtgcgcaaaaaggagacgacgcttcatgcagaagacccaaagaaagcaaccttggagttccctttcacttctctacacggcagtacgagcctaacggatgcaaggcatactcgagactgtagtccgtgccgtggggccccgcactaagcctcgaactgcagcatttccgaagtttgtcataagcaagagattgagttggctgtctcttccccttcccttcagacaaatacacacttatccatgcggagagatttacgtattcacatgccttttttaaggattcaacggaaaagaccctcccgtgagacgtcgcgagttgaccaggaaggcagcgagtgtagctactcgtagtcaactggtgcatcgagactcgcgcatggaatacagacagacacgctcctacgtagcatttatgtgtatacagagttcttgaatcactttgtaaggtctgtgtctttgggtctcatgctctttttgaaatagttgactgcacctcgacgaaattggcgccggacggactctcccgactttgcgcaggatggcttattgaacaagtggctttttccgatccccgcgattatgcagaaacaccgcagcaaaataaaaaaacacgtggaaatgcacgttttcggaaagagggtcgtttcgttttaaactgcatttcagcgaacagcttgccatggtttgaactccgcagtgtccctgtggctttcgagggcggacaacaggcccgctgaacacgggagacgaatcgaggtcgacatgagagttcctcatgttcaccatttttttctctctgtctttcgcgagagatagcgcacaactccgaagcctttgtcgcgtattccaccgcgttctgcctctacgaggagtgctgccgcggagctaagcgcaaggcatgcgcggttctcatttgcgtcgttcgtttccgttcgggaaagcgattcgttgcgcccgtggttcttttgtggaacttcagctcctctgaatggctgaatcatacccagccatgtctagggaacctaagaagcgcgaagggaacagggcgtgcagtttcttttgtcgggtgttttcctggggcaccctcttccccgaaaagatgcgtgtttgctagttctttctcccgtctcttcaa

SEQ ID NO: 3784 - DNA, 2469 bp, Toxoplasma gondii
  source 1..2469: mol_type = genomic DNA
gctggcatgttctgtgaagagcagagttctgcccttttcttctcccgcctcctctcgcgacttcgttctcgcgctgcactctctcctcttccctacttctcccttctcctttgcccgacctctcgaagctttcttttggcacttcgagttcttttcttactctgcatgcggtgcgttgctcctcttcgtgaagctcgagtttgatagtgccagtctcgtcgccagcgagaacttccgaaaaagttgtgacttcgcctgagaggacacaaacagcgaaacaccgcttgactgtgtgcgtcttcaccttcgcaccgaggagagagaagccccccacagaggaaatcaagcagcgaaagaaactgcggaagagggagagagaagtaggagaaacaaatgcgcagtgagagacacacagagagaagggagagaagagaggacgcaggaaagagagaagaaaagagagacgaaacgagagagatgactgggagagacagacagagaaaggtgaggaaagcaaaggagcaaagcatcaaaggtgagaggaaagaacgacggtggatccgcgagctgcaaagacctccgtgtgtctcgaggctgctcgtcgcgttggcgtcttctgaaagaaagaatccccaaagagcgcaccggagaataacgttctggaactgaggaggatggtgtgcaagattctaacaacgcagttgacgcctctgtctccaggcctcaggtctgcaattttcacgaaggaagaaagagcctcctccccagccgcagacgcagcattttctctcggctggaagttctttggccacaaggagagaggaccagacgccgcagaaggaaacgctggctgaacaaacgacgaggcgacagaagacaacgcaggaggagggggacaagagagagaagaagagagagaagaagagagagaggaagagagagaagaagagagagaggaagacagagaagagaaagacgaggaggaagaagaaaaggacggggaggaagaagaaaaggacgaggaagaagaagaaaaggacgaggaggaagaagaaaaggacgaggaagaagccggggccatggcgctgttttttctgctagccggttggcgagcaacaagtgagtagaagggtgtcttctctgcagtgagcttttgttttcttcgatcgttccgaaccaggttttttcgaaacaagaaaaagatcttctgttcatgttttttcgatgtttcctcagctgtctgtcgaatctccccctatatatacgcctccagcgcaatcgaaacgcgtcgatgtttcagaaaccgacgcagtcgacgttcgtttccttctcatgaggtttccacgcgtttccgcagcctgcaagaacgggagcaggtctgcttcggctggacgcccaacggccggaagatgcgcagctcccccccgtggatggcgaaccgcatgaaaaatctctcacgcgtgtctcctctccgcgccaggctccactttcgcttttttcgaccttgcctcgctgagttgttcttcgcttttcctgtttcttcttcttgaacgaaaaagagggtgtgtgtcttcacctcccgtctttcgaggcttatcccctccttgcctgcagaagtcctttttcgcctgcaggctcctttttttgagtcctggcgcgcgtctcgtgtctctctctcactgacacagctagatcgtcgcgaagaccttctgcctcttcctctcgtccgttctgcgagcagatttctctcctttctcgcgctcagctactttttagaggttctttcgtctctctcctgtgacctctcactttccaagttctcggcctctcgacagctatccagacgagcgagcagcgcgtcggcatgtctcggtgaagggcgcttgggagacgtttgactctcggcgtcggctttttcaagctcggaaaaaagaacgcaagaggaaaaagtcttccgaacacttgcgagaagaccagaagctgttcctaaaaaacagttatttctgcgtcgtcggagaagagtgagagcagtgagagaagagagagaagagagataagaggagagagcgagaagaaggaatttttcagggatttccagtttttcaaagaccgcgccgttccggtttgtggggtcgacatcctggaggtctttcttccggtgttgaggcaggaaggaaggaaagtgagttttgtttcttgtcttcgaccttcttatttgaagaacgacgaggactaactgcttcttctatctcgtcggattctttggtgatccctcctttttcaaaaggattttcttcaccagagtcgacgctcctgcgacaagacgccgccccagtctgcatctcgctctttcctctccaccttttctttgtcacatcttctttcatctcaccgtctccgtctctctttcctcctttttccgccgtacgattggaaactttcaaacagagaagcagccggggaaagcga

SEQ ID NO: 3785 - DNA, 2035 bp, Toxoplasma gondii
  source 1..2035: mol_type = genomic DNA
catctacgccttgacatgtccacagacgaacgaccttttgcaaatctgcgcccttcatctgactgacttcaactttcctggcttagattcacatagttcgcacctcggctgtcgcgtctcccgcaactttcgcgcgtttggtcggaccctcagggtcgccgtggtttggactcgcgggggcggcccggacgtcgtcgtcgctgtcgtttccaccgtcactgctgaagttcgagagagaagaatggtcgtctgaagaagcattcacgtcgccgtctggttcatcgggcgcgggaaacgaagaagagagagcagtaggaagagacgaaggaaacggagacgacgaagagggtgtgacggaatgggcagcgtatgggtgtggaggtgacggatcgagagactcgacgcccgtcactgcagggaaagaagtggaagagggctgcagcgacatgcttgtcactggctgaagcggaagaggccgtcaaaggcacctgcgagtgactcgctttcgtgtctcacagctccttgcgcgagccgagccccggcgcgcaagacaggcgtcgagaaatcagaaagcaggacgaagcgaaatacagaagggatatgcgaaaaagagaaaggggagaagagcgacgagaaaggaaacaaaagagtaggcgaataaaacgaaggagggaagagtgacccaacacagaaaggaaaaggaagagagggggggacaaaagaggatccaattatggaatgctaagactttgggactggtcctcatttgaccttcttgggaagcatgcccacttttaagacagagacgtgtaccctcctaacagaggcagcggtctttcctctcttccttcgtctccttgcattcactagtttcctagtccttctttagtccaccttcccttctgtagttttcttctgtcgcatcctttccccgccgtctgctccctgtagcatttcatgagcgttgtatccccagaaaggcggctcggaagcacagcaacgaatcgtactaattccaccaagcgagggaagagtgaatagaaaagatgaagaagaaacgccaggtgtttcgtagaaagggagggaaggtgaaggagagagacaagacaggcacgatgcgagacacgcacactcagccgcttcctggcctgcggctcttctgtttccaatccagcgcttccagagcaagtcacctcagcagagcctcagtgcctttagccgcggaacaggaaaaataagagaaaagagaaggagaagatctggaacaaggggagggttcgtcgttccttctttgccagagaacgcgcgtttgcgtttgcaacatagactgcatgcatcctgcttgcgcgtcgccgccgggactgcacagacgaccgagagacgagtaggctcgtacggttttctcctacttcttcacagaagcgttttttcccggtggggcggttgactgcgcatttccgttttcccttcctcggcggtttttcctctgcgtcgctctttcttctccgctctctcgcttcgagtccaaccgcgggcgggaccgccaggggggactttgattttttctgggcttggcgcacgagatttcgcgttttcaatttgagtcgcgcggcgccgaagcagtccttgacaaagcgtttctgtcgacctccgttggagggtgaagaagcttttttctttccctggcccccacgagcacactccggtcttgcgtcgattctatcgcgctctgttcttttctgtggcgctctgtccccgatcgcggctgcaggggtctactcgcgacagctgctggtcgtcacgcatagatggtccacaaagcttgtagaggtccatagacagggtagcgtgctggctcactgatatgcatacatgccccgattcatggatccagtttgcatgtatatatgaacccaggtcaagtattctgagtatgcgttacacgtggattgtctcgttcggcgtcgtctgtgtctcgaaagggtatgcttcttctatgttgtttcccagcgtttcattgttttcgatcgcaaaa

SEQ ID NO: 3786 - DNA, 1842 bp, Toxoplasma gondii
  source 1..1842: mol_type = genomic DNA
accatatttgcattgcacgcttgaaacctgtcgaataaatagtggaaaccagttagtgtgtggacacggattctagacatccgaggagctgtcatacaattggggaggaaagtaaaacatcagtttcgagatgggaaaccggtcaaggctttgtgctgcgtccggttcatcttccagcgaacgctttccaccgaaactcccggcggtgtggttcctgttgacttagaactcgcacacccctcgaaaaatcttgggtttgaatgtatggatccgcacgaaatcatcttcacagtcaaggaacatgtaggaatctacacaccggaaggttctacttcgtttctttcgcgttcattcgaaacaaggacaaatggcgacctccgaaggatgtagaaatttggcaaatgagcagacagtattacgcttttttcgcgcgtgtggggtactccaaaaacggggcttagcacttgccaatgttgtaagcggcaaaaggacgcgaaaatggtgggagcagcaaagacagctaaaacgccacagcattaatattctccattaagattcatatgccgaagaaagatgcagtgtgtagaaacctgtgaagtccgtattctcatctgtaacagagagactagctttagttgttttccgacacatcctggatcacccgcgttactttgtcttctaaccgttctgtcactactggctctctccctgagctgcacgtgagctcatgctggagcttcgtatggatagggttaccctggtacactcggaaatgttctttgaacgcggctggtgtggcttcttgtccctgggtgtttcctctcctccttcgacacgtgtttttttctgctttttcctgcgccacccgctgtgcctagtatcgaaagctgtagagttgccaccctgatcttctcccttccaactctccgcttcgacacaccccccaacgacttgttgtgaagctctggcccccctgtttcggttgtgacaggctctccaggcgctcttgcactctccagtccagctggtgtcatagaaccgttatctctagagtgccacgaaagagccccctccttttattcgttgtttcccctgggtacgagctatcttgtggctttctttgcttggggatgacccttgtcgtgaccttctatgcgttctcgatgagaaaccgtcgactcttcgttgcatgcaggggtttctgcgcgaagatactctcccacagagccacagaaagtggtagccgctgttttccaacgcagcgtacgtacctagagatccttccaggaaacgctgagcctccgctgtgactgattttctgcacgttggcacgtggatatcgcgatcccctgtcccctccactgcatgcagtgtggcggtaagacgagggccatatcgatcccatggcagctgctgtgtggggtgccgccatacgtaggggtacgatttctggtcctgcccaacttcccgcctggttgattcgagcaacttacaaggacaaggcaattaaccatcttgctatttttcctgttttcgtcgtcatcggctgtcctagctctcacggctacccatcgttttcccaagcgctgtcaagtgatgccattggttacactggacaaaggccctgcaaatacgcgtgcctccatcatcgatccccctttatctactttctcgctttccgttatcccttctgtctgctttttcttttctcggctccatctcattcccctcgttccttgtagcggccccggcttctacgttccgcctgcgattcccgtattggtcacgcctccacaaggcgtattccttttttcgtcggacctttccacagggcttctaaaa

SEQ ID NO: 3787 - DNA, 2954 bp, Toxoplasma gondii
  source 1..2954: mol_type = genomic DNA
tctgcgtaagcaggtgatgtgcgtacgccaagtcgaggaaacagagcgagagacaggacctggaggtgaccagctgaagaaagacgacgcgtcaccggcggaggccggacagctgcggggacgagaagagggagagggcgacgctgcggctggcgagacgcaggcagagacagacggcggagcgtaaataaggaagggggaactgggcgttgtcatttgaaggagagactgcacgcggtcaagttcgcaggagaaagcagacgaacggagtccccaccagtggacggagagaaacgactcgcgcgtctttgttgtgggtcgagtcaaggcaccgagtcggcagtctgactcttttgcgagaagaaaccgacgcatgagctgcaatgcgaacatgagagagcaggcgcagtcaaggaaacagcgacgttggagtacgaaagcggaggtttccggcccgcagcggtgaggaagaacaggatagtggagtccgtgaggcggcactgtgtctgagagaaaaatctggttcacagacgagacagtgctaccccgcacatgtgcagactcgcggctgtatacgttcgcgtctttgccgttttttctccggaggcgaaacccagcggctttgaacggccacaggcagtggttgtgtcgtcgatttgtgagaggtcctgttctttcctcgaactttttcacacagatctccccgtcgtccccgcttctgagtgcatgcgacgcgattctttcctctcgatcttttcaggggaagaacagagtgtggagagatccacggcgtgccatcgttcacggtctcgcgtagccgctctgctccagtgaaaaaaaatgtccactggatgaagaacggcagtgaaggactccgatctgattttttaaaacgcagtccgagtccgcagcgacagaacatgtcttgtgaggacaataggagtccgcctgattcaccggaaaaccactccgctcccgggcatacgttcgcgcgtcgccagtcctcgcagttcagatgtggactcgagatcttccctttctgtgtctctatgtcttagaaaggcttcagacgacactccgcgggaagcggaaacgcctttcaagcaccgttcaccctcacagaaaagcacaccagggacgctagcttcccggcgattcagtcctttctttggggaaacacacttcagttctcgacgcccatgttctcttaaagaacgaggtgccatgcgacctaaccagtaactgaaagcggtctctcacagaacctgcagtgtccgtcgcttgccactccagagccgcttgcagacagcgacgtgtgggggattcgactttctgagaactgacgcgacatccgacttcttgtactttcagagaattctctcagtccagccttcgtcgcagttttcttcgagaaacagggaacttgaggaactaaacaaacgctttttcgagttctcagtggacacggaagtctctttcccttccacgtgcttgccatgtgtggcggcgtcttatcttaggggaagaaaacgaggttctacagctacagggtacactgtcacacattcagtgtttgagtctgcatgtcgcttaagaacgacctcgtctttgaggtgcgaaataagcgacggatactaaatgggcacctgtgaagaactcgtcttcagcacaacggttgacgcgcagcgtacggaaaccacggtattccgctgggacctgtctaactagttgttggccgctggcaaaaacgcctcctccactcgtggttcgtgtgaaacgcgttggctgttgcacagcaccttgtgcgatctgttgaactctacgcgaaaaagcgaaatcgcagtcggcctgcgacgccgacacctggaataccggcaagtcctttcaaccgtttacaaggaaagagaccgacacaggcgtgtgtccacgtttctgaaactctgtcgcgggtgtggcggctcctgcagataaaggaagcaagtaaggtttgtcggtgaagcaatcggatgtggttttcagagttgtctgctgactccccttccacacacctggaaaagatgtatttaagtgtgaggaggagagatacacagagcgatatcaacgccacagaaggcaagacacaatgcagtacagagcagcaaggagctgaaatacgcgcgggaaccgacactggtggctgttctcctgggctgacgacgagccgtgaagtcaggacagactccgaccgacggggctgatcgtgggtgcctctgaccagttgtgttctcttgtaaatacgagtggagacaggagtccagagagtatgcagtgaaaacataggcgatgtgggaaaccatcactgacgaaagtcagcagagtcgacgcagacagaaagaaggcgacggacctgattggccacaaccacccgtctcggacctgcccagctgtacgcattgatgcaagatgaatccgcatgtcagtcgggtaccacgaactgcctctcaatcagatcaactgctgtgtatcgagacgcgtattttttaggaacctgccttgtcctgtgaacagagagtctcgagagtgccccggtgcgctgctccctagtccaggctctctgcttcccggtggtcggaacattctacgaactgtttgcaggcacagcgaaagctcagcggcattccatggacagaaaggaacattactcgtgggaaagcgaaaaaagcgaaatcgagaacacttgtttctgtcagtgcccgcgagcccctgatcctcgagggtttagtgcacttaacatcgcagttctgcctgaagatttcccgcactgcagagaggggattttaaaagagaagctggcagcgaagggctggcaaagtctgtagaagcagaaacgtctctgtttttgccagaccaattccgaaagatccagttcttgaatgcttttccgctatcggcaagtgcctctctctcggctcttg

SEQ ID NO: 3788 - DNA, 3759 bp, Toxoplasma gondii
  source 1..3759: mol_type = genomic DNA
ggaaacagaagataatgtggatccgaacgaacaggagaggagacaggcgtgaggggaggagaaagaacatgtgagagaagacgtcatacacgcgagtgcggggacaaagagatctcatcgtaaaggtggcacttgcgtgcccctgtgaaaaccgaaagagttacaacggtatgcccccgaatgcagcggtcgctgcaagtcgtcttggacctttcagcagcgcctctagatgaggcagagaaaatggtaaagaacgtagcggcagacaaaaggaagctttgggaagggttgggggaggggggcggtaaattaattctcggacggtgacagaaaaataaagacgagggtcccttgaaaataataaaaagcaaagcgatgtgtcacacaggaagcaaggcaaatggcaagcctaccacagatccgtctcgccatcgctactgttatctgcctctctcaatttgcttccatgcctagaacagcacacccttcaatcaaccgatcagtagcattacgaattagaaccaccaagctagtgtcttcgaacctagtagccgatgttgaaagcagtgtcacgcaaatcggtggtttgctagtatctgcgtcatccttgattcatctgcgcgtttgttgtcagccagaccttgtgctgccgaacttcttaaaaagaaatgaagtaacgaagactgatgaagcttcaacagacagagtgtgagggagatgagcagagaactgcccgcccctcatccgaagagtgcacctctcctcccgtgaattctttacgttttgtgattcaagagaagaatgaggtttagagtcagcatgcggtgtggaagacttacccaccgttgtctagcatggaaggttagacctaaatggggcgttacacggagatatttcctcacaagttggagaagaacggttcacatggttctcgcatttatctttctagcagaagggttcaaagaggctcaaaaggaaaatgcctcaccgtcgctctcaaggtgaagcggcctctttggcggttctcagacaggcacggagcgaaagatccaatgtccaagggagacagattcgctctcccgctgcaattctccgcttcgtagattacgcagcatgtccacatatggggggaaaacatgtttgtacgtcacgttacaaacgttttaaagaagactcaacgaatcgcagagggtttgtttttcgcagtccctagacgtggcaagcatgccccaatttgcgctcaacccgcaaaagacactttgggtcgatgcggaaggagttcgagacccgaaccagcgctacgacaagcaaggattttttgagatgcgcgtataaataaaaagttgcagaagaggtcgcgaaagccggacaaccagatagagttcggtggtgacgagcactacagctgcgcagagggcagctagagaaatactgcgcgcgtcattcacgcgaaaaaaaccaggggcaccgtggaagagcgaaggtggttcgaaagatcgaacggttgaacattcgggaatctgaatggagatgtctctgcctttttggggccagccggccgctcaacatgccaggaaaagacagtcgaatgaacaacgacgcatggctcgctcaccatatagttagcagagaccttatgcacggtgaggcggtgttgttgctgctctgtcgctccaggtagaatttggaggtgtgccagacgaataggccagaacgccatagaaaaggagggtaacgagctgcgcaaccagttcgaggggctctttcacggtcccttacagccctgtcgagagatcagagctctgacagcatttatctgaactcgacagtcgattcagaaaccgaaaccgaccgtgttggggaggagtgccgaaacgggtatgcgggaccaagaaggctgttcaaagacgaagtttgttcggccggcagctacgctgcgatccctggagcttctgtaccatcgtcaggcttctacgctgtttgttgccactctcacgtccccctgttccttttctgattgccacatcattcggggtaatgtcgttaaaccagtcttcagcgaaacgtggaagggtgaagtgggcatgcaccgggtctcttgttttttgagtcagttggaatgggcaatttcacatcctccgatcgttttctgggaagattccccttgttctacggccgcagggatcctggaagactagcgaactacgtagcccattgcactgatcagcctgccgttctgttcatgtcttctgctgcagcggcaggtagcgaatcgtttcttttcattactgagtgatctgggagtgctgcagtagagtccctgttaaataagtagagactcccttactgcattgttaccaaaccccgtcgcatgtctgcgataggagcccgtcgtgcattgcgtctcccatgatcagctgtacgtctgccgatacacagtactcgtacgcattggcaacgtcttccgagactctatatatccagtagtcttcgtgtttctgcgctacatgctgccacagatcgccacgtttctaagggacagcttctgtatggaatcgacacgcttgccagaagacggtagtttagtggctggtcgcgcaaaacacgagacatgccatcggtattgcccgaacgtaagtacaggctaagaaaacaacacaagcgctcgtgttacatcaaggtggggggaagccccgagctaaatagatacaagtatcatgacaagcttttggtgttttctccattggtccccaacgacccaatcgcgtcgttcgtctcatctggacacagctgttaaaagccggctcatttcacagaacgactggctgagtattggagacagaatacatcattctgtgcttctgtaggtcggcgtgcattagcaagccgtttcttctacgcaagtcacaaatttcgcaaagagacacaaactcaacagttttgtagcttggggtcgcgtcgccgaaatattcgcgtttcgctgtgcgagaaagcccgaacactaggatatcgcccgttgccacaagtagagactcggcgcgaatcccagaagtggattcctatccacaagacatatggctttctatctggtccaggggtacagcaatgcacagtttttcggcgtgacccttcatatagtcacgtgttcctctggccgctacaccggtcagacacaaagagggacaccgtagatcagaattgtgacgcatcaacgcagcgccacggctgacgctcgcaccacccgattcccgtctctgaccccattagtcggtgtgacggtgatcctcaatggtcagtcgccaccaaaatccttccttttccaggagacgtagaggagtcacagattcgttcctgctgcagtgatctttgaagatatgtaccccgtcgagacataatggacgaagccgacgtccattcttcctgcgtcctggttgaccgctgtcgctgtctcgtgggaattgccccacggcgttttgttatagaagtcgatattcggtagcctcgtgtcgagtctacggttccccgctcagtcggcggccaatagaaacacaaagaacaaccaaaaggcccttcaaaagggaaggaagaaaccatcacagatagtcttctctgcttctccgttccttgctgctttctacattctgtcggagtgggcagtttctcctcttgtctggcgcctcccctgcatctcttccaccactgtggagcgcattgttctaaccgcgatatttttatattccgatgtgggcaaggcaccta

SEQ ID NO: 3789 - DNA, 1909 bp, Toxoplasma gondii
  source 1..1909: mol_type = genomic DNA
gactgtacgtctggaaatagggcggaaagccttgaaggagatgagagaagcgtacccctgccgcctttttcgagagagagaggcagcgaagaatcgaactcaggaaaaagagacgtcctcgccacaccgaactctcgagagcctctgcttcgggtgtcactccacgagcgcgaaactggtaatgcctctgcgacaagcaacgaagagaacggagaggagaaaagagaagaggagaagaacgaagaggaggaagaagcacgagagaagaaaggcgacgagaagagagaagaggacgaggagcaagatgacggagacggagcggacgataaggaaagagtgaagaaaggaaaagccgagaaggaaaatacaaggagcgcgcagaagagacagatatgcgacctgtgcgatgacctgtctctgccaaaacatttgttccttgtgcatccgcgcgagaggtacagaaggggaaacgatgagaagcgaagcaggtagaggaaacagaagaggaagaagatgaagaggaagaagatgaagaggaagaagaggaagacgaagaagacgcaaaggaggaaggagaggggacctgagggtgtcctgttgaagaggattacaaggcgcatgtctttcgcatggaggaaacgcgggagagaagaaactgcagagagggggagggtgtgaggagagggaccgagacaagaagagagacagaaggaggagaggagagaagagaagatcttcatgacctcactctaggaccgacttgaccatgattgtccctccggctcctacgtttgtcgctgttgaagcatgcacataaaaaagaaaaaccaatctgaacactgaggagtggatacgagcaaacacaagaccatacggatatttttgggtgtgtcggaggcagatgtcgagacttctatgcacatacattgccctctattccttctcttcgtcactctattccttctcttcgtcactcttctgtttctcttttctcttcacgcttccttctgcgctcttttttctcctcttctctctgttctcggagcctcttgccgtgtctcgctgccctagcgttgcgtgctggacctctcgctgcgaaaaggttccctctttttctcgcgctgtctctcttttctctttgcctgcctagagagaattgggcggctcgatcgcctgggcgatcctcgtgcgacaggcgaacggatccggtcggcgccttcattttttgattcctcagagaggcttgtggcagagggcctctgcatgggagatcgcggtgctttctctctgcgtctgctgaggagacacacatgacgcggaaaggcttcgcatgtcttcgactgcacttcacacagaggtttcgtcaaagagaaagccgcgacgaggagacaacactcgcgttgtcccgagttctcttttttcgtctcttttctctgcttcccctctctctctgtcgtctctccttgcgagagacgtcacggctgctctcgctgcctcgctttttcactgcagtcgcgaggctgtcacgacgcaagagctctgagaaacaaagaacaggaaaaggagtccgcgagtcactcgtccgtttccctttcatcttctgcgcgatttgtctcttcaggactcgctgcaccttccttctcccttctcgcagttgccttagtgtcgagaggaaatcacctcacgtcgaaagagaggctgtcagcagagcagcagaattcgctcgtcgtgtctccccttcggtctccttcctcgttgtttctgtgccgcggtttcttcgctttttttatcttcccttcgccgctggcttcctcttcaacatgtttcctgcggagaggagacaacggccgggacctctgctcaaatcgcagtctcgcttgcttccgctgcgtttgttcgttggagataa

SEQ ID NO: 3790 - DNA, 1556 bp, Toxoplasma gondii
  source 1..1556: mol_type = genomic DNA
actaacggtactgggaaataggagatcgcgttagttcttgggaaaacgacttccgaaccaccaatgtacagattggtacaaagaagttaccatatcctctccgtacaaagccggcattaagaacataaagatcatagctagaccatgtattgtaattatcacgttataagtagatattgtctctgtacaaatgatcagcgaaccagaactgtataactcaaatcgaaaagtctgacttcagcgttcacgtctcggtctcaggagcgcgagactggacgggaacgacaaaaatggtaagaaacgacaggtcttgaccaacgttcttctcctccaaaaactcgagacccagagagccggactgcccacctgttctgtgatctctgttcgactcagaccatgttttcagttcaactcgcgaggctcacactgggagagggggggggggcgcgcgtgcgcctgaggcttgcgcattcactggtctgcgtttttcgttctttttctcgcgtttcgcaggaaaaagcgaagcgtcccttcgcgtgacaaacggagtcgtcgctccggaaaaacagagcatgcgaaaaaagaaatcttctgcagtctttcttgcgaaaagttgcggtgctgtcgcttctttgtggaagcgcggcggggtcacgagggaggcgtctgcgagaagcggggatgcgttcttttcttttttccttgacaaccttcatttctctttctttcttgacgtgggaggtttcctcccaccagcaacttctcctctgccgcttcccttctctcgcttttcttccctcgctttctccctccttcctccccgccctatcccctgtctcgggtgtgctcccgcgacatcgcgttcggccagcgttcgagcctccgctgccttcgcttcgaagaacgcctttcctttcagtttgcttctcgatttcttctttcttctttgcaacgtcgcaaacgccctcctgcggagacgctcgcgcgcgcggcaactcaacagcggctcgcgactcgcgagagcacccgcggcacaaaattgacaagcggcgctccgctcgcttccgtgtctcctcaagttcttctgactgcatccgccttcttcccccgcgtcgaagggggaaatcttcttttcgccgcagtgttctcgtttccgttgcccgtccttctgccgaaagggagacgcggacgtcagttcttgctctccaacgctctctcgcctctgcacgaagaaagacgagttgaaaggaaacatgccgcagtccttgtgtcctcgggacccagtccacctataaatccactcctccactgacacagttttgcgcgcaaacgcgtactccctacataaattcataaactcaaatttatatatatatatatatatgaatatatatgaatatgcgtgtatatatatgtatatatgtttatatattatagtatatgccaacgtgttttcttctgtggactgtctggtggagtgagcgaaagatttgttggtcgggcgcgggaaacgtccggctgcgaggcgggtgcctgtcgctttttttcgagcaaga

SEQ ID NO: 3791 - DNA, 3277 bp, Toxoplasma gondii
  source 1..3277: mol_type = genomic DNA
tgctaaacgctcaaagattactggacgtgtcagctgaacatctatttgttgagacatatatgttttctggatcaagatattggcatcgatgtttgtgtgctgtattgagatggacgttccacctcttcttcgctcggcggatcttctaaagtggaacaaagttagcgttatgcgctttgtgaattttttcttatgaacagagttttttgttgttctcacgtgcaaatatgtgcacttgtacagatgcggacaagctcaccgttggacaccgtatgtcatttgcgcttgcacgagtcagtgacacaagtgtcaatagcttgtgttcgagcgggaatcgcaccactggtagtgaaaatagaccgtggcgaaagttatcgttgttaatacgaatacacaaatctgtttatagaccacagttgcccgtgatggttaagcgctggctctcgaaaaagccgtatgtagccacgcccaagacaaagcggttgctgtcgaggtcagactcagcaaagactgctgggatccgagatgttcgcacttgcggctttcccactccagttatgaaaaacacacaacaaaattctttttggctgcgatataccaccacgccacccgaccgttttcgacagctaacattggttgggttccagtttcctactgttcaaattcgctaaaaccggctgggatgcttagctgggaagtcagcgtgcaacatacacaatcatgtatccacgtagatgaaaaacgtcgatatatttagtcattttacggtttggatctccttgactccttggctgttttttgcttgctagacgcctacaagtgcaatggctggtgctatccttatggaacaacgaagtccgtggtaacctcgaaatacgttcactgtgctaacttgactagaatccctaaggaatgcacgtttgagcaaacaagtgaaataactgtacacgtacagatcatgcgagatgcctaacagtgtttgccaacgcaatttctgcgttgttattgagtttgttattgttggggagaagccggcgacagaacgtttcagcaggcgtaccttgtctttgcaagagaggaacaggaacaggctctttcggttgcaaggatgcctcgcgacaaacgccgataagcgtcaagcgtctattccgttctttagcgtcaacgtcctttacaagttcagcttagtgactgtggactaactcagaaaacgtataacgggttgtttaccgtctgacctcggttgtaaaaagtggatgagctactacatgcgtttcgggctttgcacatgtttgattcgcatgcttttagtgtttaggccagtggaaagcggtggttggtgtcagtagtcaacttagtcttattgacataccggggagagtagatgagtcctgacgtgcactacgatctggttggatgcggcaaagtgcacgtggagacaggcaaacacaagcagggctgagaaaaggcctttcatgagctaccaaataaaaacaaatcaaacactggatatttctggagttggggagggacggtaagggggaagtttggctcatcgtgacatcagattctgacgaaagcttgttcaccagagtgttccggaaactgctcggtcctcttaccattttccccgcctgggtcgtctgcaaaaacgtttgaggtatctacagtctagaaaacgctcaaagatgctttttatatctctcctcctaagtgacgggaagaagatccactttatccgttgccatctgtttctattcttcgtcgcactggactctgtgtcacgatagaagccaccatacttcgtctgaatccaaggagacagcatccgacgatcctggcttttccggtcggtttggggagtacggaaaccaaggttcgtgtcttgtctttgtccaacaggcaggctcctcctctgaaattcaagaatcacaacgagcaggattccccctgctattagaagccaataaaacggcaacctattcaaataacccattattttggttttgcctcttccctcaacaatgctaccgttcagaacttgctcgtgagtgcggagaaggaatcgggaaatggatatgccactcgtgttgacgccagaaaactgctcgctcgtaaaaaattttgaaatcgagtgaaggtaggcagaaatgtgagacggtgagagcgcttccaaacagcgatcaattgttgctctgccagtatctgttgccgttgcaatggtggtgacatgcggtttgtggttggtgatcggtggggggggcccgaagaaaaatgagaaaaatagagacgagaaaagggacttgaatccgttgttgtaaatgagcaacactagaatccgcaaatgagagaccagagtgaggcaatcttggtattcacctgtatcttcccctggagacatcatccttacataaaccagaaggaaaggcttgcaagtgatcagcgtgtgacgagccctaaagacgtgtggtcgattgacatccgttatgcttctccttttttcccggcttaaatgagaggcgacattgcaaaaaggtatccgaaacccgacagaatacccgcaagcgaacaggcgcttggtgatcgggatcccaaacaggcgagaaacagtagaccaagcgaaaaagggaacgttgcaaatagtgttctgaccagaacgaataccaacaccgatcccccacaacgagctcttttcttcttgcacgtatttccttgacaagacgtccactgttttaaagggaaggcttatctcgataggggtggaatcacttcgggcactgcggttctgtgtgtatgcgaaagcgactgttatagcgcgcagacagagtctaaaagtaatgcgcatgagaccataactcttttgttgctggaaactttgaactggaattcccaagcgtcttgggtgtgaagcacaaaccgaggtctccgtaccgatctacgatgtagcgatccttttattaactgacactcacaaaacacacgaaacatgttcacagatcttccttagacgggaaggcactgcgagacaccaaccatctgtccgagaagagagcagaacccgtgaaacgaccgaatgacgacgcgactgcacccctgatggaatccttccagtggaaggttgcttatgtctcgtagccagaaaccccgtttaccccatgttcatcttgtctgaaaaacactggcaatctttcacttcctacgcgcttcttttctctcgaagaagctgccccctataccggcagacgtgtttttccaattccagccatctttttggcga

SEQ ID NO: 3792 - DNA, 3127 bp, Toxoplasma gondii
  source 1..3127: mol_type = genomic DNA
catgcgtagtatcggtcatccactattctatttcaaccgtgataacgtgttagttctcgttgtcctcaatctgtgtgaattcgacctacgtgttatcaagggcgaaaacatcacactggagtgcggatccatcatttgaagaacaaacgaacatgaacgcatcgttgtggctcttgatgggcagagatacttctttttcgtctatttccgacgagtcttcaccagaaaagttcttcagaaagcactttcccgctttgtctgacggcacgccgtcaatgtccttggaataacacatgatcgacgcaagatggcttcggcttgtgtccccgcctgtcttcgttggcctcgtgacatagaactcgagaacgccattatcccatcctgcaccagtcactttgaccatttgattcggggtcatcaccccctgaacatgaacagagttacatggcacctcgacgagctcgaggactgcagaaacataacacagttacgacatcggttagactttcctaattgtacaatccagccattatccgaatcgttatgcatgccaactgacacgcccttcgtatgcatataattgaagaaaccgcgagtctttacgtcacagtactgtacacaggatgtaagaacccacctcctgggcgggatcagggacactcggggcatcattgcttcccatgagtctcgtgatacacagaacagtgctaacgagaaaagcactctggcgtccttgcaaagtaatctgttgtcacggctcaagcagcagtcttcaacacacagccaacaagacgcttcaggcgcaccagacggtatcacgcttttaaaacggtctgccatactaaccaccgcgtcatccatcgcgcgatctgctcagaggatgacgtaggatcgcacatacaaactctacaaaaaatttggtgttcattttgtccaacacctgacacagtcagggtaaaagaagaagcgagcgaaagctgcgatagtcggcccacactaatctaaaatgcatcccccaaattccggttttcgccaacgaggctcaacctcgactcacatgtgctgagctgagctagggccaccggttcgttgacaaggacactgggctgcgccgccggatttccaactgcaaacacacagacacacaacaagcacggaacaaaagcgtattcccgatgaagatctatatatggtttacggatttacccttaggcgctccaacgtccccgcttgtcttgagacgcacccatccacgacgccagcagttccttccataccgcccgcccagaacgtctggcgccaatctcgaaaatcatgaatactatggattccgttactgacggaacgcccaagtctacgaaagaaacgcggacgtacctttccttgcattgacaactgctggaaaaaaagcagccgcgaaggcagcactggacacggcagcgagtttcatgttgggagagtgacgtgagttgtgcgtaaaaaaaaaacaatccacccaccaggtctcgagactagagggagggcgcgaaaccaaatttcggaagtactaaaactgtcttcaatgtgacgagctttacccagctgcgtcacaaatccatggactggaattgcgtctcttaaccgacggtgtgctcacacttggacaaccgtgtactggcgtatacacgcgcaccagaaaagcgtcgatagcgggtgaaatggaatgcgacgagttgacgagataagcgacgcaccgaggctctgtcggcaatactaggtattagaactggccaggtggactgagcaaaacatcgacgggatcggacaaaacctgtacaaaaacctcccacaagcttcggtgatctaggtacgccagccgcagccactactcccgaaacgacttctaggtcctgtgctaccaaaaaagatagcgacgcgccgtaactatgtcggaaatattagtttttgtatccgggcatatgtgccatgcaaagtaactgcatcggacgagtagctctgtacagaacgcccccgtacgcaactgtgatgattgctctgaggcacggcagccacagccactgctcccgaaacggcttgtttttttgtaggacctgtgctaccaacaaagcaagcgccgtaactttgtcggaaatagtggttattagattcggcatatgcgccatgcaaagtaactgcatcggacgaatagctctgtacagaacccccccgtacgcaactgtgatgattgaggcacggcagccacagccactgctcccgaaacggcttgtttttttgtaggacctgtgctaccaacaaggcaagcgccgtaactttgtcggaaatagtggttattagattcggcatatgcgccatgcaaagtaactgcatcggacgaatagctctgtacagaactcccccgtacgcaactctgacgattgatctgaggcacggcagccacagccactgctcccgaaacggcttgttttttttaggacctgtgctaccaacaaggcaagcgacaagccgaaactttgtcggctacagtagaattaacatcgctgggctgatggaccaagcgagatttgattggatcgaagagatcagtacagaacctacgctagcgtcgatgcgctgagctgcgccaatcacacactgctcgaagcggcttgccgaaaccgtcctttcacccacctccttggaagcaacacgaggggggtgggcgtgtgagccttgatgagaaaagcgctgtctcgcggggaacgctgcgaaaacagcagctttggttgtcgcatgcgacgaagcgcaatacagcgaaacggatcccgctttttggttgcatgcctgacttttctggcaggcaagagaaagctgattctgcgctgatttgcatagttggtgtgcacagttgctgttagtgtctccagagcttcttgtctccgggagtcttctgctggtcgcttgtctgtatttcgcgcttcccagtacagcgtttagatacagtcagagtttttcagtggtttcgccgtgcacctgctgtgtcgctctgttccacggggccagtacactcgtccggctctctctgtgactctcccacttttgctttttctgttatttgctggtaccatccccgtcgccccgtttgccacca

SEQ ID NO: 3793 - DNA, 2050 bp, Toxoplasma gondii
  source 1..2050: mol_type = genomic DNA
acctaaagagaaagcgccgtcaagcaaaggtctttctgcgagatacaaaaagtcgccgaatccgccacacgaaatgcgtgcatgcagacgcagctcgggtgtacgtatgccgaggttttcgagcgacgtagcgccgaaggagcctttcctgagttcattggggggacgacgacagaggaactctctctgctggactttcttgcagaaggtggagagtgttgagaatattcgtgttggttttcgtcagtatatatgctggaattcgttagcgtcgagaagtctcacactgaaacagatgcgcggtcgcatgcgttgaagatgcctgggcgctctcacaagactggcagagatgcgttaaaacgtctggaaaagttcttgtgggtcccgccgcatctcgcgaacaaagcagagctcgccgtcgactccacgccctcgtggcagatgcaaaattcaggtatttcctcaagagacgatttcgttgacacggcgcggagaacggcagccatgtgacaactggacaggtcccgggagtttgttttctgagcctcttgtcgcttggatccgagggataaacttcacgttcgccactcctggcgaagggcttgtctgtgtgtagtggtgcaagttctccagtgtccattcgagtcattttgagtccgtttttttataagcgcgatgaggcgcgttgtttttctcacggaagacttcgcaacacacggtggaagtgacttgctcttagacaggagtcagtatagaatttctcactttaccagagagactgctcccattttcgtttacctatactccttgctgatccgcctccagttctttgctgtttcccctgagtcggcaccacgcgtgagtttccttccgacacgaaggggagagagtcgcgggcctctgagcaaacgcatgaacgtttctccccctggctgggtgccttcggagaagttctgaaaggttggtgcaggcgcgcttttcacgagcgcctcaagaatccccttccactgcggagacactgagtggtactgggctacggcagaaagctcttggaactcacactacgagatcagaggactccgaaccagctcgtttctacggagagcagacggtgtttcttcgcactgccctagactctcgtggtgctcaacgttcgtgtctgaagcgtgacttgccccgcaaggctgttcgtcagcttcgtcgccttagattggaaacgagaaagagattgagaagccgcttttaccgctagcttgtgttgccagttctttgtttcactcgctcttcgaattcgtgtggcgcctcctgtctcggcaatgaagcgaatgcggtgttcgcgaacgaaaaaccgctcctcgcttctgagacagttcgacgccagtcaaacttgttcgacctctttcgggtgttggggcaccccgcaaacgcgtccgacggtcgactggttttccttttctacgtggaagccaggcttctcttcttcgcttcttttcttccgacatacacttggcaagtggcgaagcgcatttcgcgtttttggggaagcggagaatggcctgcagttcatgagtttccccggctgaggatcgagtgtctccgctcggatggcggtgccgtttcaacgctgggtcgcggtctacggtgatcagcctccaagcatgttaccaacaacttcgtccacctgccagcgaatcgacctagatttcctttctcgcttgtctctcacactacgttgcatgtttcctagcgtcttcttattttcgtccaccttctttgccgtcaccgcttctttctttttttgccttgtgtttgtgtccttcttcctttttctccgtcctcctcttccttccctcctcctttctcttctttctccgtctgcccaggcgctcccgccttccttctttgaacctctcctctgccgattctccctactcttcttctcctcgttccctccgctcctgtcctgggctgatggccaaatggtacagcgggaggaggtgtgagggtcctcggcggcgcagagtggcttttccgacggctgcgtctccga

SEQ ID NO: 3794 - DNA, 2498 bp, Toxoplasma gondii
  source 1..2498: mol_type = genomic DNA
gtcgtcgcggtcagtcctaaacgacacggttccggaatgattgacgccgaagtggaggggcctaccgtgcaaggaaaggctgcaggaaacttccgacaggcgcgtcagcatttgaccaacagtcgtgtgagtgttgtatctcgggaaaaggcagctgagcccgtcttgtcggagggagattcgcggagtgcacatgctgtcagcaatgtgaaagaggcgaacggaaggggtctacgtggagaagaggctgagctgcgactagataagcagaaacttgctgcaaaatgggctgattccgaacaccacgtaggcaggcttgtggacacgggaggaaatgtgtctcacgaagcagcgacaacttccgtggggagaagtggtaaggaggatgtggtgggcagccgagctgttgagcgacgaagacagagtggcggcgagaagttcgaggagtcatgccgggacgcagtaggtaccaccgctgtagccactgggatctcttctagttcggatcgcttgcgacagaaagggaggcccccaggcctagcgggcaatgccagtggcgctacacctcacggtgcagagcgtgaagtacctagcacgagcagcatggagaaaatggcggggaatcgcagaacaaattgcgtggacagatctccgacccgacgtgttggagaagcaggtcggtcgttctctcaaattgttcgaagtgaaaatcaagacgcagtggtaggacagatcgcgttgggtagcggtcattccagcgcaatggttagtaatgaaagacgcaaaagcttgcgcaaggagagtggcgaagtggcagtaggaagtgtggatgaggtagagcagagacttctgcgacttcagcatgaaaagcggcagctgagaacgaaacttctgacttaccaagcgaacttcatttcagagacgggaagacacgttcgcctctacaaagacattgctcccatcgagagggagtacagaagatacaaagatgtgaaacaagaaatttcgagacttcttgaaaggcagacgagtcgcctttcaactccgtcccacaccactctctgtcagcgcggacctgatgatgacaccataccgtcggaagtgttcgaccaaacccggcatgagttctgtgtgtaacgaaaggaacacgacaggacgtgtatgcatgaaactttttcttcgggtgcagaacctataggaagggataaaactcctctccttttcaagagaataagttcagtcgagaaattgtcgatagaaatgcggctcgtgtccgtcagatgctgtataggcacccagaataactgccgggaacgtaccgttcataggagcttcgtgaagtagtcgttgtgacgtcgctgatacatctattaccgtaatcactcttccaatggccagcgaggcgcatgtggagttcggttgttgtccatccaacactaccggctaatcatggacttcggtgaaagtattcgttattgtctcctttacggaaaagcacacacgacttggttcttgctcactgttgtcgttctttccccgaaatggcacacatgcgcggtggcacttacatgtgtgcagtgggtagagcactctgtacgaattggagtacctagagtatattcatgtcaggttacggcaaggaaaaccattttcagacgggtacacaaggggactctagcacacgtccgccccactatggcacataagcggtcacaggaaaacatctcaagcattcgttgcttgaaagggcagctctctccgatcacatggtggtgtcacagtggcgtgttttctatagagaatgcccatggaggagccgccgtggtttgtaccgttccgcgtcgagtgggacgaagacgtgccgtggacagggtttccgcgcgtgcgacttattcagtctcactgaaggtcaaatcagagcgaatatcggcacccatctgcgtggtggggatactgcagcaaccaaatgtattttccgccgcatcatgtggaatgcggcaccgtgttcatagcaatcgatccgccaaccggcaaaaagaattcgatgtgtgtactggaagagaaacgctttggctagctagagacatgcaagttgcgaccagccagaacgcacgtggcagatcgaaccttgtgttaggcgggcaagacaaaaaattccgagcgctgcagggtatctggcatttcagtaatagagtccgcctagtcacaacagactttgacaaccaatgccgtcacccccctttttgcttctgtcaatcgtaaatgtcaacatggtttgttgtcgcgatctgaattgggaatttacacgagactcgatggtaactgtcaccgctgctatgcgaaggcacccagttctttgttgatatatgggggtgaccgctttcgttttttttatgtgtggttgccgggtagtaccttgccgtggactaaagtgatacgcaacccatcatggcccaacaactccattttcacaaggtacccaccatgcctcattacca

SEQ ID NO: 3795 - DNA, 2180 bp, Toxoplasma gondii
  source 1..2180: mol_type = genomic DNA
aaaacacgtattgacgttttcacaggaagcattgtcatcggatgcgtcggcgcaacgtgctcccggtagaccgaacacgctgcttgttctgttgtttgtgtgtttgcctcgtgcagcatttcccactgccgctggaggaaaatctggtcatttatgaaaccctgcatcatcttttgcatatctctagcggagttcgccgtgcataagatccggacactgacccatcgaaactgtttagttcacagtcacgggtgtcacgccacctcttctttgaggcgaatgcgtggagacgcgtgtatgattcgatggacttgtgaaaatttcttttcttcactttgtttttcgccccgtacaacgctgcgaagcttccgtagatctcaacggtagtaggagactacaaccgctgcaaggtagcatacagaaaaacaaatgtaacaggatcccatggccgacttgaggacacgccgcttccaccacgttgggaacgaaagacttttcttactgaggtggtacgcgggcttagtttctatctccacaccagataccaaaggctttttccagaccgattttcagcatgtgcacctaaaaacacatagtgtgcttcaagttcaaagttggcgcgtgggtgtacacactagggagagatcataacttccggctgtttggcagcggtgaaactcctatcctatggatgccaattcggtagatggacttgttgtaatcggtaggtcgttttcccatcgccttgacgattgtcgctttctgcacacgaacagctacacgatggcggtaccgtggttaagggaattgcagttacggttttccgcaggatacaagttaggatgaatcgtctcgcagcaaaggtgaagcttttaattatcagtctcgtctgcgcacccgagtttctacagaaacacggtgacgtcaggtgctgcgatacgaagagcgacacgattcaccattcagctgacgctggcttacagggaggctgtgtcgccaaagcaacgttacatgatcagaccgtcccccacgggaggggagccctccaaaactgtatcgctttcttcgttggttgaaatgtaagagttattttcggtattccattctcgagaggttgcttagttgtatcggtaccatagtcttccgcgcacgcataggaggctagatccggtagaacggaaatgtcgggcgtctagtgtgctgtccttaccgcctagtgcccgatgacggggtgtttcgtggtcaccatggcatttctctagtggcactccgaagacacatggagaacccgtatcaaaaatgaaatagtactgccaggaccatctttctcagtcaaatatcaccgtcatttaactgcttccacgacatagactggtcgtgagctcttggcgctggctcgagcgaggccgcagtgcagacttcgtgttcagtggcatctccattacgtggacgacacagacggtgccggctgcgagcaaagtcgctaagtgaagagaacctcactcgtttttaatcatcaacgggtgttctggtgtggtgctgcactggagaggaagtctcactcgcgaacatttttttgcgccagcctccaggagacagcggtttcgaaccgagtgccccataggcctggcaaagctttcccctgttccacaggctacgcacatagacaaacgagtagaggcaccctttaactctaggtaacgcttctgaacaagccgcccatttcgataagcttgctagttcgtacggtgctacgaatgtcggctgcatgcacgcggtggacagtctcaagtgaggggagacagcccccatttggcttgctgccttgcgagacgattctccctgagcgcaagcgaaaaaaaacgacgaagacacattgtcttttccgggattgacacaggtcaggctgcaggaggtcctttgatgattggaagcagaattatcaccttcacacgtttctgctggccttctacaccgtttattcctccttgggtcccgacttttttttcctctgttacgagcacgcaagcgctgtctacgcgcgctcactggcttattggtggagcctccttttgttttccgagttccgaagggtaacggagtttcttttgtcatcctgtggtgtaggaaactgccctgcgataagtcccagctgcttcgcttcaattttaagggggtca

SEQ ID NO: 3796 - DNA, 3747 bp, Toxoplasma gondii
  source 1..3747: mol_type = genomic DNA
agaagatggagaagggatggtttcagcgcgaggttccggtttcgcggcgacggaacacaaaggggcttcacccctctccttcttcagaggcaccgagggaagtcggggggcggcggggacgcggagagcgacctggccggcctcgagcagtgtctgtacaccccagacgctgcagccctgtctgtcttcgtcgccagctttggtcaacgccttgaggcctgccacgttccagcgaggatctgccgtgaggggcgcgccgacgtgtgcgaggaagtttttctcgactcggtggaaggcgacgttgttgaagaacttcgccttcgagagcttcagaaagttgtagctcgagaaaggcgcgtcttcggtgaggagatcaatcacgatctcccccacagtcgtctgcagaagaaccgccatggccaacgctgtgtggagctcctcgttttctcgagagatttatgttcggagcccctttcgtcggggaggcgaggcaggggagtccgaaaggaaagaaaacggcgcgacggacgagagcaacaccgagaagacgcgctgacgaaaaatacacgcacacttcaaagctgcggcgggaagacccgaggcgccacgccgagaacctggaaaagaaaaccgtgggaagcaggctacgccgcggtgtacatacacccgccaggcactcgagcggcaccggtggggtctttcttgggggggggaggaaacgaggaaagtcgacgagaaaacaaacgcgaagaagagaaaacacggaagacgagaagagggaagcggtaaagcgaaaagaataggcagaaagaacagagaaagcacaccgagaccgccacacgtgagtctctgcgtcagctcgtggcagacacacaggtgaaaacctcaaaatgaacaccacgactccaggtgtacatacacctgagaagatagggaacgacgaagagtctcgtgacgcctgagagttcgcgtttacgatgagaaggggaaaagcttcgttagtctcctcctctgcacagtttcgccttcgtgcgaatgtctggacaggagggtgagccgctttcgactgaacagcgcagtgacccaggcgccacgcgccgcaacctggtcaaaggaattccttttttcagtgtgtcgaggaaacaaaagagcaagagggcgaggagggagaagaggaaaaaagaggaatgccggagagtccgctcagcaaagagaggtatgtggacaaacagaaaaggatagagggaaggagacctgcgtttttttgacataaatgcttctcgcgaccccttcctcagagtctcaaaagaagaaaaaagcatgctggctgcatctgccgcctcgaggcgatcgaccctctctacaggcggtttcgctttcctcctctgtgtccactctcgcttcccgtgctccggacgcggcgtagaaaaacgcatctgattcctttctgcttttctttcaaaggaacatttccagtgtcgccatatcgcgaccctattattctctcctctgttctcttctcgccgcgcctttcttcttttcggcaacttcagaacgctgcatgcgtttccgcgtggacggtccgcgcgggcgagcacttgcttttcactcgttaaagcagaaaccggaaacccaggcgaaaacctgagcctctctgcgtttcaagaaatcgcttctccagaaacgcggcaaggaacgccaaagctccttcctccttccacacaagtcccaagatacaccctcacccttctcgcacacggtacatctgcgataggtgtgcataggtcgaagatacatatatatatatatatatatatatatatacatgtgcattggtagataggaatatgcatgtatatagacagaaagattcatcgtataggtgtctctgcaatgtccataaaacatgtgtgatttcatttatgtatatatgcctgtctctctatagatatgtatatattgattaactgtgttccttgtctcgctctctcgctctatagactttgtttttcagtgttcctctgcttttgttcttgttgcttgcgtcgagcagcctggaagacttcagctggtggtttgggagaagaagagtgaatcgttactttacctcttggtctgtcgagagctgcaagtctggggaccggcagaaactccagtccggggaagttgatcgtcacagaagccactgctagattattttcgtcgatttttttgctccgtccaattcagatactcattgaagaaacgctttcacttatcaggctgatggcaatggcaagttctctcgaatctagtgacagtttcttcaccggacggccctctccagaaaaaaaaagcagagagaaaaagataccctcgagaactgaaaaacgggctgcgttcatgcacatagccagatgaaagtagtatatctatatctatatatataatatatatatatatatgtatatggtcatgtagctggtgagtggaagtatagtgcattgtttcatcgtggaggttgctcaggacctcctttcaaaatgcgcatggaagccgacaattcgacctatataggtctgcacgaccgactgtacatatatatatatatatacatatatatatatataaatgtacatatatatatatacacatatatatatatatataaatgatatatatatatatatatatatataaatgcacatatgtatatatatatatatatattaattcctttatgtatgtgtggagatatatacaaaacgaaggagtaaaatggggccttgcgtaggtgagtaggcggggatgggggggcggtatcttccgttagtctccatacactgacgtatgctgcagattaccttgtttctctcagagtcacgcggcacaagaggctcgtcgagaaagagagagagattgaggaagaagcccacttgagagttttattgtccgttatcagtggaaagagaagagagaaaaaggtttctagagctgcgtttctccaattatttttttgcgtcttgcttgcagacaacctcggctcactctctgcgactcttcgcttgctcatcggctgacagcggacgtcgtcccctttttttcgtcctccctttttgttttttttccttcgatccgaggacgcctttcgttccgcccacctgtggcggcatttgttcttctcacttccggatttctggtttttttcgcgacttttctcctcttttcgcggcgaactttcgactgcgtctccctcagcagcctctgtctctcgtcgagcttgtcgcaggaaggaagagatttcaggtttcagagaacgagaaacagagcaaacttttctcgactgcggctttatttcaaacctttttcgtcgcgtggttttccgtgactttttttcgagacaaagaagacctgttcttgcggagctccactgttcggacgtctcgtgctcggcgcctccgtcacgcgctctcgttttcttcttcgttccccgttccttcttctcttccacgttctcgagttgtcttcttctccttcttccgccgctctttgccaccgatcttgcccgtgaggtctcgcgaagatgcggctgaagacttgaaaagaaactcggagagagaacggagagagaagaagacaagagagcaggcgagaggagcggaagaaggaggacggagagagaggaacgcggacgaaggagcgaggagaaaaggagaactagagagggaggggagaacaaggaaaagaagaagacgaactccaggacga

SEQ ID NO: 3797 - DNA, 4749 bp, Toxoplasma gondii
  source 1..4749: mol_type = genomic DNA
aaaagagatgtatcgcggcacaaacagagcacatccttacgctcagagaatctgcgtcagacgaacacaccagtttgcacgaaatcatgccgatcccctaatcacgcgaagatcccgcttggaagagtggtccccggcaaaaagatgtgccacatggacagaaagcacccaatcccacagcatacagtttccattttcgcaggccgttagtctgagaaatgtgatacaggccaaatgcgcttacgcgatgtgactcgagaagcaccgagaaagaacgaatgattggatcctgcgccgtcgcattcgcactggacagctgagaaagacaccatgttgctgctcccgttgtcaagacatcttcttcctcttcagatgtagaaggatctgctggattctctagagctggttcctcaaattctgcgacatcctccgtttccatgttactcccaaacaccacctgcgccatcgtctccggcctatgcctgcgtctcaggattcggtcttgtccgaaaagggctagcgcatcgttctcacaggagcatgcagttcataagagaggtcgagtctctaaaatacgctgacagaggttgccccgacaactaacgcagcttgccgaacgaagttgccgcaaacagaaaaggattctggtgccagacgcatgccacgggagcagtcacaaaatgccacaggtgtgttagcagtgaattaaaccggcagatcttgggaagacaggccagcgctctgaagaaggcgttgcaaaacatgggctgtttttgtccctggtagatcatgcaatcacgatggtcctgaatgggttcagcgtccacgtactgaagtgggaggtcacaccttcttatcgcacctccgtgtcaagggaaaaaatgtccacctcagtcccagagacggggcatgcattcatttcgtattcgtcaatgcgtgtgctgatctctgcgaaaggccgtccaggatcggctctgacaaatcgatgactagcagcccggaaccccgagcacgtgagccccgcaaacactggcacccgaaatcgaggatctgacacaaacgaaaagctatacactgcgaacgagaggaaggtgtggaaagatgcgctgcagggccaaactctggaaataccacacgagacagagcgtcaaatttcctatttgcgtctaggtcaacgcgcatgcatcgagcgcgatgctacttgtatcgtattcggatatacgccgaatcccagcaattgaacgttgaacgtcccgtctcagagcacggcggtcacagaatcgttgcagacggctcggaggccgtgccacatcatgacccatcggccctcgtaggactaggcggtttcgcccaccagaagacgggagcaaacggccccaggtaatgggttctcggtagccgaatgttgccctctattggaccatgttgtcaccgtgaaccgtacgggtttcgcgttggcgcattcagagagggcaaatacttcgcttttgctgtctcaaagagatggaaagcggcggagatccttgatcgaacaaagagcacaagaggcttcacccacacgaaaaagaagacggctaacaaaccatccgttaacacaattcatcgacggcgtgtcgtatttgcggacttcgggtctcaccccttcagcagataggtcaagtggccgagtcctgcaaagggtgtgatgtttccgacaaagaagcgaagcgactctctgtttagagcaaatacaactttcccctgaatgcatcagtgtgcaattgttccttgccatgcgagctggttaaaatggcaacggcgtccgtcggttgctttcatcgcttacacaaaggggtagcggcgcgatggacggccgcaccttcgtcaaaattctgaagacacaggtgttcttgacgggaagagtttgaccagcgtcgatgcggacctcatctttgtgaaggtgaagggaaagactgccaggaaaattgactaccctcagttcgaggatgcgctgaaactcgtggccgaaaagaaaagagcctcggccgaccaaatcgtcaccaaaatcgccgcgtgtaagttaagccacacatgcgtaggcaagtttctttcgtgggttaagtgaaagtatttcggtcgctagtcgaaacaatttgtctcaggcacaccacatcacggtccaaggactgccgcaagtgccgcaagtccagcgccttactcggttaactttctaggatgattcaaactggacaacgcctgatccgggagttaaccgcgtctctctagagtctgggccaacgtgctttctttgtatctcttttgcagctgaagggggccctattttcgttggaacgaacacggaacacgtacgcttgcacgatgacaaggacacctacaccagaattcacaaaaccggcgggcccgtgctggtggccgaaggtcgctggcagttcaacaacttgtctaacatctgtgatagaggcgaatacgacgtacgcggcgtgaagaagggagtcatgtgaaaaaacacaggaaatctcaggtaatggtttgatggcatcgaaaaggtgaaggcatgaaaattcagcagcgcgccttacggaaagacgctccgcgttgttcgtgctttgttcccgtgagcgcccaactccacttcattggaatctggtttgcctataacgcgcgagcggtggcgactgacagtaatccaactgttccctggtgtcaaggggtttctttttcgttcaccatatcatctgctactggctccgacggggacagtgtcgtagccatgaacgtcaggggacagttgcggacagaagaaggtagggaaacgtgttccttttcaatttttttcggttttttttttttgtttcgcttctttggctggcgacacgttatagcagcagatcgcttgcctgacggcagaaggtataggatgtggcggggatcaatctgtttcctgcgacgccttgtcgcctacgatctaaacaatagattgtgaatggaaacggaacccggtctgaccatcttgtgagtctactagtgtatgaattctcgagtccgttcagcgtgaagccttgattttagattttcagacttgatacacctaactgactgtccgacagacccgatgcttactagaggtattaaacgtgtcttattgacacattttcccgtttgaaaatgttggacaagaaaaatgtttcacagcgcggctattgagtgttgccgctgtagtctctccaccgttatagtttcgggttttgaaaaatacgtagatcccgtaccgaactgggtagtagacttcatgatggctggcacgcagatgcatgacatgaaggtccgagacttgctctgtcgtcctatagtaccatttcctcagtgtcggctacctatctgggtcaaacagccgtggcattgtcccaggatccccacaatcaaggaaatttcaagagtctcggacagttcacctcttgtgcaacgagcagagacgctttcctgaagccaactattcagaagctacagtatttcatatcaatgtacttgtgacatgtagtgtcactgcgaaacagatagtgtcacttacatgggcaacgcggcagaaacactgacagtacgatgctgacacagaacacatcgaccgccacggttaacggggatctcttgtccgcgatgtgacggatatcgagaaaaaaagctgaaggcatgaggaagcatagaaacgatttcagtcagctcctgttttgtgagagaccccagcgttcgcgcagggcagatagttatataagcagcggaattatgctcataggtgagctcttcactatctgtcgccagcactgcattccctctagggacccacctgtgtcctgaaaatgtcatgccccatgtccggctgatgcattgcattcctattctctgaaaccgaaactgtgacgacgcttcactggttctaagtttcatatcgtttaagcctccccagccaggaaaacgacttacacatgtactgccacagctcggtctgtgggtactgactctttcatgagtgggttgcctccgtggactctcgacgtcgccattcatctggttgaatgagtatcatttcaacagacattcgtggtagctgcaaattccactatctctcaagctacatgtgtagcgaaatagcatgtacctgatctggttcgtatagttgcatttcgtcagtcgtttcatgctgacctctgagatccttaatgcccgcctaggtcccgcacactgcagagacttcgatgcagagtcaaaactgcatgcagtttgcatgcccatgcatctcccctggtttgcaaaacgcttgaggggcccagtccttttctttcttgctgagtagcttgcaatttctcctttttccggggagatccggggagtgttgcagccaccacatgagtcgcatttcttgaaaatgctgagtgcatctgtatcgacatcgagctgccgactgcggagcgcatttcattgcccgttgtgccgctggagtaatctgtagtaacacttccttttggcatcttgtccccatgcgaagaacctagcccgtttgacttgtgtttcggcttcccgtgcggtcaggaaagggtgacgctcgcgtcgtttgttcttttatgaggctcctccattctcctcggtctcagcgctcgaaagcgagaccagcggcaaaatactcaacaccttagtcgtttgtgtagttttgtttattgtttgctttcgaactgctcgaacattcttcagaggaaa

SEQ ID NO: 3798 - DNA, 3428 bp, Toxoplasma gondii
  source 1..3428: mol_type = genomic DNA
ttggtttttgcgacgagctgtcttcggcgtccatactgcccatacacgccaggagctgcagtcaagtgtcacgctacgttttgtggtatcgtggcagtccaaaagcggaccagggcaggtcggcacccggtgggttgtcaagaagctgcacgacgatatcggctacacaggagtgtgcagtccattgtgattcttagcagtgttttctttgccggtctaggcagccaccgttgtgtcgggtgggtgagcaagattaggaacgagttttctttgttcatacggttagcgcatttttggcgggcaaggtgtgataggttcttgactgttacggtgcgttagggtcgagtcatgccttgcgttatctcgagatctcgtgcttcggttgtttctgtctttgctgcgaaacgtccacgtcggatcattggtcaccgcaattgttcctaggctccccgttcacgatgtcgcttctatggtgaaatgctgagtctggtgccgccccctacggagcaaggttgttcttggatgatttcagcggtggggggacagcagccgaaagtatttgcctcgtgggaaagacttggctgcaaacgcctccttgaccaaccttgtctatcctttcccgacatcatagtggaatcagtaaacctcatagtctgctcgatcgacagaataagcagttaagaagatccagggatcggggggctgcctctgtcgcgaatggcggcttcgcagacagtggagcttcctgactgtcgcacccgacgccacggttttggttgttagcacacagaagtcccaaagtatctttcgctaacgcccagatgaaagcgaaattcagatacacacttctaggaaaggaactgtgtgcgtgtggtagatacaatttctggcggtgtcttttaacgtatacggccttttcagttgttctcgaagaggtgtttcgtatatggtgcgttttcgcagtccctgatgtctgtgactaataagccagacgactgtctatcaaagctgcctgtagactaagtggcgcctgcagtggctggatagctgaagcgtcacctgtcgtactgtggaatgtgaacgcgacgttttgtcactgacgagtcaggctccccctgttttgcggagaaaaaagatacttagttcatcccacgttcacaatgagccacgaaaatgcttttcaaaccgtggacaggtacccccgcgctgtggtagagtggtagccatcgcatggctgcatacgaacacgaggactgaccaggaaaacccacttgttttaccatgcttgcgatggcgagttacgaatgtcgtcttgtcgagcagtggaagttttggtggaaccagagctttcattgagtaacgcttactctgaaattctactgtcagtgtggtggaagacaggttctaattgcgagcccggggttgtgtgtgagtggccgggtagacacgggacatccgagcgcacgtacgtcccatcttgtgacgaggtggtgactctgcatttgttccgctgcgcagagtgttacataaaaaccagtggtgctacatgggagaggcacatggacacgaacagcggcggtcaaagtctgtcctctccggcgacacggccgacatcgagtgaagttgaccacaaggagtttctaaccgtcttcgcgacgttagacgctgcctgactcggtgacactattggacacgcagggagcacaatcaccgtgtatgatcataactttatttacagtggatcaaaagtgtatcgccgtactctgtgaagcctgtcgtgatgtttaccgcgaacaaccgattcctgcacctttgcggggcaacatgaatgctgtcaccgacacaaaagacacagaaaatcgacgaggagctctctgctccagcgatggtgttgtgagtgagtctgaatcattatgtaactgtaacgcggggagtgcttacaagaattgatgacgcaagcgtcgcgttctcatcgggacttctgctagtctcgccctcagtacgttgctacgggaaagccacgaaaaaaggcaactgaggaactttgaaggaatgattgtgccgagcctgctgtcatgcttgggcatcaaaaatgtgacgttctgaagggagccgtgaggtgtgtaagcgacgtggagtcacgaattagacggttctgaacagcaagagacagctacgacgcttcaggcgttaactactacgtcgggacggttgactgcgtagttgcaggcgaagggagctcaccgcttttcgatgcgatggggactaataaatcatccgggtcccgccgtgcgcagctcgggaggagttgttctttctagacgagggaaacatattccaaaaaaatgatagttttcaaggaggaaagcaaaacaagggagagcgtcccaactgcggtgcgctcagccttgcgttgtggcctgtccctcgtccgtagcatgctattcgccatcaagccattgcagcggtcgtgtcgatttagatgtgctgcgcaaccgcatacaccggtgccgcgccggtatatccttttctgtagagcggtccgttatcacaagcaaggggattcagagaccagtgtctttccatacccaaacgatcaaattcttggtgttttgccggcccgggtacagaaggtgccctggcacgctgtgaccacgccgaggggcatcgcccggattcccggacacagccagtggccgtgttctgagcgcctgtggagtttcacagttggaatgcagttgcccgctattgagggaacctggaaaggaacccttgttttgggcgaaagcctacgattcgagagacgcacgtcctgctgctgattgcacataccggtgacaccacggccgacgactcacgtcgccgtccaagtaacgcgcgatggcgccggtatgtccgttaatggcattgtagtcttctttcgtccattgtgcagcattaccgagtccggagcttggcaagtgcttcagtccgcgctggtttccagtacatcagtccgaaaaagcctttccttcaggatcctccgactctgactgtgtagcttgttgcttcgtacttgtgtgaacgtcacaaaacgcgaacaaggttgcctgaggtatcgattcatgtgttttcattcttggacccggagaaggttgtgagagtcattttcacagtccagcgtttccatccggagatgacgccccattgcgggaggcggaagtgtttccctctctcgcccacgtgactgttggtttcgggtgacccctgttccgacatttccccttgttaaacgcgtttttagcaactatcgaacctcgatacgacctcctccatttgtttccattttgtaaaacggcccaagggaaaacgttgtgcctccatccgggtaaaggattttcccagtctcttctcgagcaggtgtgaaaccagtagcggcgcccctacga

SEQ ID NO: 3799 - DNA, 1397 bp, Toxoplasma gondii
  source 1..1397: mol_type = genomic DNA
tgatgccaagagaggttctgaccttgctgcgaaactggccttgtcgcgaaccttcttggccccttagtgggttttcaagcaatctgcaacttttctccgatggacagtcggcctacacatctccggacttcagcaggttcaccattaggatctgcgcgttggtcacagaatggaataagacgattaaacaccttcacagagaagcaaggatactacacaaacactcggtctcctgcacttgtccgcacatcaggaaaccaagctcgcttgcggcggtgagccttgaagaatcgaaaaacgactgtggccccccgagatcgagtgtgaaacttctttttggaggcctagaagtgaactgtggagcacaaagcatctgaagatattgttttacggacgactcatcacaaatttcccgtcgacgggagcacaaaaatcttttggtcaagccattatccgcgcccctgactgagaaagaaagccttgttgctaatcgtttgggcagctttttatcagtctagtgaaaaaaactcattgtgtacctttttgctccatgagttggccgccgggtgattctccgctgcggcatttttacagccttggtggggatatgctcactgttgtccattaaggtgttccattaggatccctttttgagcatctggctaaaaaccagcagcagaacttgcccccttcagggaccaaccgctttgccagcttgcggttacttgtcttggtgagtcgtccgaagatctgaagcagtatattgacgttcaccgatacatatgaggtttgtgtggtacctcggggggagctcaaaagtactggaccctgcattttcagcaaattctggagtgttaacgatgaagcctctcttcaatggatgaatcgcgagctgacacccatttgttaagacggtaaaagcctgggtgtttcccccgagagaagatccagctcccttgatgaaacgtttaccgtccattggttcgcaagcatcccgaacgagaagcatatttccttctcttctttgcagtttacagcatacatggtgcttgacacgcccgatctggttcctgtgctcctcgagcgtaggtgacatgttcgggaccagtgccacgcttcaaataaaccgttatttgctccccctgagtggacagatcgtttggatatggagtttttctaaatctacgtcagacttaagccgctaaaagtatatgccgtgtgccccaaacccgtaggatatccttccagatactttgggcagatcatacttccgtcgttccatctgcgtgcgccacgactctccggcgaaaactcgaaaaatcccgtttcctcttagactgcatgcaaggagctgtcgatgtctcgctggcctgcgtgaaattgcgcaaaggagtgga

SEQ ID NO: 3800 - DNA, 1668 bp, Toxoplasma gondii
  source 1..1668: mol_type = genomic DNA
agaagagaagtccagaagaggcagagcgaggagacgttgcagttgacggagggcgaggaggtaggcggggacggcggcgatcaggagcgacggagacttgcctctgggatctggacgagcggctggccgcgaggaaagacagagagcaggaggagggagagaggcaacttgagagagaagaaaacaagcagaaaccggggaggcgcggtagggtgccacaagagacgcatacgcgaagggagacaccagagaggtcgaggaaggacataggagatccagcgaggaaagaaaaacagatatgaaacatgatgactcgccgccgacctcagacctcctcaccagcggcagatttcggacttttgacgctcccaaagaagaagagaatgccgcactggaggcagatgccgcgtttttagcatcttcaggagacgaagaagtcgcagaggaagaagaagaggaagatgacgaggcgttcttcttctggacatttcttgtgttttcggcttgcgagaggcctgctctcccgtcctccgcggctccctctgcttgctggaaagaagtcaggagaagagacgcatcttcttccccttctgcgtcgccaggaggcgcctcttcctctgattcctccagccgcgtcgcgtccagagaagaggccgtcgtccccctcgccatcttcctcctctctctgcaggaaaatgagcggaggagacacaggggaaagaggacgaaaagaaaacagccaaaggagaaaaagaaaaaccggctaggaaaaggcgaagaaagcacgcagagagaagaaagagagcaagcgaaaaacggaggaagagtgtggaaggcagagagcaagcgaaagaaagaagagtggaagaaagaagagagcgcattttagcgcccctccctgggcttgttggctaggtgagaaaagaccttgtgcgccgtttcttgatttcttgcatcgcgttgaaaagaaaaggagcggggaatttcattcgtttgcgacctgagtcgcaggagacgtcctcctgtctcgaaaagcaaagtgaaatgtcaacgagcccgacaacacaatcaagcctttgttccctcccgcctgcaaaggaccccagtttccctctacagagactgcgcgcgacagacgatttcaggaaaaaataaaaaataggagaaaacggttttcatcgcgcgaaaggaagacaagccagtgcgcgcttcaagcttgctgccgagaccgagaccacagaatacctggcaaggaaaaaacggcgctgagttaggaaggaaggtggaagcagaggagacagaaaagtttgacgcgctgaatccggcgtatggattcctcgaggctttcaaaagtcgcgagctctcaatttgtcttgcacatttggcaagaacgaaaaacagatttcttcgcttctcaaacagcgtcctcacccttcatgtaaagaagcagcgcggaccaagacaccgcgcgtcgcgagtgagcccagacacgcagggcgggaggtgacttttattgacttttattttctctctttctcttttcgcctctcttcgtcgaaagcaacagagtagaaggggagaagaagagaggaaaggacagaggaacgcgcgcgaagaaggcggcgggaaggagaaaaaggaggacattccagaaacttgacctcatca

SEQ ID NO: 3801 - DNA, 1736 bp, Toxoplasma gondii
  source 1..1736: mol_type = genomic DNA
tgcgctcactaccgaagcagcttctgggagtttcgttttcttttctcgctgttgctgagacgtcgccagaatcgccgcgaacttgctcagcgtgtcatcgcgaaagagggaccgcggggaacataggagactgttggatccgccttggaaggaaggcgcattgtttgtgttttccttgttggtcccgctcgcgcgaggcgagttcgccggcgtccaagcagctgctgcttgcaagcggcccttcggcgtcttcgtcggagccgcttcgtgagcctgatgtacagaagacagcaggggaggaggctgaggcgctttggaggcagagacagaagcctcgtctgtgggagcgccagtggaaggcgacagagctgcgggagcgttgggcggcacagcagacacccgaggagggaaggaagaagtgtgtgaactctggaactcctttgcagacaccgaagaagctgataacgcatctggagaggtcgcccccccctcagtcgtagtgagagccgaggcatcgtctttcttagcacttgaggcagacgcccccttgggacggcgtgggcgcttcttcgcccctgcagtcttctgggttgaggcctgcgtcttagaagtttcggcctccgtcccttgctgcggacaggctccttcgcgagcagtgtgtctgttcatccgtggcttcttgggtttcggttcctgggaactctcaccctctgcacacgcagagacacccgacggagcgatgttcttcaacttccgcggtttccccaccccttctcttcctactgacaagggctgagaagcccctgcatccggacttccttctgaagacgccgtcgcagcacacacagccggagacgccgtcacttcagacgcagaagccagggcaacggaactgaccggggtaacatgggttgaaatggcagaggcggaagcaggagccaagcgaagcgagggaggagttacgcaagagttttctgacgtcgcagggcaggtgacgccgctgttttgtgcgacgagagcggggggggtcgggaaggccggcgcatccctttctgcgttgtgtgaccggtacccctgtttctgttgctcaaatttggctttcgcagcggaaaaaaggtcgcaccacattttgagagacggtgaaggaaggaaagaggcggaaagaagaaacactggaggcattcagctgctctgcaccgccgtgtaatacagcggaaacggaacgcgactctcatgccagaccgccgcggactctggtgtacgtacaacgcacacacaccccgttcagtttggcgcgcagtttcccgtctctcaactgcagtccgtcaggacgtcaagcgtgtgaaacggcagaacatgccggtaaggaggcggcttcagcttccagggtgcagcaacaacagtgcggagacgactcgagatcgaggcagacaaacgaaaatcccgtagaagacacgaagaattttgcaggagtttcgcggcagcatatgcgccggatcacggaggaatgaaaagccgagatacagtttagcaaagatcgaaaaagtccggcactcgcgtcgacagacattcacgaaggtcctggcgtgccacaagacccgaatgtcgcggcgtccatggcagaaagccgatcttctgcgaatcgggaaaccgcatggatcgcagcacgtcaaataaggcgggtgtgcagaaattgtggctctttacgatgagcttgaatgggtctggttaggaaa

SEQ ID NO: 3802 - DNA, 3326 bp, Toxoplasma gondii
  source 1..3326: mol_type = genomic DNA
tcagtcggactacagaggttccttttaacaaacgcaggcgcgtgtcccctgcgtaattatgtcaccaacacggcgccactcagaagaattaagtgccccaaaggcactcaggcccatcgtaaagagctgattttcgaaatgttatgctcgtaactttcgccgttaatggttgatttttgattatgaagtgatatcccatttggaccatgtcaagtgcaggcgctcagttcactgcctgttttttcttacatgcgtcatttgcttgttgcctcgtgctcggcagctgtccctgcgatgtgggcacaccgccatccctcaatttccgtatcagtagacgcggagtagcgagggtagatgtgcccgtgcactgcatctccctttcttgtcaggccgcttcaatagacgtatcattctctgatcggcaggaaaggccggacatcagcgattgacttgcagcagaggagaaggaatgcgtacgtatgggtgactcaaaaactacaactgcgtcgtcagagggcacctaaagtgcggccaaggatggttggaatttgtacagttggatgtttcataattgttcgtgaagagtgaaacatgcagcagaggtggctgacagaattggtattttacgttcagtgtcattcagctgctccctcgacttcgtctcatgcgctcgggttcagctgcgtgtcaaaagttgaaagactactcttccttgcaacactacgttgtccatttcctttgtggactgcttctttccactgtagactccgcaagtccgtttcgctgtggggaactcagtcccgcgacatccagcgtcaactgagacagccatgcctacaggatggctccactcgagtttcggcagagattgaaacttctcccgatccggcgggccaaacggagaaagaaaacaacttttggatcttccggttttggtgaatacggaagggcttcatgtatagagtgcatagtcacatgcgagcggagaggagtaattcctgcggcccgcgactttccgccggacaagcgaatactgcatctgcacaccgcgtgtttgtgtaactgtgtaactgatcgttgagtcggcagccgtcctatggcagagccttttcaaagataagacacgcgcaagtggtgcggaaaagatgttcgaaatactgaagttgagataacagaggaaactggagagtaccaccgagactcacagaagcatttctaggcctttttcgtttctggcaacgacgctggaagacatcgcatccaacaggaattcaagattgagcaatttaagctattcatgaaggcgcatgagttgcactgccctgaagggcaccgatacccattgggggcgagcttaagatgcgtaaaaaagcaaatcactacagacagtcgcgttctgattcatgattatttagaatagtgccgttctgttccctattctcagcgcacgcattcgtagtgtgcttagctacgaaaacacgatacatttttggggtgcacggaattccgtgtggcaacgtcaagaatgagaagtgagatgcgtaaacttgtgaggtgttaggaaaatcacgctcgactgcctagcatccgatgaacgcgtggggagaatcgctgagcaaggaatgcgactccaatgaaacaggcaaaagcggacacggaatcctggactctgctctatgctgatgtgactaagtcgtctcacttttggatttttcttcgacttgccagcgaaaaaagcattcgaccttattttgtctttcagaggactcgcgcgtgagccacgacgcatggtctgtcgtataccgtcctcaaactcgtcaccacctgacatagccgagacccagtcaaagcgcgtttccgatatttgatgcacgggaccagcctacctaccactgcaacaagttctctcgttgctggcttcctttgccagtatttttcttcattccgtttttttctgtgcctcattttactgcttctgcggtgaggaaaacaatctagccgcaaacacgtgttttactccgaacatcgacactcatcgttgcaccatttacacttccagctaacaatgatttgggatgcggagacgatatgggtaaactgtgacctaattctcaggtcccgtaaaacattaaacactggaaagacaccggaaaccttaaggaacataatgatgatggacctggaggggaaagtgagtgttatcagatgccccgtatttacacggaacttgtactacgataacttgctgcagttcaagctccatacggacgatgactgcgtttctattggtgcgaagatgcaaagggagaaaaaccaaaaagaaacgtgcacctcgcttaggacattgagtataccctgcagactcacgctaatctaaatacgtactatacatagttcagtaggtccatctgcacacacgcgtgatcatacctctatcgacgtgtcaatgtagttcagactgaatgattgacagatgcagacaacggtttcgaggttgggatagatgaacccagaaagactggcataaaacagtttcggttttgtcatcgtgaaaacctgttgtatcttgctgactgttgccagccgggcgtatgaggaaagaggcccagctctccgacacacagaagtctgaagaaaggtaaggcaaaacgggaagcctctctgacatgccaggatactatctgctgtaaactaatttcagaggaaagggttgtttctgtggtgccttagagtgcagctttgcttcgcagtgcatttgaaaactaccatggtaggtttttataagctgtgcgtagttcgatgaagtgcttactatcgatgacgcacggaaaaatgctcctcgaaacaattccgtagacatttcttggttttctccaactcgttctctgttgttcgatatcgtttcacccgattctatccctcattgattcaaattctgtgtatttatgcgtcgggccccccactacctttttcttttcatatcactactgctttcttttccctgtatcgttgcttctgcaggcacgagatttccttcctccatgaatgtcttggagtgtctggctgcacccaacatgccaccaaattcgggcgagaaccggcgttgagcccggcgtggggccgtccctcgggcgggcatcaccgcgctatgtccgcgtcgatttcggcagcagaatcgacgagcgaggagacacaaaaccatgaggctggcagtcgatgcaccaggattagttaaatttgcattttcagacatttccaagcttcacttccccatccgtgtctccgcttcatcttttagatatctgagaagtggatttgccgcaaga

SEQ ID NO: 3803 - DNA, 4533 bp, Toxoplasma gondii
  source 1..4533: mol_type = genomic DNA
aattgtatgtctagaggtacgcaaccacacagagctacagttgtgtgaagtacggtcttctgagtggccggcccacaaaactacagtgttatgcatacatgctctcctcccgctaatcaactgagtttatcaatccagcactgcagtgcgaatacgcgtgtgtcacggttctatcgcagaccactgagattggaagtttgtggttctggccttcaagttttggtaccattacgcacacgccggtgactctactggagttcgtcgccacgggtatggacaccagtctgtgtcgcagccgtacgaattggtccggttatataggtgtcgcgggcgtacggggaaaataacagaattcttcagcgggtgcaaattacgttttccccgtcgtcaagaaaactttcatggcggctgtacgaaccacggccgtctacttagaaagcgtgtcaattcccaaaccctacggaccacagccgttttggtgaaaagcgcacatacgtatcctgtatctaccgcttaccccacatagatttccgtgtagtactgcgaattcatgtaatcatgaatgctgatgtcgtcgccattggagaggcccgacaaattcccatcgtcctttttggacagaccttcctgcatgcgcagagcggcaaccagatgcgcctgcaaatctggcacagttatggtgtttttgtcccacccgatctggcgcagagatttcattttccgcagaggcatcaccatcactcctgaaagcaaagcagcagcacaaaagaccatttctatgtctaagaagccagaagatcgaaactggatatggctacaagagtcaacagtacgagggtagtgaaccccgagccttgaacagaaggccaacggaaacggctcgcaaggattcgaggccccagagaaaatggagacgacagtcacgcaaattggtagcctccgtcgcacgaacgacacgagatgaaagacgaaaacgagtttgaaccgtggtagcgcagctggtgtactgtctgttatgtagggcctaagcacaaagacagtacttttctaggcacgagagagagtaccactgcggaagagagggcctgcgtgaggcaaagcatcagagtcctccccgagaaactgctcgttctggacactccagggagaaaacatctggttctgtctgtcgtgtcgtgctggcgtgtctgctcgtgcggaagacggggtggaagcctgcgggttacccagttctcccatcacaggactgtttcttgggtcgtcaagtggggaggtctccacagaagtgaaggaaaaattcaccaagccgtagagacacaagcacacgatgccgaagagtgcaacgacgcagatcacggaagtcgacagcccgacagccttgccaaggctgcgacgtctttttgcacggctgaacacgcccataggatctctcagcgaagacagaacttgattgagacggggaaacgcacacgcgccaccttcggtcttcgcgcaatgcgaagaactcgatggatccttccaggactcgtcttcgacatcgcgatcctcagcagccgagcaaatgccaggaagagaagaaacggatgcagagtcaagcaacgaggcatacaaggaggatcgctttccaaagtcttgcgaagacgaatcgacgctgacgagattacggaaccgcgacgacggagacatcgtgcccgcgtccgtagttgtaggactaatagacactcgagggtaggcaaaaaaacgaggcgcaggacggttttagtgaagtggattcagaacgcgtccgtgcgtgttcgaaaaactgtctgcgaattcgctctgcgagtcggtctccagcaaggcttatcacgcacacattacctagacagactcaaaaacggcgcacactcaaggactgcgtcgtgacagccggcacaccaacatgcaaagctgtcactgggtttgattcgccaacttctgtctcatatggaatttacgcactctcaataattagcctcaacggctgttactgcatctccataaagcgagggctgtagctgtagaggctttcacggtgttcttttgagtcttccaagagccggagagaccactgatctacggcaaaaacaatgtggccggttactgctcccggttcgccgacaatgctggatggaagctgaaagacaggacacagatttgtatgtcatctatggaagctcctcgtctctgttgtgcaaccatctattttcatggaactagcgatactgctcattccgcgagcttgcctgtacgcgtgtcagggacgcggctgagatgtggttgcatgccggccgtgactgataatgccaggaggtgctcactggtttcgctgagtggcaacaactgagccatgaaaaaaaatcaaagacactgcgtgatgtggcgttcactaagcagaaagtgaagactctatcagatgggtgtcttagtacacgttccaactgaacaagtggtcacggcgtgtgtttacacgagcaacgcgctacagatgcccaacgcggaggccattagctagtgagctgaatgaaaacttggtatttggttgagtgtcacagtttcgctggaaatttggtggcaccgaagcgcatgcgcccttgggctgaatcaggggctattttcctgttctatgtggagtagcttaactgataccgttgcatatagtcaggcctgcgtgaacaaaccgtgccgtatgcagcaaccgacaaaaatttgcgttcggcataatgatcgatagtcacatatagggggggtgatgtaagtgcagaaccactagcaagagtgacactggtggcccctagagctttccaggcaattatgggtgggtgcaagagttttcacgtgtttgtagtcaacgtagggtagacaaggacaaaactgcgaggtctgcgtgtacctaaaacctactcagtttaagggctggtgcgacagtcggccgctgcatagtggcttgctcttagtgtaaaccatctgttagagaacgcaatgtcaacctgcatatgtctaccgaaagacattttggagcgaccgctggacagagagaaccgtgagtacgggctcactattgagagagtcatgccgtttcctgcagcgacatgggtcgtgcttgttcttggcatacaacaaggttgtcttcgacactatgtagccaataattcttgtatgacatcctcgacagtcagggcagattgcattcgagaaagaaccggcagttctggcgaccccactgcgttgctacgttttgtgggatagtaacagatagtggtcaagtaaggatgaatccagaagcacaattgtccattcccgtgaaataaaatacacaagaatacccgagcggcatcccaaagtacagcatgcggtctctagtactgtgttgtgaaaagttggcaggcaaatgccaatcaaacattcaaacgtcactacagcggtaatatccaaatctactttgacgtgagacgcccaccttgtccaggttgggggacatctctggccgcacatgcacctctttatggctgtatattttagaagcccgactgtctgttcacggataaaatcctcgctgctggtaaatgttgtcttgtggcttgtaacaaacttgcgaaacaggtgttaccaatcctctctgttcatgcaaggatgcagagctgttgaatgttcgtgtctaccgtcgtcgccgttccggcgatgaatcatcacgggtaaaaaacgcagggatcatgatttgggagtttttggcggaattcctgacttctacggagcagtcttttgagatggtgaaacgtcttcgtgtcaattgcttaattatggggtgagcgtctcctgagtcgcaaagcttgaggcttcttccgaccaaaaagtgaaacggacttgtcggaaaaccggccgcggacaagattgtttcgtcgtgatatggctttcgtggaacattcattacctctgcaaaccatctgacatatcctaatgataaaatatcgaccatagacctgggccgtatgctttaagctgtcacaaagcggcggtacaacgacctggcgttgtacgagacgtatctcaaacccggcgttgaagcaaagtacctgcggtccagttaatcatatactaagcatgccttttcactatagacagcatagcaatcggaatatacgggtcgttctcagagcatgctagcgccttttcatttctgcattgctggcatctctacgatttttccccttggtattatgctaatcgtttcgcctcgtagtgtttttttcctatgtcacagcaatcatctgcctacaacacctgtcaacgagacatttttcgactatttcataaaccgtgttatgggaccattcctccagtttctgacgctgatgtcttaacggacttgcgaatgactgggctcgcgggagagctccaggtccacctccgtactacaagcagctgccctcaataacttcagcgggtttctggtcagcattttttcgggctactgcgaagcagactcgtgagaaatttccatttgtcattcagtca

SEQ ID NO: 3804 - DNA, 4831 bp, Toxoplasma gondii
  source 1..4831: mol_type = genomic DNA
ctgcttgttctcgtggtttccggtgaggcgtcgaaacaccgagaggcgccatcaggtttccccgacacggctggaaggtcttcctcgtctgaggaagcgagaggtgcgcggaaagctgcctccgcaaggcctacgagagcgaagcgtttcttcaaaataatatgaggagttggagagtccacagacgtggttgtagacggtggggagtcctcaccgtccactcctctgtccatttcagccttggcgctcggcacctgctcagcgaggcagtcacctacaggaacaactgcatgcgccgtttcgcgggcctctacactcctactagaacattcgtttggctctccatttgcagaccataaacactctccaagaggctctttctcgaacgctttccgggtctctccatcggagctttctgggcgtagaactgaggcgggggtatgcagattcacttcaggttccgtttgcatttcctcagtggcgggaatgagatgcgtgcttgtgcaatctacactatgtgccaaagcctcagccacgggtgttccaccacagggcggctcttgcggaactgcgtcctggttgcccgataagaaagaattatcggaagaggcagaacacgccatggtggcacaaaaagccgacgaatggcggggtatgactctaccctcacgctaacgaagcttgacgaggacaaaaactggggaaaatcccaaaaatgatgacaaagttcctgcctagatgtccaccaggcttgggcggcaattaggcagctgatcggctttggcgactaagaaggcgcctgtctggcacgaatctaaaactaacaggtgctcttccatttgaacgtgacgcatggagcatctctgttcactgccaaggaaagagcttgaatggcttgtagagaaagttggacttctgcccacatgaacaagtgaacccagtatgggatgggcactgcgtgactaagaacaggacgctgacaaacagccagttctggcgaagggtacttcagagcgtaccatcccctcttcaacataatatccagagtacagaaataggccattaaagacgtggatggtccttcccatgagtgcagcccctccgaaaaccgaggagcctctattcgcggcggcgggggagtggcctcgagaaggtgttccgaaacacagaagggaatcaaaagtgtgaatattaccgaataagcgtatgaaatggaccgatcaggaaaacgcttgtttcattcgtcgctttctccgactaagcgctgtgaaaggcggctagcatgctgtctggttctgcatgcaccactcgacatccgggaatcacgctggatatatcagacaatcgacgaccgagttgtattccgtctcttctctagaaagccacgccctaaactctctttaaagaatgtgtgtgtggacagatgttaatcgtcgtttagaggttccaccacaccagaccaaagaaattctccattatgccttgccattttctgccggggccagtggggtcttgggtggtcgctagcccgggcaccagcagtgaaacaaatgtgaatttgcacagaacatatgtctgttctatataatgtttgcatgactctgaacgcacctttaattttggccgaggcaggtttaatagatgtggatgatgcctttgcccaaacgccgcgatacggaagtttcaaatagggtgaccaaccttgacgggtccctctgcaatgttgcctggcactggtgacagttctgggaacgaccgtcccccactgggccgcaaagtcagactctccaagaaagactgcgaaatgttattgtacaacagtatagtatgtatcgtgtagtgcagtatatacctgtattgcccatagctacatctgttgtacctttcaaagtgaattacaaaaccaagcgccgtcggcgatgttgggagttagacagaaattgaacaccaatgaaagccaagcctacattgaagctgtgctgcctggaactctcctgatatctgctccctgtgcttccagccagcaagtaggagtgcgtgacgcgagggctgtcgtctggcctatggactcatgttgtcgatgaatgggtcagctttcagactaaccaatcaacaacagatcacctacagtcacttgcacgaaacacggtagctttgaaattcttcctagatagttaacaatggcatacccgtgggcagtggacgatgctcgcaaatttatctcttctgtgaagtgtattagctgtacactcagacaccgttcttttgagagtgctgtactgacgttcacagttaacatcccactctcaacgtacggaatgtttgtggcccaccagctgtattagctctttttcatgcgtgcataagttagtgggggggggggggggtcagcctcgtgttgtttggatgtgaaagattttcagcagcttctgacgtcccaaccctgttgaaaaagagaaagaaaaaaccattcctcagatcttttggcggcagcactaccccaacgatgacagtgcttgtttcgggactccaaattttggaggccgctgaagcaatgacatcgctgtgatgagattttcagtatttttcgctgctgtgtggatgaattctataagagaacgtggaaagatcgaggaagcaagaatatttggtgtgtgtgcttcgtgacggccacttctactgaatgttttcttcctgcacgtcaggagcactgaagaccttctgagctggaaaaacgtgaccagtatatgtcccaacgacttggttctagcacagagagagggcacagttgtgagcactaggagctcacttgaccgctcatacgcagtcaagtgctggaagaacgactgttccaacgtgcgttttatgcgggatcacgaaattaacagctaaatcaagattgttgctgacgatgtctctcctttgttttcccctagacctgctgttgcatttttgctacggaaatccgaatatgtctcacttcctagctcccgtgcgcacgcgggtgtgagatgctagaacgtttcagctgagcacacaggcctacttctccattcggtcctcgtgcttcatccggcaaggtcgcctctctcacatcatctcgaatggctgcaaaagcaattaagatccgcagcaaccactagaaggggagcttaccatgggcaacaaaacgagtcaaaatcggatctcggagcagtgtcttgcggcttccaaacgttcgctcccgaacgcctcatcgtgcatttttgaccgcttcagagggggttgcgaatggtttcaaactgcatgacattaggttttcttcaatcgtcttcatcgacgcagtcgaaagtgctcaaacggcgtgtgtcatattcttaccatgctgcctgggtggcccctcggcgatcccaagcattttttcaaacgggtctgtctgcctgtctggtccgaaaagtgctgcgcttctaacttcggtcaccaggttcgcaagtctctagcttttggtgtagaggtggcacgaaatatggatgtactatcgtgctctgtggactgaaatatccttttatttcagtgttcgcacgtgattgacccgagagagacgcgcactggcgaccacaacgacgactacgagcccgcatgcggtgtggtccgtctcggagacagtcggcgttgtctcgcgcaaatctcgctagacggccaaaaactaacattggggtacgacaaacaacgagccaaaactcagtattggaacttgcttccatgaaaccccgtctcaagcccatattgcagctcaactgcgactacttagccaagatcaaatctgctagatcaaaagctacaggcaaatgtattccgtgcaaagtttctacagtctcttctgttgcaactacagacagaaccatctgtgaaacatgtcttcagctggcaaggatgtccggcggtgctttgtgttcctttcacgtgatctgggctccatcgtgaacgctgctcgtttctgcctcagtcttcgacaagaaacattatttttaaaaggtagctactcaagtgttcctggtatacaaaggacgtgcttttgtcaatatcgtcgtcgcgaggagtcattgctctacgtggcgggcacgacgaatccacgacgtaaaacgcgaatttttgaacggaagcggttttttttattttgatctgtgtttcgtgttgcgtaggcaaggtctggaagtcggacgggtgtctggttacggtgactctctctacttgtttcatatttcgtgaccgtgctctctgcggtccaaaaattatcttgcaaacagttccacctcattattacggactgcaacgttgtttttgtctttgtatttccgtgttcggatgctaagtcttggtggggcgacaaacgggccaaacagtttccgagcggtcgtttgctattagtgctgtacgtttgtctctcatagcctgttgtttaccgtctactctccgcttatttcgctactctgcatctccttgtcggcgtgatggcttttgaatccacgctgcatccaccgactctttctatacacctgattcccggtcaaacctgatacgatgaacaaattcttgattcatactctttgtattcatatccattctgtcgtgctacgtgaaatgctcatttgttgtcgttacaagggtgtgcttgccaagctaaaattcgcctgcgtctttgtatctttgccttcctggtcttcgggttatagctgccactgttgcttggttaagtcgttcccacctttcacctttcttcaatccaccaacgcacgtttctctcccttcacttcttggcctgtcccactgtgacttcctctacccgcaacaa

SEQ ID NO: 3805 - DNA, 1468 bp, Toxoplasma gondii
  source 1..1468: mol_type = genomic DNA
tgcatgtggtgtggaggcctttggactcggtccactttcttcgacccccgttgagatctgaaacaccagagagcatccattctgaagttctaccgccaaacgcagtagttgctgcgcagatgcgcctttggcctcgttctccaattccctgcaacgcatcgatgcgactagtcttatgccggacagaacagattcgtgatacactcagctatgacgtgcgatagcgtagcaagaaatgaatttgcgactttatccagttgcccggctctgtctaccttcttctcgatgtagcggcggcgttctgtgttccttagagcgagtccacgcaccagcctcgtggagtcgaacagttttcgccagagcggggacagccggtggaagacagaacaggagggattcaccgtcacctcgtttgcttccttctggtgatggagggaataagccgacagactcacttcttaacagttcatggcagaggggcaacgacgtcaccatccagctttccattcacttaaccgcacaagcgttctgctcgttagtcaagcctcactcgccagtcgaaagccattaaaagttcgcgtttctggctctcgtttgtgccggaagtctgccaaagcaaacaaaggatctgaaaccgagtagcagtgaacgcgtgacagtgcagaggggtgcccgcgtcggcgtcctctctgtccacgaacagccacaattctcatcacgagaagtcctcctcccctggatcttcctccagttccccatgactgcctccggttctcgcacggacggcgatccgccttcacgctccccggcctttgccagttttgtgcaagaaggtcgcccgtcttattcttgtcacgttccctgtatctactcggttcactgcgctctacagaagctcttcttcgccttctactgatcagtgcactctacgagatgcactatcatcagtcctgaactccatgtttgggtggaaacctgggcgtgctgtgtcgcagcgagtcgcgagattgccggcctgtcgacgagttcccgtttttcctgcactggctacagcgtagcggcttcgcctgctcactggcgacggtactggccgcacggtttcacgatcctgaggtcggcgagatgcccctgtctggcgaggccttttgtctacgcagcgacctctgtctactagagaaaggcagaaggccggagcgttttctcagatgtgctactctttgtcttctgcgatcttccgtgcgttcagctgtgcttttgccaaaggagacctgtgtgcagaggacttcgctgctaaaaagcagaagagtgcgcggcgtgtgtagctcagtggcatttcgggactcggtcttgcgtcgttcgcgactggacgtcgtcgtctgtgagagcgtcaaactagggagaaggggcgggccagagcgttcggaaaattatctgcaaagcccaggtcccgtatgatattcaaaaaaga

SEQ ID NO: 3806 - DNA, 4458 bp, Toxoplasma gondii
  source 1..4458: mol_type = genomic DNA
gcatcgacaaactctacgtcgcctgctgacagggacgacaaagcagcctaccgaactgggtttgactgcagtggcagttgaatctgacggagcagaaaagccggtcgtcgcgttgtatcgtcattttgcacagaagtgcagcgtttgtgctacggaaaaagttcagccaaggctctctgcaagagccagaccccgcgaaagagacgatacctcgtcgaggtctccggcgtcagaggagacgacaacaaaaaatttcggctttcaaccgcagctgaaccgagtgtacatgcacgtcaagcttcgaggcattgccgaagagatctcttcaacgccgctgctctgtcgcctcgcctaacgaagcctggtgtcgggtgtccagacagcctgaaggaggtcggcgcaaagaggggaagttgtacgctgaaaggcgggagacaggagcatatccaaagcagggtggctgtcttgggagagaaaagaagcagagagaggcgatgcagccctcctgcgagacgagagaagatgaaagccgtgagagaagttcctgactcggtgggatgccggagtgaaccatctccggtccttctttcgcggcccaactgattcgcctgccggcggagaactgtcaacagagcattcaaagaacttacaccctcgtggcgagttgactctgcggcgagaggcaccactgcgacggcatgtggacattcaccggagatatcgccttcaggtgtacatacacctgaggtaagcttgcctcgttccccgtcgacttgcgcacgcacgcaagtgtcctggtttgcccgtttcttgtgtcctgacgacctcctttttaaagtggcctttctctcctcgccgtggttttggcctccaaggccgttgttgacactcaactgcggacggctgctgctgcgcgagacaaacggggcggaccgcgcgaatctggcgagccgaccggtaccggacgccagtgagtgtcgagtagacgaatttccccgacgaactttcgggcaaggcaggcggcaagctattgggacagaagctgctttcagcgctgcgtggagttggcggcttgcagatacatccgcgcgactgctgggcgtccgcggcaagtgttccgcgcagtttttcaagaaagatccttgcgaaacggaagaaatgtactcgccaaagggggtgagaggacgacagaagtgagaaggaaggaacagagaaaacgcggcggtaccgcgggaagtgactgcgcgcgaacgcacgacagacgtcgagcgatccgagggattgaggtgtcgatgcacggcattggcagcaggcttcttctgggcaaacccagtcaagagttgcgttctttatgcgtgccaaaccgccttcaattgacaggctggagagttgccattcaaaggaaaaaaagttcaagcagagttccggacgacggcgtccgctgtggctggtccgcctgcgcggtcgacgctgcgtataatgcacacacgacaggacacccgcacacacacgatttcgcgaagacgcagagaattgcgcttcttcatgaaacatagggaaaaagaagaaaccggccctgctttgcaccgtcaaaaaactttttctgtgcggcggcatgagccagtgagtcaagcctcgcttgcttgctgcgtttcccgcgcctcaatttttgcggcagcggcgcctcagcagccgcgtgcgacggggagagttcaagccagaaagccttgacgcctttagcatgcgtatttttgtctgtagcaaccgttgaatccttccgccctgacacactgcggaaagttggctttttcttcgctgtctctcctgcccgtttctcgctgggtgagccgagctgtcgttcggatgtctgttgtgacacactgccagccagaatttcaagtcgagtgcgctcagtccccgagaggaaagcctggaagtccagggatcctggaggccgatttctcggacaaaaggatagtgttcgacatttccacccgcttgctctgttccatggagccgccttcgcaaacagagaagatcttcctccttcgaacacgcggcgtccaagtcgctccctttcgaccgtagtgatcttcgtaacgttgctctgcacaagcaaccgaactttgatccagacattttgccttctggaaagcgaggaaggtgcagagagacaaaccgcaagaaaagtggagcactcgagacttctccccagaggaaatccttcgctcttccagagagtgctcttccactacaacagacaccttacacttcttacatgggagattggctgcgttcactttttccaccgcctctcgtgttgaggctgtttccaagagagaaaaggcgactcagaaaagaaaggctacgtagaagagaaacgcgatgcgcgagtgaagatgcaaagggaggaaaagaacgctcaggagggaaggtgcgagaacagggatacagaaagggatgaaacaaagacacagaaagggagaaactgggagagttggagaacttcgcactggaaagaactccagattacacaaagaaaggaatgagcggagaggaagctttgaaacggcggagccccggtgacattccacctcagcgtcgcctctctttggtcttcacgctcgctttaccgctgttctggacatggagaaatcgcgctccaggtcttaaggagttttgaaacacatccacacttgcaagacgccgttggataacagctgctctagaaagccattcgactaagcaactgaagagcggtggcgtctgtcaacccccctgcgcagagaccgcgacagaaaacgtcttgaggctgtacactgcccccgactgctaggctgcgtttggaaaaagccttcgacttcgatatcccgcgacatgcacgcgtcgccgactcgattctctgaatgcattcttatgttcttcgaagcagaacacaaggagtatcgacagttccttaggcgtctgtttgccaggagagacacggcagcatcgcgcagtcgcagtgctgcccttcttgatctagttgacagatgcaacgaactgaaagcggtcttggatgcggtaaaccaagatcggtaaaatctgaaaggaagaacatgttcaagatcctctatagggtctgtcgacaaaacctgaacatctccttcaaatagggtttatttcgtgttttaaaaactttttgtgactaagttatgcaaaacatcgtcctaccatctccggtgtaaatacaccgaaacctctctccctctcctcccgaagctctgccaagaaggcgcaggttcctgaaacgacactctgaaatttttacatagtgattgaacgacttctgtaattcctttagctgtgcgtacgaacttcatccttacgtaagactgtagaacaacttccttcagcaatgataaacaccgaaaaaactcagagtcgaagttttaaaagtatcctggcaagtgcgaatgaccctgcactggtgagaagcgctgtgtgacagggaggtgaatcggcgagtgccaagcgccataaacttcaaaggtacagaacagagagaggagcagcggcagcgaccctgccagcctgttgtgcttttcctagacgagaagaaaaatacattccgagacctcacgggggaaggagaggtcccaaagaacggcggccctcccgtgacgaaaaagcttccttttacacttgcttcaactctgcttctcctcctccaggaaaacctcttcttataaccaagatccaaaaatgatcagtcgacgcgatttctgcggcatgcctcacgacggacgacgccgcgggcgggcaggcgtacgtacacctgagcgcatgcgtgcagactggactagggggggcagaggaccgacagcactctcagggatttcttgcggccagttttacctgaaaaaacgagagagagacatcttcttttttctgctgactttctgggactccagagcagcgcctgagtctgctctccgggagcttctgtatccgcctcccatcccccttctggccggcctgtcagctttcgcgacggaggtcgctgatctctctgaaaacagtccaggtgctgcggatttctttctgatttcttcggcgcagtcctcaactgtgccagaaggcgaagggaggccgagggctgtgctcgcgaagaaggagaggagaggcgcatgcactcggactcgccagtagacgtcgagcagacgatcgctttcggaggcgttgcacaaaatgcggtgtggtttatggaggacaagggccattgcagttgagaaccgaacttggacgatgatgctggacgtatgcgtttcctcgactcgcgcatttggaggaatcgcgtaaagacgaagaagatggagtgcgaggtgtgacggtggctctctaggcgcctctgcggtgtgtaggtacaggaagagaggaggcgaagtatccgagcggagtcgttgcaaagactgcaga

SEQ ID NO: 3807 - DNA, 3882 bp, Toxoplasma gondii
  source 1..3882: mol_type = genomic DNA
ggagtccctttagcagcctatcgatcgccgcctcttctttgtcgcgctccggcagtccactatgacacagaaactcctcggcttctttccgcgcttcttcgcctgcctggaggagcagcgccgcccgtgggtcgtctgcaggcctcgccgggaggggcgcgacgctgtttgggatccgtggacgcaggctgtctggtgcgcaaataatgccgtacgtaggatctgtcagtcccctgcgtgggggcggaagtagcggcttttgctcctgaaaatccggcaaagcgtcggaggaacctgcgtttgcagacgcgccaccatgaagcggcgaaggcggaacggaagagtcgggagagcagtgaaaagatctgggctctggggacggactgggagaagccagtcgctgagcactcgtgtccagcgccgttccgactgtacataccttcgagatcccatcgtctgtgcagtcttgctcagaagcgccgggggtagcgagcgacgaagttaacaaatccatggcagttcccagacagtgaaacggcgtggaggacggagagaggtgagacaggggacgagtagaaacagagacaaacagaaatcaaggatttcgaccatgtgacaagaatgggaggcgcgaggccacaattgtacgaagcaaggtcaccacggcagcagggcacgaatctgtgtgtttctgaatgggggaaagaagaccttctttgagagatgagagacgcgaggtcagggcggagaaaacgttacaacatcatgcggaacaaactcttcattgtcgccgcttctcgcacctcgccgagaccccggcattttgactgtgttcttgtcacggcacacgtaaacaggttgaagacggtgcactgttagccggggaaatccagtgcgaaggtacaagcgatgcgaccgcgttaggactaggtttcataggaacgagcagaaaaaaaaggtcgagaaaaacaagacggcaacgcgcctcctttgtaaaccaggcacgaggaagcccatccgggtgaggcgtccggcagaaaagaggggtcagcccagagcgaatgaagacgggaaacgagactgatgagaaaactgaatgtgagtggttggaaaaaaagaatcatcgcaaaagtgctacgtcttgtttcttcagagcacgcgttcgacagcttctcgacagccggcacgctcaacggagctgggctttaagaagactcggaatctcggcagggaagttgaaggcttagctttgcttgagatgaatcgttgagaagctgttttaccgtcgcgaaagctgactgaaaaaaccacgacggtgttccgcgcaaaggggcaaaatggtcggcacgccgccccgtcgtgtttttccgccaggtttatttgggactagacacgcgactcagcacagaagtaagcgcagtgtcgctcgcattccacaggtggaaggaaggctctgagtgaaacagaaaactggcatggaagccaagcaaatctcgaaagggagagcgatgtatcggcaggatacttggggagttttttcacctccacggctggctgtgcatgcgaagaaaagcgtgtcttctggcgaacaagatcgtgagccgttgcgcgtcaaatcgcctctgtcctttttgtccgactccccagcatacacactctctcgcttttctcaaagcttcaaagacagtttttttgcgtttttgtctcaaagtttccccagatggttccaaaaggcctctcacctaggcacgggggttttactgcggcagttgtcggtcgctagaagacaagcgcccaacagtggcatttgccgccaaaacgcgctatcagaaccgcagggttcatggcttttgcagaacaggaaacgctctaaagagatagatcgttaacgaaggtagaagggtcgtatcaaggaaaggagttttggagagcagaggagattcttccttcagcagaaaaacacggggaactcgagagtgttgcgacttttttcactctcaggagcacgacttcccgccagctcagaagagatgcggcatcagcacaaatgcacatagaaatccggaaccactttattcggcgcactattaataggtttgatcttctgtaccaaccgatctaaaatccgggtgtgttttgttacgtgacgagttttatgcattggttgccacacagaaagatgtgtcgagttgcctcaaaaaggctcggtgaagttcgtaggccgaggaactgcatctagcaaggctttttcagagagttgcaaagtctgcagcactctaccaaaaatcttctcgtcccttgacaggacgcctgtctcatcggcctttaggtcagatccagacaaccaagtgctgtaggatcgctgcactactccaccttactggacaacccggttcatgtatggcatctaacgggaaactaccgtttctcatttcgtgtagtttgggacgtattgggtaacagaggggagtaccattcgaaattactttcagagttttgaaaaattgcagggaagccggaccctagacgcgttgaagcattgaaaaatgatggcgcgaggaagcaccaacacaccgagcacacacctcaggcttcttctccctaaagtcaccaaaatcattttacaaaccgactagacagtggacttgttcgtttcatttcgttccttcctcgggacgccgtactcaggagtctagcttaaggtaccatcaagcatacgcccgcgtacgcgagcctgtcttcgactgtaggcctcaatctggagacatcgacctgcacattcctatccctccgtatttcttcgccaacgcaggccacacaagcctggctgacgaagaaacacccaagcgtgaagcaccgggttagtcaggggaactgcgcgttggcccttctagatgttctacgtctttttcactcaggatatttaccgaaaatacgcacttccagctagacgccatgccatgattgcggccagtcaactccagtctcttcttcgtctgagtccgctgccatatttgtcaccgttcacatttctcccagttgatttcgtcactcctactctacatatttacttttttttcttcagttgcaatgttgagttactttatgaggcatcctcctacggacagactcaggttttcatcaattctccgtttggggttctttccggtttgcctcatttctactgacacgcctcactacgctgttatttttcgttctgttgtcttccctgaaacgcgcttctcactggggcattgtcgcattgcacgaggtttgatgttacctttctaagagtacacagagtgtcgttcacttggttttcctgctgccttccagataggaataaattaatgcacagatggtaacgagctcgactgacacattgatcattgcgagtgaagctgttttttcaacttccttgcgtatcccagatcgaaacacgttttgcgcactgagggaaccttcttgccctcccgtttctcgtgcaaagtatctcccacgcctcccgttaccatgtcaacagattatcctcggataacaaccaattttctccgtgttacccgctgaagttcgctcctgcttttgatgatcggtgacctgctctccagatgatccgggcgcgtacagtcttgtggcagctggtcatcgaagtcgcttcccaagctttgtttcctttggggcactcccgtcgtactgactagaatcaggctttggggttttgttgtcgtagtcaatttttgtcggactgcagtctgatgcggttctctgctctccgtaggacacttgctagtcgagttctttctttcctttgagttcgtctcccactgacaggggctgacgtcggtttattactggaacgtctacaggggcttctctctgcga

SEQ ID NO: 3808 - DNA, 2509 bp, Toxoplasma gondii
  source 1..2509: mol_type = genomic DNA
tagaatacgccctcagatccagggagaatcgacgcgacaaagagaggcctgtcgggagaagaagcggctcttccgaggcgcggcaagtagggaaaaagaggaggaagtcgcaggaaagaggaagcgcgacgacatccctcacgagctgagtgagaggcgtacgaagaagatcctggttgggaagaaagagagctgggggttgagggagacgccgagagtcggtccactgagaccgcggagaaagccgaggaggaagaccacgagagaggagggtgaggtgaggagagggcggagctgcttcgaaacggagacgcctggggagacaaagaagagggaggaaaggatagagaggaggcgcgcaaggagacagtggcgaagcgaagaagcagaaaggacagaaggaacgaaagaagaagagacgaacagtgggcgcgtccattcagggccgcaggcagaagacagaggccgcacatgttttctcagcggtagttcggccgcgtcatccggggcaccaaggcgcaagaaggcaattgccgacgatcatacgggacgatggagacggagaaaacggtgagtcacaaagccatttagcgcccgagtaaggcagagaagaacgaagaggagaccctttcgagcagcaacaaaaaaaaagtccggtatccccttcatcgcgcccactcttctcacccactctggccgttcctctcccgccgccccattgtcttccgttctctctccttgtgcatcgctcctccttcttctctcctcagccactgggtctcgccttatccttctatctcttctccactgtcttgtctcttctttctcctggccgctctagaggtcgcgccgcagttcgcactggaagcgatgagtaagcgggaagagcgtttgcttccccatgctgagaaatggcaacggatgaaactggagcagacgagaccggccagggaaaggaagcacggcccgcagaagttcggactaccagtgtcgctgcaacacagcagttcgacttgcgtttgtatatttgcactggacgttccaagaaccgcaaaacacgacacagacttttgttcaaggacagcgaagtctgtcctttgggtggggtgaggacgaggagcgcggcctcctgtccgctctcgacttggaaatagtgtcttgtgcgcgaattcgacaggcgatgaacagacgtcttcgccagcctccctgtttatgcctctctctatggagaaagtccacgtagaaatgtccgaaaggtgtgctgtggcgatatcttcttacttttctcctttaggagaaagccgcgaaaccttacagagagacgggagacacctgtgctctcaagttcgcacgtcgccttcagcgttaaggcttagggttttagttgccagcttctttccgctgagtcgaaaacatgcttggagaaatccctcacggttttgtcacgaggggtaatctcagaaaaagagaagaacaaagggtctgcgtcgtttttctcttggctgttacaggttctcaagcatcgattgctaggcgagagacagcgccggtgtgtgcctgcgctaccacccacaaaagcggacgacgggacatttgattccctcgcgagttttttggaaatactcgcaacagaagtcgcagctagcccgtttccttctttagaacaaatagttagtgggaactcctttctttcgccgtcatttgaggaggcattttcgctgcggatctgcccaggacattcgacaaaacgacacgtgtcggcttatatgtgtagcgcagaaacgcggaagccgtttttccctgcgattttcctccggtggcggagtgaatgaatccgcgcatgctccaggttcttttctcaagaaacagaaattcgcgaacgttcttgtacgagaaggaaaaggagaaaaaacaaaagcgatacccgctggatttttcgtccttcgtcgcccctggtgtctgcgccgcgttcacccgcttttctggaccggtttcacgttgggagtctggactttcgtctatttttcggaattctatctgtgaagggtttcctttttttagtcgtatgctggaaatagaaaggcgaaattctatcttgtcctgtccccgtcatccttttccccctcctttcctctcgcttgcgtcgtataccccttcctcttgaggtctttgttagctccccccgtttctccgttttctttgtgtgcctgttcgttctcgttcttgcttcgctctctaagtttcccgtcttccttctttctggtcttcgctccatctctccagaccttagcacaggactaccttctctttcgtaagcgattgtgctgggtccttttccggtacggcgtgatcgaccgcgtccgtcgccagccttttttgggtcaccgctctgagcttccccagttccttcctttccctccgcttcttgcgctctttccgtggtgcggtgtccgcctgcttctcccctttgtgtgtcttcgtctctcgtttgtccttcgacttggcaaga

SEQ ID NO: 3809 - DNA, 3691 bp, Toxoplasma gondii
  source 1..3691: mol_type = genomic DNA
gggagacaagtgtccctacttgagtagaatcagtgcgtattttgaagcacctccaataactgccactatccatttacattggggaagagacgagtgaaagatccactagacgggagtgggtccccggttggtgcgctgccccgtggagtgacaagccggtgtagcagccagaggaagctggtgaagtgtcttgttgcttccgtatttgcgggggatgcggcaatactgctcaagatgaaactggaatttggggagagggcagagtaccttatcaggggttatcggaatggacataagcacacactcgacgaaagctccatacgtcaacggcgctcacgtttgctgttgtcagcgtccacacaatacgttgctgttgctttgccattatttgcacagggctgggctccacgaactgggacgcctaactgaatgccagccttcgcaagactaagcagacacatttttcgtttcagcgaggggaaggctgacaagacagggacccgcggtaacgccttcgcttctcagcggctgcgatttggaggaaccgtgccccgtcaacgacaatctcagctggttctcgtaattgacttcctgcctccagaaaagtgaaattccactctagcttccgtgtgaccatcgcgaagaggcggcgttcgtcagtctcctaacggctggtaatgaacatcttcggaggcaagtgtaaccggcagtgcgctggctaacacggccgcggttctgctgacgaagatacagacgaaaggaagactgttcacttaattttccgggagaggggaagccatatcctctcaacaggatgcagggaatgatgcctagccgtaattcacgcatagaaggcgagttgaggcgcgttcgaactgaaaaggatatcgggcaaaacttctggattaaagaacggcggcaaagacgtcgtccggaagaagtctgtagctagttccttgctgaggatttgttggcgtgcgtttgctgtcttctgaaaatgtctgactactccttccgccgcaagttctcattcggatcaggcatgccacggccgccacttgcttggtcaggggacaaaaattgggaacctacgtgaaattgcgatagtgcgaggcgactcagttgcttcgcatgtgagaggatactcagcaatattgcaaggactggttttttttcacggcgcgttttcactgtgcaaaaaacggacccgtttcttgagcgggaggagagggcgtgagtgtgtatcgacgtgaatgttttcctccagactctacacttgacggcactgcttcagaaggttcctcatgacatggtagaaaacaaacggggaagcattcataaattcggtttcacaggtcgcgcgagcctcggactaaccgggactcgggcacccgatggtaacttttgttgcaaggtgttttttaagttcccatccgcgttccaggttaaggcaccacaaaaaagggtaaggtgcgtcgatccagcacgtgacggtttattcttttttgtcccactctgacttcatttcacctttcggagtcatgtgtcgccgtctcattttccagaaaactagggcagcgtcttcgagtttcaagtacgtgcttcgcaatacctatcactgttgctgtttggggcaacggtgttacgcatctcagagagtgacgccgctacagttttgcccagctggggctgaagatacgggcgcaggttgatcctttctgggaagcatggaatctttgtcaatttcaattgccgtcatcactagcacgacacacgtattgaaaacagcgttgaattccacacctcagagtgaagagagaggcgcactatgctgagcttcgttttagaggggcggagtacggctttgggtctatcgaaactatcaaacctaggaaacactatgccgctcatccagtttgtggaatcacatatttgtcacactttataaccaggaagacctagagcaaaggagcagaataacccccagtgctgaagtgttgcgcacctaagatggagtcgcagttattggcgcagtgagaaacattgcttattgcggttggaaaagctggctttttagcatcagccactccaccgtacaagcatgtgtgtgtccagtcggtttgaagaactcctatgctgcgcaacaatcatcgggatgaattgtgggttccccctccaagcattggcgttacggaaaatggaaggccaaagagacgcacatgtgctcgagcatgacatgagcggtgtcataactgctaagattgtgccaaccacgaccgattgcctagtaatcagtgccacattcagacggtctttcccgactgtgagctattctcaagatccgcagcaacatgtgagacaaagaggtgctgtgtgcagtttacactgaggtggcgataagcgagctacgcatcgaacgaccttgttgagttgatgcgatttcatctcccgaaggttgaaggatgacacttcgttgaatgcaaagtggcctacggaataattcatgtaaactgcaatcgccgccgcggcttcaacacgcggaagagggagcggcgccgcgacacatcacggaaatttgcccgacaagaaatgtgaggagctctctacaaagccttcctcaaacaccacatgctctgaatgacacttgtatcatgtgccaagtcgtgcttagaaacccccgcgctcgcagcattccagttgagtatctcaacagcacgaaacgtaacgcaccgccaaccgtgtttgcagcggcaaggacagtcctgttctatgcacaactgcgagtcatgagtaattgattctccgcatcgtttttacatattttcccctcacgttacttctgtatctcgaaacaagcttatcagctatgaatatgaggtaataactgtatctgccttccacttttcccccgtttgcgaacacgagctggacgaaccttgagtcgcgctggtgcgccagtgactcatcgaacgtgtggcgctcagagtcgtcgcctctaccgccaaatagaaatcttttccatggaatcgaccgttttacccctttacagtctctctaccttctttaaatccctcaccagaggttgttctccttgcgttgaaactcaccgtcgctgggttggcagagttttgagcgttcagcggtggttcgcggtgagtgctacactcgcgtcgattgccactcctcgaatttcttttgaggactaactgaggcgcttacttctgcaaagactccctcattcataatttcctccttcttccatccaaccgggtcttttttgctgttcctgtgtaatttctgactgacacagtatccactgttgtagcgactcagttttctaaccaagcggatccgcgccaagcaagaattgtctcgatgccttcaacattcaagtgaatttgaggagccccccttgaactagggctttgcaacaatcttcttccggggcgtgtggtaaatcccaggaatagcgagggtttcctgccatcacactcctcactggctgcgaaatcgtcgtactggctctgctttttgagaatcgcggcacggtgatcgacgagagcaaaacttgacccattggcatttccactattcaaccaaggcaggtttttgcagaggtgtccttcagtgtcaaacgtaataaatccctccttaagtccttcccgtcttcctttctttcgtctgagcaaca

SEQ ID NO: 3810 - DNA, 4760 bp, Toxoplasma gondii
  source 1..4760: mol_type = genomic DNA
caatgcgctgccggaagaagcacggaagggaagtggatatacagtaggagggaagaaccctcggatgcgcggaactgtacatcagattccgaggagccatcgagaggaccgccccagcggtcaaggctccacgcctcgcatgcagaatacgaaagaaacgacaatacagcagagccgcagttaccagctcactgtgtaggtgcgaagaaataaggtgaaaacgattccggcagcacggaaaaagcggttatcgagtagacaaagttatgaaactgttagcggagaagagaaaaagagcgtctgaaatatccttcacatatgtgttgcggaacgtattggaaagagggggcgtagcaaggctttcacgctcggtgtactcgcgatgtagaggcaagtttggagtccttcttgttcattctcggtgtctccttccctcaaatcacgcctgccccctcaactatctttctctgctgaaattcagatttttcttcgagactacacgcaaggcagacgtccgaaaatgaagacagagggacagcccggcctggtgcagaattcttgcacctcacagagcgagtattccgttgaaaaggctgttagaaaagccttttggaagcagtgcaagtatgtgaaggctgctcaagcgaccactaatgaaaccaacaagagaaagacgagggaaagacgttcgaacaatgacaggcgaaaacacgtggcccacccgacacagctaggactgcattcaccttgtggcccttcgttggggaaaaaaagagtccggatgggccacacgattataaacaaggagattccagtggtaaaaagtagctacagctcgacttcccgttggacaaaagccgccgctcctactggcgctggctctggcgccacctaggaaatccccgataggaaaaaaggtcgacaaaaggcacggcaagagttgaaagccgctgtcggcgcaaacacgcccgaaataaccgtttcagtgcagtgggaagagatgaaatttcgaaagggaaaggacgaccacgcttttgaaactgtcgcttatctggaggggtgctcagacggagttccggaagcaatggacagtagagaacggggaggcgcctgcgagtttcctgcagcgccgactgatccacgagaaaacaacagagaaatccagtctgtttgaagggggtgaacgctctccgtttccctttcttgtgatgacagtaaacaaaaccagcgtttacttttcgtgcatgcagttgagagaacacgcctaaggtggacttcgtcgcgcccgcgcaggcgcgaaaccgacagtgtggtgtgctggcaagcttgtgttccgtttgttgggaaaaggaaaggtcatttcatatccaaaaacacccaagatcctgcaagttcctttacggatcggtcaagtatgctcaaggatcctttccgcagcaattgttgcaacaagtcgcgtgcttttctgcagcttcaagcaggagtttcacctccatttgcaagtaacgacaacaggggaaaattgaaacgtgaaacgaaaggaggcgcgtggttacacaagcttccatcagtggcaaaaacacttgaccaaagcaaagcagaatcaggtcaagaatgtcccagatctccttgatattctttattatattaatacctggtgttttcctggtgtagcacgtgcagtacccctatatggaagctaccatactatctggaactgtacatcatgatgacgtactacaaaaagtagagcgtctgtcgtacatcagaactagacactgctaatgccactgtgcagtgaatgtacataatccctgcccggtgctctaacgtgtaagcggccgtattatgatggctcccagaatgcaacaatccaaatgattgaatgaggtgaagaacctgtgttcacatggtacggatttagagcacctccgattatgtcctttagagaaggtgaaaccacgtcggtcgaaaggtaagatggttccttaccgtaccgcgcagtaaccagggttcaggttcgtcttttgctgtgcctgttttggtgcagtcaccagaagacaccaagtcttaaacatgtctacacgttcgatactaatatcagaagtaacaggtcataacaggtttctctagaatacagcaaatagagctcaccgcagcgacagaaacgaatcaccaacaagaaacgagaaacccggtgcgaacaacatcttgtgattacacgaaggcacagccgctctggacaaagggtttgccgctaaaaagaaaccttgatctgacatacgcgttccctacgcgggtagaagaataactgctaccattcccgagtagcgcagcatggatatgcccaacagcaacataaagagtttaggctttccatgaattctgtttgccagaacaggcatgacagtgccaccgtgagtgcatactatacagtcacgccactatcagttaaagtataagcaggcttgttcactgttcgcggcacctcagatacaaacgcgggaagcagccgacactccacgtaactgcgtaaggaagctgatggtgttggacctcaatatcctaacggcattcgtgtttgcttgaagcctgttgtcgttaacgatgttgattcagtgtcagcctccgaccttggtcacacaactctagaggacaacgacacgctgtgtcagaacagccctatcacacacttaactcggaatgcgagaggaccttggtatgcgatggaaggtgccactaaatacgaaatgaagtgggacggactggtgacgcaaagcaagaatcttcgagcttcacaaaagttgcgtgtgggaggatgttcaagcacacattgtgtccgattcaccgagatgcttgtctcgtgccaaatcgctgcgtgccaagtggtgcatgatcattagcgtgcatgaggttgaacttcctcctttcagctggatacgctgacgtcagtcccgagaaactctaactccgagtccattgtcgcgtttaagtctctcaaacatcatggactcaacgtgtaccgccgcatctgaatggtacttgtgttggtgagtgttgaacttgggggaccgagtttaatcctctcaagcattatgtagcgacgcatttgcctgtcgttgtgcctcgcagttcttcccaacccgcagttgagatatggactttatcatctctcgttcaccgccctgaccctgctacgcttcaaagagagcgcccgaagtgcaggcagagacacccgagagcagcggttgtcagcgcgcttcttgtttcgtgacaaagcatctccaaaaaggctctgagtaaacaagggtccgaaaactctgcgttaccccgttcctgtctctgccgcttaactcgagcgaggcagccgactcactagcgcgcggtatgctcctgtcgcgtgtcagctggacagcccagaaaaaacacgtcgcgtactcctgttttaatacctccaggtgatctggtacgcctttgaagagcggttagcatccgcgaattgctctagattgcaagtactgtggtcgaaggaaaaaaatcagcagaaccgttaacggcagaggcgccgccggcgcggtttgtctcgtcggggacggctcagggcagcggatgacacttccggggtcagttcgcggtgaatatccgttcttttttctcagatgccaacgcatcgactcaccgaaatctggtaagccccgaaacccaaaagtgcctttctggtcgctctcaaaggagtgtttttccgtcgcgaaccccgagctgcgattctttcccattcccttgagctacggcgagagaaacggttccgtggcgcgcgtaacgctgctgtctcttcgcatgtttctcgcgcttttctcccagagttaggagaccaccgattcggcggtttttcggagaaccggttgtcgctgtcacagacttgctttgcgacgacagtgctccactttctgttgttcagtttgagaattgggattccccccgtccccgcacaagtatccccgcacccacgaactggcagatgctactgggttgtcggcccggaaaattcctgcctggattttttttcactctggggattcagacgctacgagagaatacagcaggatagcgctgggatacaggcgatgtacgtttacaccccagggctcgaaatgagtgggatctcttgggcggtctcgtctcgtgttaaaagaagaaagtagatctaaacctgccctctccgtcgctctctctgtcgtcacactttgcaattttcaagcggacttcctcattccgaaccctctaacggtcaacactcccgttaatacgcatcggtgtgtcgcggctcgtatgtgcatgtcacactattctctcttctctatatctcatctctcttcaaattattttttctgttcctcttttcccgtgttcttcgtttctcccgaactttcaggcaaagacgccacaaccacgtccacagcttcatccttcttccccactttcctggctgcagagaggcgaacttctttctctgtatttttcttctctccccctccacaggcgaacttgaccgaagcggactttcttgaggctccgtggctccgagagcagaacgacattccaaggaaactttcgcgcgactcttagtggtcgtcccccaggcgttccagtcttcgaggtcttctggacctttccccgagcaggtcgtgtcccaaagcgcgtgcggccgcgtttctaaaaaacacctttctcgaacttccctttccacttactcgagaaaa

SEQ ID NO: 3811 - DNA, 2042 bp, Toxoplasma gondii
  source 1..2042: mol_type = genomic DNA
tcgttaatgtcacttgtcgttaccgagtctggctcgaacgaaaagtcgacaaactgatcgtcttcccccgcaactggcgtttgtcgagttaaagtctcaagttgttcgagcagatccatcactcgttgctctctatatttcgaatctgatggattcaatctggttgctgcagccttgacggagtcactaggcgcggttgatgacttagttgacttcagctccgaaaaaccaaacgcattcatcgtgacatcggcacctgagcgactgtgagacgtcccctgccagcttgatactctctcctctacgtcatcttcacccaccccgaggtcattcatgagctgttccaaggagacatctgcgtcctcttcgtgtgaattaatggcagagccatcaaaatgctcatgccgttgaacagccaccccacgacgaacacctctccattgcgaaaaaactccatcgcgtgcctcctcagctgctggggggaagttgatctgttctggcaagtattcgtcttcagtcaaagaaactgaccgtgctccaaccccccctatgtggggtacgtagaatctactcacatcactccctgagaacgatgcaacgcccagaatggctgacttaattgggatcccaagtgtacatacggaaagaagaagactgcacacgcactgtcgtagggaaagacgcgagattcctggtcctgggaccgttgtggctctatcctccttccccattctagcgtccgcagacgcgagctgaagcgaagacatgctcatgaggcacaacctggaacagccgaagtgtcctacacggaaacaacggacgtcacgatacaacgaccgaatgagtgcctgatacaactgaaatgaactagtaaagagataaagcacgatgaagcagaaaatagcacgagaagtagtagtttcataagcaccgaggagacttcgcgtcaacaacgatgccggtgtcctgggcaactcgggtcaacgcggcgggtcagcgttgctctgcgtcaccccatgagttggtgctgaaaataaataaaaaatatattgccgaggatatttgcagaaatgatttaaacgagacgcccttgcaaaatctcgctgccactcttgacggcggcggccggctgctatctaggcgacgtcgtcaaaagaaatgggtgacgccataccatccccgaaatcttcttaaaccatgcgcggcagatgatcttaattgctgaacaagggtgattgcaggtttaaaaaaatagcagagagacagtcttgtgaagcatggctgtctgctgctgggatacgctttgtcttgttgcgacagccggcgcaagacagccatagggatctagcagctaaaggaaggcgccgggctcaactgccgcccgcaccaaggatcattgccagcgcagtgcttccgattttccaaaaaaacaattgtcacaatattctattgttaactgagcaggtttcctccttgcacaaaatttgtgcgacgcttgttaaggcacagaggctccacttgaatgatcaggactacaatagctgccagaggcccgcgcatggctccagcccttctggcgcgccactcaatctccgtcgccgcacgtgggaatcggtggccacatgcagcgagagcacacgaccgtcactcacgtggtcagcgcggaaacgttgccgccatcaaacagcggtgaacactggtggtacgctttgcgcagcgcgcggtggctcagttttcccctgttactgtcctggggaatctccacgtcgtttcagcggaacaatgtggaaaggcgatgctagtctctagaaaccttctggggaagagaatcacagatgaatgaagccgcccttctgactgatactccaccgccttacaggagacaactagttcccctctgggaaacttaaccagtccatcttttgccgatgtcttccgcccgtagccaattttcgcagagggcgatagcaaagtcctcacccttctcggtcttgatcagaagtcagaggtgctaacccgtaccagtgtacaatgagccaaaa

SEQ ID NO: 3812 - DNA, 4655 bp, Toxoplasma gondii
  source 1..4655: mol_type = genomic DNA
caacggtgaaggacgcagacaaagagagcggctcggaaatgacaactgcgaaggaaaatctttaagaagagagcaactcgacagtggcagaggggaaagagtttcgagacgcgagggagtcggaagagtgacagaggagactgcccttgcagaagagagaagtggggaagcgcagagacgaaagacgcagcagaggaacatagacaagagggtcgggagaagtcgggagaaacgagaggaaagcaaccgcgttgtctgtgtttgcgaactctcaaactcacgtatttggatcttgaggtctcctctggtgtcttcacagacggcttcaatgcaaccttccccggaggatgctcagttccaccacagacatttactccgtctcttggcagtgtttggcagcagattccttcctacagtatcggtctccgctggtcgtcgtcgctcgtggatccttgcaacatttctgcatcttctgcagccacgagaaacgcaaactccctggggcactgcacgggttccctgacaagcacacgtcaagctgcgtcgacgcgcgaggtcgtcgtcttcaaagtcccgactctgttcaatgccttgggcgaagcaaccgaagaaacgtggaagaatggtggagacctccaagacgtcgggaacaaagaggcgcgtggtgtaagaaacggtgcgaacagagcggccgggttcatgcctgtagcgccgatagccttgagcgtgtctcagggaggcgttcgggagtgtatgaacggtgtgaggaatttctcatgattgcctggtgtgtggaatagacagaaatcaccttgacgtctcaaaaaaaacgaaggtgtacgactggaaatggccatcgatgtctgcatggtagaggtagcggtacacccagtgtgcaaatgccgctgctttctttgtgccgactcgagacgatttctccactggatttgtggtggatacaagtggactggtgaacgtgtaataaacagtgttgttttccttcgaaaggcggtcccatgtacgaccttgcagaaagggtggaagaggcccgtacaaaggaaggattcgagaaacgcttgcgaaatgcagaatcgcgtgtcgcgaggtgtcatatgccttgcagataatttcaagttggcgctgtcactcacatctgaagcctctgattctttatctctgagcagctgcttccttgtccgccactgatcattcgaactcctcgcgtccacaaaaaacccagcacgacgcattcgaaacatgcttcgcgagtgctgcacatgaaggatactgctgtagagagagggagactgagcgcatacacccatttagagaggagaaatatatatatatatatatgcacgtactgatgcaggtcaccggctaggcaatcttcagtgtttgggtattccccgttcctaaaagaggacctgaattgctttgaagggctacttggccttcggcccacgcctgccccgtgtcgatcgatgtcataccgtcagcctgtcgaggtcaccttagaatttgtggtctcggtaatgcgagagaaagaacgccactgcagttttccactcgtaagaaggcagcttgaaaaaggtggccagaaaagctggcatccatgtttcagacgaaaacaaacctgtgactgctgggcaaacggtgaacttttgattcagcagggttaggcgagagagaagcctccaggcgacagttcgctctcgagtgtgcctaagaaccagacccttgcctaatctgacggcacctcaacgcccgatcagagacgcagtagtctgtttcctctcttccggaagatatctgcaactgtcaaaaaagaggcaaccacgtgtgttgccttttcttctactaactggtccgtatttcacagggtttacctttcggtaactagagcaaagaccgacgcaaagcacacgtgtgtctaattagccctatcagttttcaatgctaacctacgaccggaacccaatggggtccgggtgcatccagtggtgccgtgactccttgtatgccatgtgaaggtgcaaacagaaatgcggtgagttcctcgcaaatgctggttgttcgctgtgtctagcatgcataccctgcagcttccatcggaaagaccatctctggcgtccacccagctacaggtgaaccggtactaacagaggcgcagcactagggtcaaaatctcagaaaatgggctgtccgcaccgcagtccagttgcgctatatctgcgggctcgaacctgcccggaaaagactcttccgcatccgtgtggcaagaagcgaacagcgtcggtcttgcagaagcgggatgcctagcagttcatcgggactggacacgaagcatctgccgcttcactcctgacttacaatttattcacggcgacgaagactgtttgaaaaaaaagcctcacgtgtaacaaaagggcaatatcgactctccacgtgatagttcgcccactgaaaaatcgtcactgggacaaattacaaaaccccgcagcaccaacgaattgaggcgtgcggtgtccacaagggtggccacagaagaaagggttaaacgacttttatagagatacatacgcatatatagcaagtttacgtctaccgacttccaccgtcggcttagagctctatgctgtgttccagtgaaacaggcgcctgcgtgtgtgcgttctgcacccagggtcgagtggccgccctgacctcgtgcatctctgcttatcctcggaagcttcacgaaaggagggattcggggacatcgtcactaaagagtctagcttgtcaatttcccgatgctatccgcctgctttgcctctccacttgtgctgtgtacgtgacagtgccgcacgggcttctgccacatacccaatattgtttacgtgagcgcgaggattctgaaaaaacatcgaggcgttgtgcccgtagaacgttccgaggcttggatctagagaaaattagtccttcttgtcgccggccgcaggctgctgcgacccagaagcggcggactggccgcggaaatacttgtgaccagcgtacgccagaccccccatagcgaggagtgaggcaatcgtggctccgatccttttcatcagggacgctttggcaggttgctgcgtctgcgacgcgatcctcgccttgttgccgtaagccgcgtcctcctgtggtttcgcgtgagcttcttcagtcgcgaaactcgcaaggcctcccatggtggtggcgtccccttccatgccgactgcgttctccatgtccatcgttagagaattgttgtcatctaggaaaggcagtgcggtcgtgactcgggtttcaccagccaactccggctcctggagctctccagcagcttcactcccaaatagtgaggtttcaacccccatggtttcaggtgactgaacaacttcatgctgaacattgtcagcctccggaatagcttcaggttcagaaaaaacttcgggcggaacaatgtcagcctccggaatagcttcaggttcagaaaaaacttcgggcggaacaatgtcagcctccggaatagcttcaggctcagaaaaaacttcgggcggaacaatgtcagcctccggaatagcttcaggctcagaaaaaacttcgggcggaacaatgtcagcctccgaaagaccttcatgtccaggaacaacttcggcctcgaccgattcaggttccggaacaaccccagcctcgacagactcagtctctgaagtaaaggggtgttctttgggaaggccaacgccttcagcgagcgcttcaagcgtgtcgttgaattcgttggaacccactgcgtctctaaagaaatcactaagacccgccagtccgccttctccaccgaagagttcagcgacctcttctaggtctgcggcctcgacaccgtcctgtgcagactcacctgcctcgttcacgtcgtcggcgctcggcaagtcctgccccagttcgccgcgctcctcggggttcgcaaccgtggcatctccctcggtgttgacgtctgatgcacgaactgacacaactccgttcggagcctccgacccgaacagaacctgagtcaaactcgcgggagagaggaggaaaaaaccgagagtcgccgccaggggccgggtaagggcgcggcggccgccaccaacgcgcgagatcttcgccattttctccgtaggccacgaaaaatcgtccgttctagaggtgaagtagtgtaggggtcgtagatgcaacgctccgaagacgtttttactataaaaaacgaagggcagcacagcttgaccggcggaggagcgttgaattgaaagcatactgagcccatcgcgcgtctacatcgtcggcaacacccgaccgggagacacaccaaaaagcgaacgcagcggcggggtgagtgaggggaaagctgggtggcaccgacgcgcccgcggaagcgacgttgggggtagcccaggagcagctcccatgataacagaaacctggggttaaagaagccgcaccggtcgatcccggtacctctttcattctaccgcagcttccagtgtactttccgcgtcaccaaagcggtcagtagaaccaggttcgagctgctgttcagtttttttgacgatcgacgcgtcttgcctttactgttgtgttcgtacgaatcagctgccgtttataggtaggcatca

SEQ ID NO: 3813 - DNA, 4308 bp, Toxoplasma gondii
  source 1..4308: mol_type = genomic DNA
aaacatctccggtcccattcaatcttctcagtaaggtgatgttgtgaagtccgcgttaggcactctcctttttgtgcgggttgatctcctgcagttaccactgacacgctgctcctgaggcggtttttgcattctctgtgaaggggatgtccgtccccgtagttgtttagaattcctttagttcttaaccacgccagcaagtgggaccgattcattcggaaagagcagtagcaagtagtacccagtacgcctggcggctccagttctccttaggaacataccacggtcctatcaagaaaactcaccatacagaattgccgaaaacgaaggcgacagtacttgtcacaccttttgtatcaattggcatccgaaacctcatccggcgtcggtagaggtgaggcccaacgggccgtcagaggacatcacctgatgcaggtggctaagggctcacgtaggggttgtcgcctcactcgtctgcggtatttcatgtcgggcttgagcagtcagtgaatgctctgatgatttgtggtagtgataaactgaacccaatgatcgtcctcgtcggatgcagcccacaattgaagcggcagaaccccaagtgtagttatcggtggtaacagattcactgacggcctgttcaggcagtccacaaaagcaaacgaatgtctttaattttaagctctctaagttgacgatttggcagcgaaggagaggttgtggtgtctccttcacatacggtgatcagcccgtggttgatccttttgcccccatgtcgagtagtgccacctatgcagacgctgaacaatgcttcgctccactttttgggccatccggcactgtacagacaccgaccgtgtgcgatagtattcagtcatttggacggcatcgctcgtacggacactgttttgctcgattgaaaaatatgggccaaaaggattttcccccagcgtcacggtacacagttgagaggatttgtggttacatctgcacagacgaatgaggcagcttatcctactttgtacaactgtactattactactgctttccagcacgccgcgagccaacgcacaagatgaggacgatgatgaggacgagcaggtcgaacctgaccagactgaagatttttctgaggaggatgaagactctgaacaacagatgaacaaacctgcgtcttacatggagccaagcataagtccggcaggtgcgtttgctgaaggtgtcgggcttaatgtcttacctgagatagcggttctccccaggctttgttcactcgaacaagtggcggcggtttaggtaacgacattagatcttggattcacacatagcttactaacgtgattgatcgaacagggaccgcctcgaccctaccacgcttcgtggcgatactgcgcctgagaggtcatttcgaaatcttgtcagacgtaagtatcttccgggaaacctcgtcgaatatgcaaataggaacagtgcctgtaactgctcgcagattactatgatgtcacagaagaaagctatccgaaacccgaatgataacacggagaacgcgtggagactgactgctcgttaagggaacgcatctcgcacatggttgttatatgcctggagttggtgtgtgatgtcctcgtagagacgactgcttctggcgtgctgctgtcacaactccacacgcaagcattgttgttcgacaaaaccggaacaaaagagtgtactgtggttcgccggaagagcgacgtgagtaatgcaagtactctctcgagtgaagctaagggaggcgactgccgaacgccaagcaccattctgcttctttaccttgcatctctgccaaaatgttcctaccctttgccctcgcatttagggaaccactgaagaacaatacagagccgtctggtccctgcttgcggtaactggaacgggtgctagggaggtcgaaaggcgtagtcgcactgcagctgtttaccgacgtctggccaaggacaacatttctataaatcatggtttaacaactacaaaatcaccatatcagacatcttacgatcaccaaggcaacgttaacactaactgcacgcaaaacaacgaagaccaagacaagttgtcattggtagccggccaggcgccactacttttgcacaggaactctcaggaggacactgcagtattgtacattttccactgcttcaagccctgaatcagatgaggatcacgcaaggactttgtgcatctgattgagcgaacatttgacctgacttttcctcgcgcgtgcccctggaattgttttcctcgggtactgaagtgtttgcgtgattggaatggttcagttccacacaaatcgtaggacgtttccagcccgcagcagaaagtgtcttcgagtgacacatccctcttagaactatgagttgaagcatactgtgacttctgggggtgtccgacatccctacctccagcaaaaaacgccgacgacggacgcatttgtgactgagccctcgcggatcgaagtggtggaccatttcgtctgttttagtacctatttaccaccactgtgccactgcttaccctccattccttgtttccaagtcgaactgtagtcctggagcctggtatctcagacaaactgaggaaccaataacatgggagtctaatgccagaaacagtttagtaataaaaaactaacgcctttcagcagctactcttctacgactcctctcagcagcatcacttgaaacttcagtttttcttgcaacaatcgctagaccaacaagacttttgcatttcgtgttgcctctcaggatttacgactttcagcagggtagaccgctgcgtatgacttcttcaaacttgtcactctacatggtttcgttattgatggctagacctagtcagagacgtacaatggaattaaaaagtgtggagagccagacgttcaagagatgttgacagtcacgcggcagcatgaagctccttgtagttcctatttccagggtgactcctagtctaaatccacagcagaagtcgatcacaattccttgtctacaacgcgacgaagaaaatgtttttgcagtgtggaaacaacgggaaactgatccagtggatacataatccaaggacacacagaaacactgagccccgtcgagccgttggtggcagcaccgcgccgccaacaccggaaaatcaccacgcacccatcgccttctcgagagcggcgagtgacctgcgcataaaatcatatctcatcgaagaacccgaaaaactaacaaatgaaattccaattgcgattggaaacatgtgcggaagtgttctcccgaaaaaaacggaaggcagagtgtgccttcaagcccaagccagtggaatcgtggggtaccatgctgaccccctggggtccgactgcttgggtaattccgtgcatgcaccggaagaaacgtcgcatgggcaaagcacagccgcttgtgcgaacatttccttcatttcgcgccctcgctaaaggaagtgtccttggttgggagcggcggagctgaccaaggaatggtctagattcgcgtgccacttttagcgccgtcttttcctcctcggactccttgttcggggcggcgcaaagcttcagcctttgcccgctgcttgttaacccgttggtccgcggacttcttgtctcttcagttctgagcagggtgtggcttggctcaaccgtttctttccattcttcgtttcagccaaagcgcaggcgcgcacggatgtttgaccaggaatgcaggagcagcgacgtgcagctgtgcgcgtttccgtccggtttgcagtgacgcgcgtttttggctctaaggggtgaacaacgagattcgtacactttctggagcttcctttcgtttcgagtttgctctttcccagtttttttttcgcttctgttggcctggatcggaagcctgcaaccctcgtcactgttcgcttttcgtcctgtcgcgcgactcgcattcgtctctgtgcactccgcaagtgtcccgaaaagtctggaacctctcaggttcccccgctttctgcaacccctgctgctcgtcaggatccatctttgtctgcgtggacgcgttgaggatctacttctcgtcctttctgtcggctgccttcttcgtgaacccaggcgcattcgctcttctgccgccctccttttcgtctgctctcccggagcatttctgctccgcgccgcagggccgcttctcagcgactcgcgtgcaggtgcctcctgcagttcctcgtccttcgacaccgctgtgtgtcttttctcgccgtcacgtccctcccctccactctactccagttgagccaaca

SEQ ID NO: 3814 - DNA, 1674 bp, Toxoplasma gondii
  source 1..1674: mol_type = genomic DNA
aaacagacgatgtggagagcggcaagaaacaaagtcacatccagacctccgttctgctcctctccaggtaggaaagcgagaggaaggagcaggagagagaaaggcggagagaagcgcaggagaagagacaggtgggtccggagaaggacgacgaaaagaagagaaaagacaacttggagcaaaagaagagaatggagctgagcggaaggcgaacgtgtgtctgttagggtgtagagaggagatggaagcagcatcgacgacggaagcgaaggagagaactaacgcgaaaaagcagctggtccgcaagaggcagaaagacgagagagagagacggcccatggcggccgatctcccgagacacacagaggtggagacgcctctgaggaagttaagacctcggtgcctgcagcagacatcgactctctggagagacgcatgcgcgagcagaggaactccttctgctgcgtcgtctcttcagacgcgagagaaggaaagaccgagacgacgagagcacagagaggaagaattgagggagagagcgaggtctacggcttcgtagccgcagtcgtagtggcgactgcggaaatactgagaattgcgctcgcgagttcttcggaccaagaatctgcgtaaggcgcttcgaggaagagaagaagagaagaagaggaagagaaaacaagacgaaatcggcgcgaggaaacggagatatctactccaggcgaggccggggctgtgcgacaggagacacacaacgggcttcccgattccttttacggaggaggagagacaacctcgtcgtcgaagtggatgaaacctggggagaacattgccttctgcgcgaagagcgagaaagagcagaaaagcgtcttttctgtcttgcgactggcgatctcccgggtgcgctgcgcatgcacagttttttagaacaagacacaggagacaggcgagtctccggtttttccgcttcctcgccgacgcggaagttggactgaagatgtatcgcaaaaaaaagcagataaaaagacgcctcgatctccgtcccgatctccagtttcctttctctcttcttcctgtctcaggcatgggccgcgcctttacagtgtgttccctctctctcttgttgagaggatcaaagtccagcgaacaccgcagcgcgtccgggcaccgagagaaaaaaacggcgcagctggagagactcggaggagggccgttcgattctttgtctttctcttcaaatgctctgcatctctgaaaaggctgagaagaaagtcggtttcgaaatctccactgcatacagttctgtctcgcgctcacttttccctttcgagtccaccccggaggatctgtgatttgcctgcctccttgctttgtcgttttcttcagcgggcgcggctcccgtggcattttcgtgagtttcaacttggacgaaaggttcctttcttcctgatttctccaaaagtcctttctctctcatccaggagaggagaaacgcgtcttctcgcgccgtcgccgaacctccgcgcggtgtccccgacggtgccggttctctcaacgcatgctcacggcccggtgtttcagctgcgtcgtctacgctgcaggaattttgaatcatcctcttttcctccgttttcaaattctccagagttcccctgaatcccctcctaaacaccacca

SEQ ID NO: 3815 - DNA, 4223 bp, Toxoplasma gondii
  source 1..4223: mol_type = genomic DNA
taccaggtgatctaaaatcgcaatgtcggtttcttgtgcctatgaatctcattgattaatgtgtcacaggcagtccatcttcagtcgccgtctcactgatatttccagatacgccaaggaacagccacaacctttcaagtggtcgaaatacccaggcttcgtacaaacaacacggaaaaaagagatgcagagagacacgtgcgtctcggtgaacgcggctcaaaggcacccgagtgtgtgtggcgagtatatacgttaatgacagagtgtacgcagaaatctggaaaacgcagtcgttcccatggtgtgtgggggcactgaccgcaaatgtcgttgctcttacacacagagacagacacgtttcccttggagactgctgtcgctcgtctttgcagcgacataaacgactcggcagaccctcgtatactctgtaacatcatcctggagttttagcatctcggagacatgactatttgtcagcgccttgtgctcagtagaggagagcgacgaaaccttctgctcctggatgcacactcaacagcatgcatgcggtccggttgaatccctaaaaattttttttcttactgcattgtattgttccctgagctgctgagtctcggcttggagactgaagttggagtcttccattctcgtacagtgctcacaaaaaacgcgtctttctttctggacacgtgaccgtcaccctgtgacgcgagccgcagaagcttggcgtcttcggtggctgaggtgtgtacaagaggttagtccgatcgctgagtcgaatgtgatgagagggacttgcagttggatctcagaagactgcgctgttcttggtatcttttctcgaatttgcagccatggacacggctaacaacgactgcgtcggctggagggacggcggagttcgtgcgaggaaatttcggaaaagaaactccacggctctctacgacagcgctcgatgcaggggaagtggtgggaattctggccggatgaaagcagacgaaaacaacagaagggctgttgcgagttaagaagcagcgtctcggtcgaggttccccgtttcgcgaggcgagctccgtgcaggggaaagcgggaaaaagacgagaaatatgaaagcgaacgaccttccagacaattcgagagactcacggacagggaagcccgatcggcagaaactaaaaattcacaccgtggctgctgtcgctggcgttgacgactgtgcacaagacacaaaccgcggtgaggggaaaagggtggctcgagggagacttcactttaagaacgactgagaaacacacagaaacagaagaccggcgcttgagtggcgttcagattcatccgtcaggcgcagaaatatcgtcttttttcccaacataagtatccagcatgcaagaaaagaagcgccgcacgctgcctctccgtctgcttgagagtagatggacacgaagtcggacaaacaggtgttttccacttttctttccaatccggatggcataactgttctcagcggacgtgagggccgagtggaaaagcttcctctgcaactaggtggaaataaataacaagtgccgccctgtttgtcgtttgttttttgcaaaccatagtggttcgtcctttccccggtgcacgtcttcaaaagagacaaagcggatatgattcaacgaaaacgtgagaaaagcggttcgattatccaccactgcctaaccatctgagacatatacaacaacatgaaagccagttctgacaaccgcggtcagtgagttgtatcgtctgaagaccagcatatatgcacagcagtttaccagcaaattaacgcacggacaaggcacgtttgacgatgcattctcctacctacaaaaaagacgagaataccgcaattccgttgtcagttgtgttccacagcgaaccactgcagatctgaaaaaactatatatatatatatatatatatatatatatatatatatatatgcgtgagacgcggagaatgaagcagacgctctccatgaaggaattgcacaaggcggtggcggcgaaaaggcgcgacagatgaggggaagaaacactggaatttcttgaaaattatctgtttcgatcgttgctgacaaatccttttcttaagctgtttgtagttcgggcgcctcctcacctgtttctgcgtgcgtgggaagacagcacatggacgcatgttgaagtatgcaagcctgttgtaacagaagccgttttcttcagaattgcaccgggcgtctcttcagcccacgtgcagcatgaaggaaggaagtctgttattccctcagggcaatcgttgtttactcatgctaagtggaacgccactccttgcgcatgttgcagaatatagcaaacagaatgctgcaggtgcccattcaagttctccagagagacagagactaaattgagacagatgtcacgtaatgccatgaaacaaaccatcttcgtagaccgcgaaaactagtcgcaacgttgacgtgttttttaccactgctggcggacagccatcgctacgaaataaaacgttctgactgtcattatctgagttgtgcaagaagcgaaagaaggatgaacgctaccatctgcagctggtgaaagtctgctacttccattgaaaggaattctctgtccggttctactgtagcgcctcaatgccaacacaatctcacatgtagaacacgggaatccaataaccgacgcaaggggagtttaccctcgaggatgccttactttagtgcacgtaatgtttgacctattcagtcgtgtcgaagtgcttcagatttctgtcgtttctttcataccgatcctaagaaaggagaaacgccctccccaaagtggttaactcgttgtgaactcttcctacggacacgaggcagcttgcaccgtcgttagtttcacgctagaaagaggcttcctctctttgttttccactgaatcgtcgacccgagacgatctaaaactttgtccgcaacttacatccacaaagggacataatgaatcttggaacggtctatagtggtcttcctcctcaatccaagctgaactgtggttgatcaggactgaagtcctcagaactaactccgagctgatatctgccggagcgcattcagctggaggtgcaaatgcgcaggaaatgtgcacgtctatttgcgtttgtagacactcgtttatatccacgtgcacgttcatacgaaatgttctatgtccccgtacgtgaaagttggcaactgccacggcagcggaaaaaacaaagagatttctgctcaagagcgagtgctagcctctctccggagaatggaaatcgtctctttcttctgtggtcaacgtatccttcgcatcgagattgtttgcaaggaagattcccaacggtcttcagcgcatgcagataatttcatccacgcggttcagctcgaccaggcaacatttggatgaggtcattccaatgagtcaaatggcctgccacttttcctgcgggccaccgcgtagaaccagatcaaaaacgaatttcatctcgctgtttatcctggtttttgcgaccctcatcgtaagtaacctccgcgatatcgtctcctgcttttccgcgctcgaagagccacgcatgacacacgttccaaaaacggacaagcgagacactgcttcttcaagtggagattttctagatttccaagctccaattctcgagacgaagaacttcctctcttcatttgcttgccgagttaagacgacactcgtgccaaaacagttcttttgtctgcaactgcgcgaacccgcgagttgtcaagacggctgcgcgtcgattccgggcacagtttgacgattgcgttccagttttccctcgtcttttcctttttgctcgcgacagcgcgtctcccttccttcatttacatgcagattgctttcgtgttggacaagtcctggacgaaatcactcaactgtcacaagacatcgcacccgcggtgctcggtgaggagcctcaccatttttcttcaacttaccgcagacgtctgattctgcgcgtgtacatgcacgacttgttgtttccctccctatctactgtgtgcctgcaacattctcatccgagcaactagggcctgcaggctttcgcagtcgtagattcgcttcccctctctttcgagctgtcaacaaaccgatatagaccagtgcatgcacccgatgtaggcatcctaacacgctcgttttacacggtggtacgga

SEQ ID NO: 3816 - DNA, 4308 bp, Toxoplasma gondii
  source 1..4308: mol_type = genomic DNA
tgctcaaatgtttgttgaaaggattccgtgcatgtgctttttagagagatctgtccaactgggcgtcccagggcgaacacagtgaagaagagctttccgagcacgaggcaaaacgacggcacagcgaatcgtttgtgggtgaatcaaaaatgtctcaaagagtggaaaggaggggaggtgggacagcatctgcttggtgaaaatggcagcgggtccaggtcgagacactggagtacggagcgaaggaatcctcgaaggaaattgaaactcgcggtcacaaggttttgtagtttctcgggcagaaagggttacgtatactccggagaagcgacacaacgcgtggcccacagagacgaagaacggcttccatgggatgagtgaagataaacgaattcgtgtgtcgactttaagcttggaaaaccacggaaaaggcacgcattcacgcaagtgggcatcatgaattttacggcctcgcacgccttggtagatggcttatcgagaggtcatgtatgtgtcagtggtttttccggctgctagcgggtacagtttcgaggattacacgaagcaacgacggtgtgtcttctcttacacgtcctcggatgcgtgcttagcatttcttgtctagatttcccaatgtaaaggctccctctcacacagaggtccagccacaaaaaaccacgatgataggcaagttctgttggcagtgtgacggccgagtggaaaccagtggcagaggtcgcacgtttgtattttcgagttggacgggatgtttcgcttccttttttccagcttcaccgagggcatcgcaagcatcagacaaaaagggagcttgtgggagatccgcgaaacagctgaggcgcaggtcgacctttacacacacggggtgtagatgaatttgaatgaatgagaaagttccttgatgtgaaagaaatcgttttttccatatagggcacctcgaagtggttttcgcttcgacacggaaaccgacaccggcaaaaaaaagtaccgtaatgtcgcttccaatgtacttggcagttcacagttctctttgtcatgaagaacaaagtggatcgtcgtatgggatttctcaatatcgcccactgggcgtgaagaatccgagttcttgttcaaaactcttggttcttggtggcggtctgacccgaatggagcggaagttgtaacatttcaccccgctacgtaatcgttgtacagataacgtcacctggcgtccactcatgcgaagaaatcacaaaagcgctttcagtcgcatctgtgcattagtatcgagagggaatctgccgcgtatttctctaatttcaaagcccgatgcactgcgtgttggtttggtaggagagtagaaaaacttcctgtagacgctttccttgaagcaccacctaatgtcacggatgctttccaatataccggtcctaagttcttgagtgtgctggaaccacagggaacaggacttgtgactggagttttcgcatcgcatgcgcaattctggtgcacctgtttgtgctgtcaaaagtgtgttcgacaaccagggacaagactcgaattatagtgcatggacagcgtgcagtaggtgtgcttttctcgggatatttcccactgttcgaagcggtaaggtatcgctagcatttctggggtgccagcggcacagtaaaaactctccagaaacttcccactatttgaccaaatgtcgattcaaaacaggaaaaacagttgggccgcataactcccgtgaaagcgttccagaggaatacactaacgttcaacagaaaaaagaccgatagacagggcagttgcatcaaaggactggcatccacgtgtttacgacgtgcagctgtccaagcacgatatacaggtgaacagtccgttgcagatgccctttgtccttcggatgtaaacaggtggtgccacgtaagactccgtgggcaacttgaactctttcacatccactgactccggctgtctttggtagtacgtgccttgtgtgtaggctgctacgggtacgtccacttctgttgatcggagcaacaaacaaaagcacagcgcaggtcgtcagagagcacatgccaagggtcagattgccatatttgcattcgttaacaaatggcacaattatgggggaagcagcgacggcgcgtcacagcatttacgaaattccctatgcctcgttcgcagagtgttctacacaaaagtcctctcgtgaaagccgtgtttccatcgttgcgagacgggggtggggggagagaatactgcgataccagccgagcaaacagaggcatgcattcataaagacactgggtacaatcgtcgtctagagaatcgcctctacgtcacctacagagctttcttaaaagacgtggattcagtatcctacagcgctccacttttttctgggaaggatatgctacgagttgaacccgcacttccctggcaaatcgcgtgacttctactccactgtgatcttgtttgagcagcaacagcgaaacggtaccagcaataaaacatgtgcacacctgtggtcagtctgtgccctgaaaaaaaatacacatttcctgattaagagataacgtaccgatgttcctgccgtagaacgcggtgtcttgttgggtttctggtaagaatgaagtccatcgtctgatctctgttttcgtgtgttgccgacggagtttatcccagtaggtgaagtcatgaggttcctgctgttcagtgtcgcctctcataacagcccaggtctcctcaacttcgtcctccataggcagaattgctgacacgccgcggtacaaagaattagcagccctcgaagaagatcgttggtgcatcgctgtgtgcaccggctcgggcgctaccgtcggctcatcatgttcttctgctgtgaatgcataaacgcagacattgcagactgagatagtcgtcattttttgtcatatgcgaccagacgaaccaactcttcccaagagttgccaagtcacaatccagaagcaacgccgagtttcttgtggaaagtacaaggtgaatccctcaagacacacgctttgccacaatcttcgtgcacgtgactacgcaatttcctatcgcgccgctgcaaccttctaccggttacacccatcgtctgtgaatgttggataaaaggtactcatatgaagctttcagcgcgaaacctagttgtgtttcctcggacctatgtcatatgacccttcgaaccgacgactaagcaccttggctgctttcaggggaacggggaacagctcgacccgtcccctcctgctctctgttaccctaaaaacatgcaacggaagctcgctaactctcccacttctttattctggtgtgcacctttgtgtgcagttcattctttccacttacacctgcatccattttgcacgctgtcgccaaccgggatagtggaagcggtttccggggccggtgccacaccggggttgatcgtgaccaggctggctggacttttcacttcacccagcccttgaggaagtggagtgtcgtctgccgaaattgtaaccgacactgacgggcagttgatcttgaaagttctgtagactgggatttgcggagggttttccattgtggaaagacgagtggggatctggaggggctagccacacgcgtgcaagcgagcaagctgtagcactggcgtcgatttgtgccttgcagcggtcaagatgaccgataacctatatacctttggggggaaaacaaaagaaatccttgcagtagtagggacttctggaatgaaggaagaaacgtgctgaaaggaaaaatgaagtgtgccaacacagcactcctgtgccaacaggaggcagaggactcgtgcaggcaggctctgctggcttttgcctcccgtgcgcgggagagaatcggaattccttcagggacgggacgagcgaagcgtgtgtcggttgtctccatcgacgcatctttcgcgacacaaccgggctgcacatgccgggcgtcgcatagcttgcagcctgtgctcaggctttcccggaaaaaccgttttcgcgttacggtaacatgacggttagcttctgtcatctcttcatttcatccttcatcacggcccgacctctcctggtattgttcgtggttttcgttgctacagaagtgtgtagtcggacgggaactcctcgagttgtgtgaaacagttcactcggtcatcggcgagtttcggcgagtgtgccttgcgactgccagtgtcagcacaaagccgaagtgcttcacgagtatccacggcagcgtgtgcagtaaccttcctgtttaccccgccttccacaccaaaaa

SEQ ID NO: 3817 - DNA, 1678 bp, Toxoplasma gondii
  source 1..1678: mol_type = genomic DNA
ctacattctgtggacacacaagtacggaaattcatgtgaacgaacacgggtatttactgtccggtcgactccacatacccggagattcggaggcaaacacggaaaccggtccttgccgaaggcgattcacacggtcttcctcactgggggtgttgctttcgctggtccctgccggagagggcagcaacgaggacggcggcaaaccgagagcgatgccaccatcgggaaggaggagctgtgtgggcactgagaaggaaaaaccctctgaagaccgagaagtcgcgagcaagagagtggacagcgacgactggtgatacaacagtggcattcccgagaggagagccgactgggagagagacgacgccggcagtgaaacgcgaacatgcccctcagtgggagctggggcagcacccgtcgccattttcacgcggaaacacactgcaagtacggcgtagaaatcacgctcacgaggcggccccgttttgtgtgaaacgggaaacgctgacggggacgttgaccagcactctgcgaatttgtctgaatcgttgtactcattgacaaacttttctgatacaggcggaatgaggctttgtatgtggatactaaagaagaagcggatgccctattcagacggagagacgtgcggattctaccgtaggaacatggaatgcttcatgaagcatcactgcattttacgcttttccttctggatcggaaaccgtcttcgcaggtcccattcaaacacacgatatcgaggcacgtgacaccggcaacaggtccatgtatctgtcccgtaatgcgcgaagcgaatgcgtcgcctcgacagaacatcgcatttttaaaccatcgtttgccacggaaaacaaggacggttactcctcgtgcccgctgctgttcagggcgagcaatcgtctaccaaaacaagggaagccatgtttctctcgggtgaactccctttggactctaccttcccacagcacgagcgtttccctttaccccgtcaaaacggggaaaaatgacgcacaaatatttagaacagtacagacacaaaaggacacctcttgtgcggcgccggcgcgattcacactgccggtccccaacgcctgactgtggagatcaaaaactgagagaaaaacagaattattcctctgacaaggagaagcatgtgtctcccactcgctgtgggggtgcgcaaagcaaaagctgctcacttcgacgcgaggggggctttccacaggtcgagtatcgtgcgcatgcgccgcctgctgacgatgagggaacttcttgtgacggacaacgtctaggcggcgcatgcagagcgacgggcgattgaggggagatctttcttctctaaaaagacgaagaatagctggagataccgctgttgctgcaaaggatcgcagtttcgccgccccgaggtcatctctgagtccctgctgaagcacaggttttgaacagcgaaatgagtgctgttcgtataaacgccgatcagagagaaaagagcgagaaaacatgcctttctcggccccacacgaacccgcggcggtgctggtggcctgcatgcgacagaagaccgagtgacaagtctcatcgcccaggcgcggatcccgcggagaacggccgggagtctctttccagaaacagcaatgcttttctcataaacaattttgaatcaaga

SEQ ID NO: 3818 - DNA, 3072 bp, Toxoplasma gondii
  source 1..3072: mol_type = genomic DNA
actcgctttctctcgatttacgtcgtttctgttgctcctgtgtctttcttcgacggactcttcttctcccgccttttaactgccatctcccttttttctctcagtacgcttctgcttccgcgactcgctcgcaacatgccttttgcgcctctgctcagctgtgcgctcgccgctcccgctctccacatgcgccacagagtcagcgacgcacggaagagagagaagggagaggcagacttcaaccagagtcagaagctggaaaagcatctccgcgaccggagtggaatcgtctactcaaagctttactctctacagtgtgagtcgaccctgaatcctctttgttttccgagcgttgagcgcggtgtgaggcgctctggtccgttcggcctacatgcggttcttggggacgcccaggtggcgttcgcatgcagcggagagagcagcggcgattttgcagttcgtggaactggtgatgcctccaatggaagcaacgcgaatgaacgcacacgggtcgctgctcccgccgaaacgcatctgcccggtctgcgagtatcccaccatgacgtagctcagaggcttccccagagcgtctgcgacggctgaagaagagcagcaaacagatggagagcgtccactccacaggacgtcgtcgtcgctcaaactctgaagcgacggaaaaaggctgcggtcaagaagttggcagtcgaagaaggaagcagggacacagagaaagcacggagaaagaagaagcaacgagacaggggaagaaagaagagcaagaaataccaaagagacggaggagggatcggggaagttagacagaacagagattcgagtaaatccgtgagcgtgaagcaaactggcacaggagaaacgcagaaatcggggtcgtggaaacgtcaagaaacagaaatgacagactgatagacgatgaagaaatggtggaggagagaggactgcagagagggagagaagaagagaaagacaaccatgcttcgagacacagtgcagagaaaactcgagttcgaacagcgcgcttgcgacggacggatgtttagcgagaaaagcgacaggaaaaaggtacacacaagggtggcagaacaaaatggacgcgggggaagaaaaaacaagagaaagaagtcaagaaaaaagtcgaaaagggactgtggtgttctcggcctctctgtcaatgaacatacatgtgtgtaacatatatatttatatatataaatacatatataaatatatatatatatatatatatgtatgtatatattgcatgtcaagccaggagacaggatgggtgtgtgcattttttccctgagagggttctatcgtcaaacggtggcatcttcgttgcttttctcgctaaaaacccgtccgtcgccagggcgccgttggaactcgagttttctctgcattgtatatcggagcattcttttggaaacatcatttgctctcacctttttcggcgtccttcaagagggcgtcctgctgcgccggcgtcgccgcgacggggcaaaagatcatgcacttgggcattttgtgggggaacttgaaaggtgtgcgaagagaaagagacaaaaaaagtcagagcgacccggaacgcaaaggggtgaagacaccaagtgaattttctccggaggactcctgagtgcaccggtggcggagacgcaactcgcgcgcgcgcgcctccgtctgtgcagaaagcgcgggatttcagtcgtctcgcgttcgcggtttcttcgctcaaacgagaaggcggcgactgtgaggttcacggcgccagcttgtctcgacgcaagcgcgcttttccctctgtttcagcctcaaaaacgcgctgctaaacgctagacttcgcgtctgtgtgtctccagactctagtgtcgatcgaaagagccgcaaatgcgacccccccccccccccgcggaaaacgcgcgcctcaacaggcgggaggtcgagtctgccagaatcttctgcgtctggcgcgactccgagagaagctgtctcgggcgtccgttcgacgcagacggtcgctctctgctggtcaccaggaagacgagcttttcgagcggaggagagacctttaaagagaaagaaccaagaaatagggaagatttgcggcgacgcaggagtgaccgtggacagcgtaactcgcacaccgctccggacaggtaatccgaaggccttcttgttgaattggggacaagtggcgacgtgtaaagaggaaacagagaaagacagagatccagaacgcttcaggatctcaattcttcgtcttttcttcggctttttcttccgcttctgtagagagttgcgaggagttgtgtctcaacaaccaaaccagccaccgacggaaaaagctccgagcggcaacagcgcatgcgttctatcagcggaggagcgcaaaggtacggagacagagaggccgtttcggagaggcacaaaaccagacgccctatatgtgaggttactctcgccagacaggggcgcgaaaaactgtagaaaacgcgagaccaaaaggaagcagaaggcgaaggacttgtgtcgcaggtgcagaagaagctagaaaagcgagaaggaagaagggtgtctcctgggtgcctgaaaaaacttcttcctccagtgtgcgtgtgaacgttggcgccacggcgcgagacgaaagtcgtccggtgagagaatccacgcgagagcacagggcatgcatcgtttcaggtgacccgttttcctcgctttcttcacattttcttttcttctttcggagtggaaggcagtccggtggaaagaaggacgaggtcgcgttcctcctgcctcgcttcggtgttttctcctccgtcttcctgagagaggacgccctgcgcgctgcctctctctcctctcgccccgccggtcgaccgtctctttcttctcccgccttctgtgtgttgcttcgtccacctctgccgttcttcctcctcctcgaggcttctctctgtctccgttccttcttcgtagtctccccctcgctctctgtctcttcgtaaaatctccccctctgtcctcgccttcttcttctccgcgtccctcgcacca

SEQ ID NO: 3819 - DNA, 1790 bp, Toxoplasma gondii
  source 1..1790: mol_type = genomic DNA
cagtaattttcctttttgcaggccggtgacgcaacgcatgacgtgcacatcagaccgcagagcagcaaaggagacgtggagagtcaagcggatttaatcaagtgattactcagtgaaatcgctgctctggtggcgcgatgctggcaagaatccgataccgtatcctgggggttatgcggagcgggttgactgaaagggcatagtgaagtgtgtgagcgtctcctgaggggagatacactctttgaaaagggcgttctggaagcattacaggttttggctgggtaggccgcttcgcaggcaccacgttagactgtgtcgtcggcacgagcacaatagaggcttccacctagcgttttgttcagcggtgcttgacacgggcttatgttactggggtagagaacctcagcaggcgtattttgatagcatttcgttcgaaggggctacatcagcatttgatggattccccctaccatatgtgactaagcgcgttttccgtgatccgcacacccttctcatctcgtggaacttagcgggcgggggggggggcgtggatgtcctctgcatgcaagagtgtctttggaggctgttcttatttcaatatgttctctggtgatcttccatacgtgaggtggaagaaaagagttagcaaagcagagagcggcaaagaatggctggtccgcgcgtgctgactgctgttgaacttgatgtgaacaactgggtgtcggaaaatgtcatcaaggctgggagcgtcagcagcaatagtgatctcgaatgacgagcagtggggtgcttgacgggtttccataggacacgtacccgacttgccgacacctgaggggattgtgctagggaagtgagaacagtagcgggcattgtagctgggtagcattctttgtggagctgccatacactcaggatagccatatagcatacaataggcacctttccagaaaaatatactgtttcccccgtaagtctcactgtagcctttttcgcttcgcagaaggggtggcgactttgacagttcgttgctcaacgaatcgcgggtacgggttaagtgctgctcgagggaagactcagtttctggatagtgtgtaataactacagccttttcttgggaaaacattcatcaagaaccacattctaccagaaactttgtgcgtgaggttgcagcgtttatcggccgcagtcgcagtgctagatgggggggccggacgcgcagctcctagcaggcagttgtgctgcagaacttccagtgtacgaggggtttaagcttgtagaactccgaagagacacactcccccacagcacgtccttttacgtcagtgtgtcatttcttgatttttcgccaattgtcgaatgagtgcatatgttcactctccagtgtgacgtacctgtggcgtgggccccccgcgacaacggccgccgcagagcggacggtggtccacaggaacggcacccgatgggcgcctggtcccgtgacgaaagaatgcgcttccaaacgcgaataataaccaaatttcgaaagcatttttgaaaccccaccgcagtactctgtgataaatctcaagatctggcgtcgaacctacgcagtacagcatgccttttattttgtgctcttctgatgtcgtgaagcatcgattgaggtgtcggcagtacagcctgtgctttgattcgcggttacggcgggcggaagcagcgcggccgcgcacggggttcacacaacagtttgtctgcttctcatttggcgtgttgcagcgcctgctttgtttcgtttgtcttcttaagaa

SEQ ID NO: 3820 - DNA, 2090 bp, Toxoplasma gondii
  source 1..2090: mol_type = genomic DNA
cccgttattagcgtttttccgttcgcttcttcttccctttttcgcagcttcaacttcagaagctcgatcaggagagacagcgacagcaggagctcctctacgccgtcgagttccagtctcagttgatgcagaggaaggtcgcgagagtcgcggggctccgcggcgttgcagagaaaagagaacttctcgcaaaaatttcgaaacttgaggaggtgtgtgacctttctgccgtctcctcctcgcgaggtgacagaagtgacgcatgcgtccttttcaatgtcgcgagctgtgtaaagtttgtaaagatttttctagagcaaggcgatgaataaaccaaacacatcagattgtgaaaaggcatcaagctgtgaaaaaacaagtgtgatcttgacatggagaggcctggacagaagaagacgacgcatgctcttgggtctccttctcacagattctgacgcaacagtgccagcagtgtcagatgctgaacgcagaaacgaaacggctcgagagcgagctgaggtgagatcttcaaagttttccttcgacttcttctgaccactgtccactccgttgcttcgaagctttttttgcattcacatgcatcgctgcacacacttgcgtgcatgtcgaccagcgtagacagcgagagaaggccgcatcgacgatttgaggggagcggcaactgcatgcgtataaagcacttaaacagttatgtatacaaacgtataaatgtgcacagatataagcagatgcatgcatatacatacatacatatatgtatatatatatatatataaagatgaacgtatatatacaagtattccacctgtacatatagatatgtatatagatatgtatatatatatatatatatgcgtgtatgtacaagtagagcactgcctagcacagtcaattctggtcttcgctggtgtttgccttctatgtggaaggagagctcggtgtttgcgtctctgttgtcgatttgttgatttcagaaagtctcagagagccctgcagagccgggaagccgaggctgcagctctggacagcactgtggctgatttgcgattagaatgcgacttcctcaagagagaagttcagagcacacagaaggaaaaagccatcgtcagcgtggaacaagacacgctcaaactggacgtgagtcgcctgcgtctcgaacgctttttcgatctctccggtttgccctaatttgcatcgattcgctgttgccttcctctcacgggatgttgcgtctggccttcactagactctcctgaacgttggaatttctcctttttctcctccgtttccgaaaatgcgcgcgtaccagtgaaacacacctcttccgaactctgtccggagatgccgcggaggcgacaacgccgccgacgcggattctcgttcggatagcttgatgcggccggaggtttgggtcacggggaactcggtcgaaattgtgtttcgcgcatgcgagttcttctccttctccttcctgtcctctccacgcaaggagacgcctgggcgcgtaaagcggtcacccacagggcgcgagtaaatggctttctctctcggtgctcagacagcgcgacagctcgagtcgtttctttttttaggcgaaccgactgcgcgcccagttgcgagaacagaccgaggcagtcacagcagcggagaatgaaaaactgcagagtcagcatacgatcgaagaagaaattctcaaggcagaacaccgcctcgagctagccaaggtcgcagctgtaggtacacacccgcgacgagggcggaaacgcatcgcggccgggagacagacgagaaagagacgaaacacagagggatgaagacgataaatggaagacgataaatggagatgctggcggcctgaacagtctctgaaacacacagattatcgcagatgcctctacgtgaacgcgtaaagagtgccaaagctccggaagccgttgcagccggagaggggcggtgaagggcgatctgcgagtcaacgcgctttccagaagttcttttctgggggaggtggaagcaaagacagacagcttttcgacgatggaccaaggaacaaagaaactcaccaaata

SEQ ID NO: 3821 - DNA, 2706 bp, Toxoplasma gondii
  source 1..2706: mol_type = genomic DNA
gacctccagagaaagcgaggcgcagatccagtcggcttgcactgtacgtacacccggcgagagacgaagcgaggagtgaccgagccgccagaggccggcgaagacatcgcgattcacagatcagtgaaaggagcttttccgttctcggacggaggaggcgcacagtggatttccttcgctcccgcaggctaggaagacgaggcgaactaaagaccagcgcgtcatgatggaggccgacaggtgacactgtcgaattccagcggcttctcccgggtccgcatcctcccggcggagagtcgacacaggagtgcagggaacgacagagaacgacagggaacgagagagaacgacagggaacgagagagaacgaggaagaagacgaagtgagagaaaggaagcccaacgcgaaaagcgaagcaaaccgccaggcgggggaaagggaggcaaaaggcggaaaactcgcggggtctggagccgtttgtggggtgtctgtacacccgaccgcggagcgcttgcgccagcgcaacagagttctccacgactcttgtcgacgagaaggataaagcggtgtaaaaaaaaagcggagttctggcgaagaggcaatgtgactttggacaatcgaggaaaaaaagcgaggcgcgcctaggacccagacacggcctctcgacaaggagagttgcggcggagtctgcgactcaaacgtagagaaaacgaaatgccaaagatacacgaggcaagcctcagcttccctttcttcgtcgcgtcgctcgttttcttttttcctgcgcggttctgccgttgtgcatttcctccgaagcctccacggcgttgctgctggcacaaccgcgggccaaggttccctgcgctgccttctgggcaccgattggagacgttattttttctgcagaaaaatgagcagttcaaacaggccaacagggatccttgtcgtgctcgggcgtctctctctgtgtttggcgacctcctccgcccccgtctccggacaccctggggacgaggaaaagcctcgttttgcgggtggaaggaggcagtgttgagggcgcgactcgcgcgaagactggagaaaagcgacggcgaagacgagaactcgagtttgacggagaccagcgacccgcaaaaaaagagaaaaaaaagacggcctgggggttgccacggggaagccggggaggagagaaaaagtcaatcgcgggcggacatgcgccggccttcacagacgctcgcgatccgatgttctctccttcacaagcgcgatgtgacgtcaaagatgcagagcgaaagacagcgaaaagataattctcaaccgacgcccaacaggttttcttcagctacgcctcgccactgcccagccaagctccccaccgacgcatgctcgcgtttgaaaaatcgagcaaccttttgcctcgcggcccgcggaggtcgaaccctctgtcttttgaagtcttcaccagctgcctccggcgcttctctgcagcgacgagctcgccaggaaaagaaaacacccgccaccgtcctaaattgccgacggaaaacgggaagacggaggagttggcgcaaaagcgcccgagacccgtccgcagaaaagcaagacactctccgcgacgttcgccaacagtctgcgctgcgcatgcgaagacctgagatgcagaacgcgcatgtcgccgacggagaggaaatttgtcgaacggagagacggagaactggagagcgccgagctttagagagaaaaagctgcgcgactcgctctgaaaaactcttagaggatagagcgtcgaaagcagggtgcctgctgcccgtctttttgaggagcctgcaggtgtcacaggaaatccgtcgcgcgccctttgcgcatgaaagccgacgcgtcttgaggatccctggaaagccgaaaaacctgtttcgaagtgtgcacggtgttctttgcgccgagagcagccgaagaactgggtcgaacgagacttttccccggcgacgcgtcttaggatccgccacccgtcggtgtctcgtagtctactgaaaccttgctggaggttctcgacggaaagcggactctttttcaccgtggttttcgccttgcctttggtctgccgactctgcgctgtctgctctttcttctcacgccatttattttgctctcccggcgtctctcgccttcgttcgcgcgagtcgaaaaccttgaccagacccgccgcgagccggaagcttgacacactctttcaactcggccgtacatacaccgccagttttcgcgcttcgggagagtttggcatcctggccgcgtacggcgcctttctctacgttttttcagaggttcccttcgttttccttcgccatcttttctctgagacatcccgcgccttggtacagacgaacccgccacctggaactacggatgcatgcgtatggatactcgccgtttactcctcttgccttgttgtctgactctcgtcgacaccgcgacgcgtcctgcagttccggaactgcgtttgtaggtctccggtctctgcctgagtgccttttcctgcctctgcagacgaagaaaatccgaccaccgcactggtggatctgcaaataaaggactgtttgctcgttctttccttttcgacgcctccgttcctccactctgcctctccactctttttttccttcgctacattggctttacattggctttcttccccagcgccacaa

SEQ ID NO: 3822 - DNA, 1916 bp, Toxoplasma gondii
  source 1..1916: mol_type = genomic DNA
tggtcttcttccatcataagaactcttacgcgcggctgaaataagggtccaaccgtatgtctggaggtgtttctcggctcgcgagctggcagagcaatgtagttggtggtaacggactttcatctgtcatcttgagctttagatcaagatgcaagtgattgtgctcacacaagtgtagttcgtgctggttttttgtcggcaaaaatgtctgtatttcgctcacgagttaatcttgtgcgttgattggcgtaacaattttcaacccgcccgtgaaaagtgccgtataccagaggaaggaatgtgctccatcgtcccctgttgtgtcttttgagaagggaacggtaggtaacagaatagtacaggagcttaaaatgaatggacgaatgtattgggaccagacgttacgggaccttgactgttgttcaagtggtccaagtttgaagctttagcagcaccctatcacgcagtccacctcgtcgttgaaatgagaggtggattatgctaccatctagtacgagctatcccgtcaacagtcatgcttttctcctgttgaaacggaatcgaatgtgacaggagagatgtatattacgtagagtctggcacgatacacttgaatgatgtcacagccgatagatgtttatcgaatcacttccatgctaattccatcaactgcaagtacttgtgtaaaggggccgggaaatattgtggcagtagtatgcacgaataactgcccgccttcatactagcgaggcctcctggttgtgatccctattgtaactaactttggttttgtaaatcctgaccttctgaatcatcgatcacccccggagtcctccaacggaaagtcctcctaacgacaccgaaattcccgaaggctagcagtgaaaagcatctttgctacttttgccttttagtagtgcagtaaattatgaagctcgaccttcgacattaaaacgagtgacgggcagtattagtggtgtaaaaacataccacactgttgttgatttcccgtagaaaggaggagaggccaaagagtttcggtgttcctgaagtgttcaagtggtgtgatctacagatacaacagaggagtcggtctcaccttaaaaaccacagcatccttggagagacatgcttctggaggttttcaagcaaagtgaagttgcacttctttgatggcagcaaacaattcaggtctacaaaccgtgtgctggtggagaccgtttggaaagctgccgtctatgcagctcgaaaagcagtcctaccgtggagggttccatacagatgggttggtgaggcctgctgttgttgcgacttcacatcataccgatgcttcgatatgtgtggtgggggtcatcttttgcttgagttttattactttgtacatcttttgtgcgctgcattcgaagcagcgcaacaaggcagtcgagggtttcgcatgcaggggccacggtgcttggttttataacctaagcagttctttggcctcagaacgggcgaggaaaacctcgcttttccccaagtgtgtggcgcgcaaataagacaaacggtgtttttgactgtagattccaaagttatcgggcccatcagaggggagagtgctgccgggtggacccgcccgcttcgtcgagaaatgttttattccaagggagagcggtgattttctgcctttcgtcaaacactttacgtcctagcattcgcccgctcctaatccgcacactcctatttcgactgtgacaaactggtgcggcattcatctgattgacgtgtgaaaaacctgtcggtcaaggaggatttgcggtgtgctcctggcgactcttccacgcaacagctcagctcgtccactgctccgggtctgagcctatttcttccacatcgcgtattctcgtcagtatcatgttgttattgtttcgtcctga

SEQ ID NO: 3823 - DNA, 4381 bp, Toxoplasma gondii
  source 1..4381: mol_type = genomic DNA
ttcactccacaccggtcagccagatgctggttgtccatggactcaagctgagtgccactcctgtgcttaataaacacgcagcagggtcgtggacagcagaaccgacaggaggcattgctacagtctgcggcctagaacttccagcattagcccgcttgttatgcgcgcctactagttgaccattaccactacattttcaagaacgtagagacttcaactcgagcaacaactgcttcctctgtgatttttgacacaaccgcgtctctggagtgtgctctagggtttaactgaaatagccgccctcggtggctgaggcggtgcgtaggctgagacaaaggtttgagtttttatttggaccgttttcttggtggagtcacacatttgggaagctcaaaaacactcaggtttccgactgcggggcagtgtcgctctcgcccttcgaggacttgtcgcactagccccgtgtagcattgcttgtttgtcacgcagttgccgcacttcgggatgagacaggcgagaggacacagggatagaaccgatgtctgcagagggaagcgagaaacatcggatggaacaccgctgcatgcgtgttctgccatttcttcatcgcggaatttgttgtttttgtgcgtgccgtggctctgtcctccggcacactcaggacgcttcacaacgctgaacgacgcggcagtggctggacgtcttctagctcggttcctgatctcagagaatatgcttttcgggaagcccgagcgtgtctccgctgatctgtctgccgatcgcgaaaacggagagctgactggaggtgccgagacattctaaaaacaaagagatcgctgacactgctgaaaagcgtgcgtctgatcgatgcatctgctcaccccgagccaatgagaacatacgatgaaaaaaactgtctttctcaacataaacaaagtgactggcgatccactgaaacagtttgcaaacgggataagtatgggcaggggactttgcttaccaaaccagacacacggcacgcacacccatcctagacggagttgccccgacagcggaacaaaagatcagaagggctggtgagaagtgaagcacgacagtggagtgaaacgtggcataatacttaggtactggcaagcactctgaacaaacgtgaacggaagaaaaacaaacactggagcagaacgaaaaagggctgtctcgttcgttgtgaagcaaaagctgcggaatcgtagacgttccgcggttggtgtgacgcaagattcagattaagagcttttcgtctcgtggatggacggagtttcgtaattgtttcctgcgtgggcctttgctgccgtcgagcgtggcgatccggcagaaatccaggggttttcgctaacatggccgttgtacctggagtacggctgcgcaatggaaaacgggctgcaggctcttaggggggggcgtctctgagagagtagaaagtatgagactaaaatgtcgctcgctttccggtgcaacatgaggcactagaaccatttttctgatttgtgattgcttcctggacgacatctgccatggcagacgggtcggggtgaggtcccattcgcagattactctcaccagcttgtgtgaaaataagtgggtggaggatccgagagaaacgtcgaacctctttgcactttcgttaccgggttttctttccccttttgttttgaggtgaatgcaaaacactgtcgatgttactgagtggatgcacggattgccctctgtgaaggggccgcagtcaacaaccgttatgcctgcatttgtttctgcaggggaagaaagaaaggcacatccaccatcagaaaagacactgacgggagaaaagacgagaggagaggtcagctgtgttcagccattgtgttctcgaaaagttttcgaaagaaaccgcattcttggcggtggcatcggaccagagtttgcagagcagtccgggggagggtaatgctagttctgttactcgaaactgctatataataagagatctttttcattaccctagacagcgctgtcagggacgctgagcatcttgctcgactgttctttgcggttcagaacgtccgcagaagcatctgtatgctgatcagctttcatgagaagtgaaacgcctatggaaggtacacacacgcgtcaaattcttgctgtcaagcccagccggtggtgggcttcgaaaccggtgttctcttttggtagcaaactcggagacgcttcttcctggtttcgtcttttgtgaacaggagcttggggaagcaaaggtcactgcatgtgttgctgcaactgccgcagaggagacattatagtatgtaggatactgaatacgactgcagttatgaggtacagataaccacgttctttccgtgcccagctgaagggggcaggctcggggcgaaagctgcggcggtgtgcaatttccttgtaactgggcttccctattctgaaagtcaaaaccgtatttctctgtttgtcgtcgaaatatgtttgtgccaatgcagtttggagtgcctccgccacaaccaggacgacgcggtattcgtgctcatgagcagcgtcactctatgtagcgtacagatcacgtgtacacaaagacatgtacaactcttctaacgcagaaaatcagtgtttctccttttcagaaaaggcgtacagctccgtcgactgcagcaaacctacgttagtcagaaggctcttcaaaaatccgtcgcgtcgtcgccggatctttctacacgcctcgtatgagccgtatgacggaactttgtatagcagcctacgaacgccagcagtgctgaggcgacaaagtctgttatgaagcagtacacggcacagggtgtttcgactctaaagcaaagacttgagaccgagtcacatgttgtccatggttttggcgtatctgtgttgcgtctgtttcacattcgaaactgaatcgcgactcttcagaatggagccctccgggggagtgcgcttgcaattgtgtgtgggcacaagcgggttcgtccagtggggaatatccgcctgcgttgcagtttaccggagatgttgtgaagggaaggcgcgctatgatggcttcggcctctcttcgggacattgagatggagaaagccacacggatttcacgtacgttgttcgagttgcgtacgctggcggatcccagctcgctcgactgcataaaagaaacggcggtgcagtgcacggggagctgtcagatgctccatgaggaacaataaacgagaaatgcgactttgtctggttaagatcttgcgaaaagacctactgaaagcatgcgacgccgggggaaatccggaagaaaattccgtggggaagctgctggtgacacaaagcttggcgtctgcccgactgccacagagcgcccttgcctaacccagtggttgtggcactgtcgtctttcccgagagttgagtacaacatcagtgtgtgcattttcggatgtttcttcagggtttcctccagattcccctgtccgttttcttccggaacaaggggacaccttgatggagacagtgtgaaccgaggcagaaagcacggagctatgaaactctaacggggagccgttctcttgccacttcgcttgcagtgctctcggatcgctgccagtgaggtaccggggggcaatcgatccgcggcacagtagttggctatgacgtcgacccagcgatgaggcgcgctaggcggggatcaagtgtgcgtatgtttcgcgaaaagagtttgctcgactttccttttgcgtttcggtcgtttcagtagtagatgggccttctgttttctctgctgttctcagcgcagtgtcgcgaaacataaccgtcgttccggctgtagcggcactaaccgggctccggcgagggcacccacgggagcgatgaagaaaccctctgtcgaagcgttgttgtgactcggcgtctcccggactctatagctttttcacacgcagcacactctcttgtttgtgtcagataccctacccaacagtgccgcttgctgcgcccccaggactgtttccccgacgcctcgccagctcgaaatcggcagcggcgtcagtctctcatacgtccgccggtttgcgaaggccctctctacgttctgagaggaacttgctagcaactccagggtttcagttgctagctgcgcagttgtctgccagagcgactcaaccttaccgcgtttcctccagtctccgtactcccggcgtgtcgagttccagtccgggggcacacagttcccgacggtgaaaaggttgccgctccccttgctcgtcgacaacgagagaaaaagattgattcgcagagcatttccgtcgctccggtcctcccctcccgcggatccttgttctccgtcgtttcaggcaaga

SEQ ID NO: 3824 - DNA, 1917 bp, Toxoplasma gondii
  source 1..1917: mol_type = genomic DNA
aaacaggaggagaaacgagagaagaaaccaaagagacgcaaaaatccgaaactaatatgctcagaggagggccaaaacaaataatggaaatgaaatgagtcatgtggcagttatctgctgcgtttcgttaaaaccatcctgggtatcaacccatcacacacgagtagacttcagaccgcgagagaatcggtaaaaaagtcttaattggccggtcgccttcagtgcatcgttcgcgagacacttgccggtcaactagtcccccaaagcaaagcagttccatcctctcgtaattgtttttactcccccttcgcaggaaaaaacagcctctttggagtcttggctgtggagctggcgggtccgcggggagcctcgcgcctcgcagtcgggtcctcggagggaagtactgactatcgaggaaggaatcggggagtgaggacacaaaaggacaacttgccgcgagaaatacacggcaaagtgcagacaaaggaagcgaggagtactgaaattaaaaggagatttcaagggagacggaagagacgaagcggaaaagtcgacgttcacggaattcatacgttgacggtttgggcggtgactggcagtcgccgcctcctaaacaggcatacaaatgcagcgaagaaacgtaacctggaaacacgagtgtctgtaaacaaagggagaccagaattaggcaaaaacagggagaaaccagtgtgaaatgtgacccgtacgcggaggatctctgcgtgagcagcagcgatttcgcacgggggaacggacactcagggagagcaacgcaaatctgaggctgaaaacgaaagagttccagcggtggtccttgtgtcgaagccctacgcatagccaagggtggtttacaaatttggacggcagttcgtgctcctcatttcacaggatccttttgccatcctcgcaaagtgtgccggtcagggcagcgagatggacaaccggcggtacatgtgcgccacaaagcgatcaactcgcttcgacggtttgtttatttcgagcgaggaacgcggaaaccacgctgttgcgcgcattcgcctggtacgatgtttgacctgctgaaagacaaatgtactgcgagcgccagtcacccgcctaaactgcatgcggaagtcgatgaacctcacttgaccggtcgagctggaatctgctctcgtcgagcaaaaagcacgcgcgtcacgtgtgttccacgtggagcacggcatgtcattttgccgcgcggttggttcacctcgagttccgcatcacctttccgccactttcttcccggaagcctcaagcagcggcgtcatctggtctttcattcaccccctccgttcggattcgaagcatctgtcgggggatgcacggcgaaactctcgaccttccgcgtacccgatttcggccgttcgtcgagcgctagacgcgagtgtccgcgacccatcagcctaactgaaaaaacatctcccatattaactaaagcgtgggaaaacagttgctttgaataaggtaagacgtcttcgaactggtaaaccggcttcggttcggccgccagtcttcccccgttgtccctggaggcgtagtgggggtggctctgtcgatcgtcgccacgcggcatcgctccaccgttttgcggctatgcttgagttatccagcgttttcgcacggccttccaacaaacaacagacctcttaccattcaccgctcagctgtctcgtttggttggtacctttacgaggtccgtattcgcctgttttttagtcgttctgaaaaaccgtatagctgcagtgccagcccccgccgtcgccgttcggtccgcggtcgaccgcccgcgttttggccagttttttctcttgtctccttgggttttttccagaaagttgtttgtcggaaactagggtccactggtggaaacga

SEQ ID NO: 3825 - DNA, 2884 bp, Toxoplasma gondii
  source 1..2884: mol_type = genomic DNA
cgctaattctggacgattaccacgctcaagttccgttacaaacaaagcagacaagttagtacccagactggtgaagatactcggcaaaggccaatgccgaagtcctgctgtttcccttgtcctgttccttctcctcatcgtaaagggcaatgacgatagagccattcggggtcttgatcaagtgcgcgccacccttggaccgtgcacacatggtgatgtcgaaggtgcagtcgttgtactcgaatcctttctcctgcagagaaaatagataacattgacaaatgcaaccacttggatactggagacaaaaaaccgccttatctttgcatcaactttgttccctcggcggtaatttctgctagtaagatcgacgtgatagatacaaaaaaagaagaaacaaacaatttttgacggttgaggaccaagcacacggagcactgtatgtcctgacagatcttcccgatccgagctgctttctcacgcagtgcgaccccttgcgagatatgatacttacaggtcggacaaccttgtacttctggccgccaatccaaacaccgttaggggcactgccatcgtcaactgcagctttgatcgtggaggcctcgttgatcgacaccttgccgcacgcgttgccatcctctccgatagtgtcctcctcatgatcatccttgtacagcttggaccatccgtcatcatcatcagccgccgcggcgaacacaacaccgtcctccgcctaagagtcgagcgcaacagagagaccaagtacattcgcatacagagctgctggctcgattacgtgaccatactatgatccggggactccggagggagtataacacagtagacgcaaggaaatggtaaagcacaaaaatcatacgccgccgcgctgagacacgaacagctaatcatgtttcaggagcctagttattacctctgcgggagggcacttctccctcaggcttcagaggcgagcgacaattactactacctattagcggattctaacactgaaagaatgcaaggcgtcacaaaggattctcatccatagaaggatgacagtcaaacatttgtaggcacggctagaaccaacaaagaaagtagacgccgcggagcgacacaatccgctgttgagcagccaaaggggatgcggcattgattgagatgcgcattagtacagctacgctgagacctccgactttttctgccgcctttctataacgattggtaaccggatagaaactttacacgagcaaactgtaccggaacttctaaacgtctagccggcctcgttgtatttcccgaaaactgcgaagcacgcttacgttggcgatgccgcctgcgcagcagtagcctgtgtcaacaagccactccttgacaacagggtcccagtcggacatcttggaaaagaatggaaacaagccgcgaaagaagcgaaaaagaattctataagatgtagccgatgacctgggaggaaagaaaataatgcaagtaacggctcacacaacgggctacccacctttctcacaccgaggcacacacactgtcgctgccgcatcaccaccactcccgcgatcagcacgcgctggccaggagcagcatccagcgcaagcgtgcgcatcccctgccttaaaaccgtcacgcgtaccgagggtccgatgcagggcgcgtttcgtgagccgagcttggtggccgagctggggagctgctaacccactgttgacagggcgtggaagaagagcgcgcggccaccaccagtaaaaggaggccgcggcgtgccgatcaccgcatgtagggaagggcgctgttgcagcgcagccattacggctgcttccatcgtatctcccgggggcgaaattaccgcaccatctatttgggatccaggtggaaaggtggaaacacgtatccacccgctaagacggacgtgccataccagaaggctacacagtagatgacatgcagacttctctcctttgtttcaatcgcaaatgtagcttcctggtggacacattctacacgccctacacgaagcaaccgagcttcaaacagttccagcgtagccggcactcacagagcagaagccgcacgcgccgcgtgcgcgacagcaacacggtctggatgaaggtaaaacagaaccctactatgactgtgtcatggcagtcacgattgaggacaacgaaatgttgggaacaaaacatgatagataatggagaacgatagagaaaatcgtagtaagaagcaactgtatccaaacagcaggacacagtggtacagtgctcgctggagcatgcagtgtttggttggaagcgggcacacaataccatatgcagggtgacagatgtgaagtccaacaatatgctcacaaattaaagctctgcgtccagagccgaaggaagttgctagatctcctggtaacggcgccattgctgggctttttaaaaatggcgtcccccttgcattactgattgagattcgtccattccggggcgcgcccacacggacactgatccatgccgacgcgtagactctagtaggttgaagctctgtttcctggcgttcgaaatgaaggtaaaaggaagcggatgacctcagttgaggctccacttcgtctattgtcctgccttttttctttgtttcacgtggtgacgccccctgttaccagtgggtcgatgccgaacggcgtacgcgacgcctccgtgctgtttgagggcatggtcgaccctgaaaagctactctgaatgtgcaaatagcgtttgtggattgggctgctgctctctccaactcaacaatacacttgaagtacctgagtcgatgaccagctccgagaggggctagataacccgtctggtggccgcgatacgcgaagacgtgagatgttccggcaaca

SEQ ID NO: 3826 - DNA, 1891 bp, Toxoplasma gondii
  source 1..1891: mol_type = genomic DNA
ccgcaaaagctctgtgatcctggacattgctttgttcgcataaataatatttacgcatatatatatatatatatatatatatatatatatacaaacatctagaaacgcatacctggatatatatatatatatatcctgtatagagtcacgcaagttgaggcttatatatatatatatatatatatatatatatatacgtatatgactgcatataagtatctatatatatagtgtatgtgttagtcatatgcagttttaaggaagtcagtgctggaaggaagcggcacggttgccaaacagatcgttctgttgagaagcacagaggccactgcatatgcttttcagagccacactgcggagcctaccaagcgcgttcacaaatgtgtagaggtagaaggaggtcgagttatgtatggatacgcccgtagcgagatgaagatgaggaaactgctgctgaaaaggtcgacttttgtcgcgcagatagccacgtgtgtaagagagctacctgttttagagcctgaacacaaagtttttcccgcaacatgttgtcttcttggagttcccgaaacaatcttctgttgcctttccgaaaatgctttctttcacgcatttactcctgtgacgacgtcttcgcggtcacgagggggatcctctgtctgcaaagcaaccttcctcttttcagcaagcggaacgtagcgattgaccctttgcttttcccatttctgcatctgttgcccgtaggttgatactccttcccccaccataagatctgactgctctcttttgcgcaaggaaacaaatctatgaaaaagcgaaagtgcagtcactccaagcaaactggtcccgactcagcgtgctgcgccgaacgaatactttttttgcatgcagcccccctgcgcccttcgaccgagaagttgagtttcgagttgaaagcgcggatggaaaacagacaaagaatgtttagtgagttgacttcgaggtgatactctcttcctcaaactttccaattcccctcctcatttctttgcccttccgttaaatccaggaaaacctgctagtccagagcagcggcacgggcttgagcaagagcgcgaaaacggatggcttggttgcccctgagaggagcgaaagtcgactttttctcgcgtttttttgctggcttctccttctccatttgcgtggaaggagatgtcttttgtgtccgtgtagagttcgttcaagcgagaaaccggagtcaaagcaggaagggaaaagtcgcatgcagcaaaaatcgacggaaaacgtttttttcgaagtgtttcacgcctttgtctccctttcgtctgccccttcagaacagattttcttgcctgtttttcctccgtccccgtctgtcttttctgtccctccaatttcttcggcagagggcgaggcccgagtgacatcgcatggagagacgagacacggcaacgcttcagagtgtgctcttttctttatttttttctccttcgtcaactcctaactctctttcttgctcttttttgccactcttactccttttcaaacctcctggcgaagctgctcttcccccgcgagtctccctctgtcatctggtccttctgtaccgagtgtaaaagaactttgaatcacttcggccttttttcgacacaccgatctcttgcccgtcgtctctctttccttctcttcttgttcaagtggtttctatcgcgctagggtccgccgttctttctcttcgtctccgattctcccatctcccgtcacctctgcggcttgagaacctgtcctggcccagttccccgttgaagtcgtgaatgcatgaacagacttccacggaccgcgtgagagacacaggactcttctctggacttccaaaacgctgttcgcctccaca

SEQ ID NO: 3827 - DNA, 2932 bp, Toxoplasma gondii
  source 1..2932: mol_type = genomic DNA
acggccatcgtaaattcagcgtccagagcgcagagtgggaggagagccgcttgtcgcgactgaggaggcgcggcgtgatttgctgccccgtgcatgcgtttgcatcagatgaaacagagaacagccgtggaagcggcgctggcagtgtggcagaggagagcgactggagaccggtcgggcgcggcgcggccgctgccttcgctctctcttgggtgaatgtactctccgtagtggtgcgcagatcagttagttgagagagcgctgcggttttctcggactgtctgccaggcacggtttctgtcttctggaagccgccatcgaaaggaatgtcgcgagcaagtctgcagtgggtgtgtccttttccgtgtcagggtggcgcgtccagttctgggacgcctttgtttctcccgcagacgggccgtgcgttaaactgttccgcgcgtgtgtggtagaatggggagtcgcgcatgcgtttggacagccggacggtcactttcgttcctccggaagtcgctgctctctctgtaaaggtcgctgtcaattcggcgactggcgaacgaacgcgtcgttctgtggtttctctcgcagccctgcccgagacacctttcggagtcgtgtgctgcctttctctgcggctctcgcgcagttcggcgttgtcgatcgtggcgccgcggaagcggttcacgacctctacaggcatgcatgcacatggaactggcgccgcgacatccctgctgccaccaatgttttcccgtgtttggtacacatagaagaaccccaacttagcttctgtctttggggcaaagtccttttaggcttggcgagggccaagctgctgaaaccattttttgactttttccgctttatgcaatcttttctgcgacttcgtccctagtgggcggtagaaaatcacacacaagcagtggcaaaaatgccctctgcgactgactagagcgctcgtggattgatgtagaggacttcccgacacttagtgactaccccgccgtccggcttccaagtgtactgcatttcgaaatgaacgcatgcgacttagtctctacacatctcttggaaacactcagcgctatgtccacgtgtggagagtcgaattcgaatgagtgccttgcactttcctcgcgacacagaagtgcctggtacacgatcagagtaagctgactaactgtctggtctagcgaagattggataagctaacatttgcgtgccgggtgtacgaggatcgaaatattcattttgggagtctcagccacgtgaacgtccttcgatggacttgggccgccactcgaatactaatactcgaaatcaaagagcctttttacaagaaaaaatgacaaacggagatctttcgaagagtttgttggtgaatgagtgtcgatcagcggctgaaaatgcatgattattcgtaaccgattcacggaagtacatgtccacaatcttaaatgagtcacacaggtgacagagcactagagaaccggtgagtgcgggtcctttggttacaacttctgacgttactgacatttagaccattcaacactgtattggttgaaattaacttattgcagatcacggcagcgagaacatgtctaccgtgcaaccgtgtagaattcaacacacctggatctgatcacatttcatgaactcagcaagcgccgccgccgggagaggtacatctccgcgcggtttccatacactttcattctgcctcttccaagaatggatttcgtcgaaaaagctggttgaggaccactctagcttgatttttgccctttgtttcagcctctcgagccgtgcagtactgaagtggtgttaacttcatatgccaccgtaatggtccctagtgtatcaaaaagcgactagagagctgccgcatgcatgtgtgtgtttaccataaatctcgagcaaagcaaaaacacgcttggcgaaccagccacagtttgtggccctttgcgctttccatcttcatgtgacgcttgtttgtcgtttatacaaatatggtaatgcctgtcaagttccttgtaccaattttgctctctgcgtacgttgggccagaccaaagagttgatgctgtttcttcacaatctgcagacgactctctcgttgacccctgcgggctcagtgccgagatgaaaaattcctgcatgcagcatgcacaagaacccggtttcctgcatgctcagtgaaagcgtgctctgtttttataaacgtgtcaaaatccgtgtttaaaaaaggacggtgccaaaacgcattggcagatctagtgtttgctcttactgaaaggtgtacatcatgtgtgcgggttgcggctttcacgcggctagtttgtgtttcaaacggttggcgcctgcagcccgtcagcggtgaagagaacggcaaacaaatcggcagccatttgacgaggcgccacttcagcagaaatttcatggcgcccgtatgaccacgtgtcgagtcgttcattcatgagcgctagcctgcttgtccgtaagttttctgcgcgtgtgtacggcgttgtgtctgttgacatatatgtgatgtccaaccgtgaagcttggtccacgggaacccgttgagagagaacgaaccacgactcatcaagcgcattgttatttcattccgcttgatctaaggcatttagttcacccggctccatttttctgatcgcacaagtttctcatggagcagcgacttaaccgcagttttcgctcgtctgtgctcggcttccagtggtaaaagttcatttccactgagtttttgctcgtgtcctattaagttctgcccacttaattctgtgtgtcgctctcaacagacttgtcaagagggacggggggaccgcactcgtcggatttctcgaataatgtgtctgggagctgcttaggtctcagggtagatgcttctctatacacaccctggttttcca

SEQ ID NO: 3828 - DNA, 2956 bp, Toxoplasma gondii
  source 1..2956: mol_type = genomic DNA
gagtatctacctcactgaattaggcatgtagtgctgacctataaagtttggcgacgagcctaggtaggagaaacgggaacgtagtcaaaagactccccgagctcctcagtatttctagctggcgaggagatatgcccgcggcgaacagtcgcaaagtgtcgtgtaaaaatacgagctttccgatatcatgtgttgtcgaaagatgtgaagagttcgagctccataaaaagcgagctttcagttgctccccgcatgtcagggggtcgacttgctgttaaccattcgccagctaatgggagaaggaaaaacaaggactaaagcgtcccttattctccaagatattgcccgttcatgtaagcgaattcgtcctgttttatatacgagcctttctcccggtcccgacgccaaagagcagagtctcatggaggaacattgtaggggcggatatctattcaaacttttcaacaagcagtgcagcacagttttggtcagtcgcctgcaggaaggaacatcaatgtgaaattaggggaaaaaccaaggagtctgaagtgtaaaggctgctagcggactaggaaccctaaaacgggcagtcgcgcttggtgtctgtcgcatggccatggacgttgagtgagggaaagtcgccgatttaaaagccctctggatgtgtgttcatactttaaacaggggtgcggcaacttcgtctcatacttgtttgactttgctgtgtctaaacgctttcgccctggttcgctgcgtttttgccggagcccatgtgctcccggacccgttacatgttggaactcgaccaaggacagtccaatgtgcttgtccaacgtaccgcttcacgatgcatggaaacaaatgagtctgtacagcgcagcccgttagtggtacaaaccacctgtgagcagcggccatccgcccataccgaggagagtttttcatcttgttgaaggtccggaccagcccgtgccatgacatggacgagcttcttcgcacgatttttgctttccattccgagtacacacctttggttagaggaaggtcgcactgcccaagagaaacaacgtgttgtttaaggtctctttcgcgtgcatctcggcggacctgacgttagaggcaatcgaggtactgcaagccgcaacaccaccgatgtcatgctttgattgaaacgccagcgagcttcctttcactgtccattctctagctctgccacaggcacaatcttgcgataagttcactcgcatgtgaactgggatgaacttgctttgtagaccacttatccgcttcacacgtgctgcccttccgggaggacgctctagtgaggctgctcagtaactgagattgggggccttacgtgcttgtctaatgagatcgagtttttcctacgctattcttaccagatcgacatcacattcaccaaagaaaaatgtagtcaggtcacgcactgcctcctacagacaggcttacagtcgcgtacggagtatgcggttcagcaggtccagtaaccctgcaggtgcgattcccccgctgaaactcgtggaaattatacacacctagctagactctttgtgccgaagagctctatggcacgcaaaaaagaatcccggttttggctgcgacaataaacagcgttgttcttcctctgctggaggtgtgagatccgcgtctggcaactcggctgcattgcatcacgggtgtagaagacgggagaggagggctaggtttcgcgagtgagtccgcagattgctctacgtgaaaaacactagccttctgtagttcgagatattgttttctcgtacacagtttcgtatggggtcgatttactccgcgactccgttgcacttcgagcctttggagtttttgtctgaatcgcaagaagagaaggtctcgctctggaggaaggcgggacgtctagcttttggagagggcagctaatcgcgacgggacgcttcttgctgttcctttatagggaccgggcgtcccagttttctttctcgcttagttgagaagcagtttctctgcgttcttcacttgcagtcgctttgaacgagagaaaagtgaaacccgtggcttttccgtccacaggtccttgctgcgccaacgcgaccaagagacgggggagctttcaaagctgctccgctttcccgagtctcgagtcagcgtccttgcggttcctctttttcttccatcgtatttcgtttcttcgattctttcaggctggttactgtttctgaacatctgggctggcctatttcgtcgcggtccttctttgttctgaagtcggcggcgcagcagattttcccaggatgcgctgtccgggctgttttgcgccccccgctggcgatccgctttttccacgagaactgctatccgagctaactcttttctctagtatttctgcccttgggatggagccaaatcgtctcgtgcttcgctttctcatttagcagaaggcacttttgaagcggctcgcgctgtcccagctcgctccttgctcgaagacttcagaacgaggcaccgagggtgtcacggacgtctttgtccatgttttccgctgcttctcgtcttcccacttttccccacaaggtaacctccaaagatttttcagcggcccgtcgggcgccctcaacaagcaggtgcggcggcgatatcgccgcaaggcatcccgttcagtcctttgtctagcgaagcacatttcgcccgagttttccagcgtctgcggcactgtatgtacagcaagcagttcctgttttgtgcagcagcctgaccctcgtctcgtgtcatgagttgttcctctccgtcccctgcgaccggactcacctttcgtcttgccagtcggtttctctctgcttgtctgccggccggcgcgcgcttgcgccccgtcctcgtccttgaagtgtgccgccttccggactttcagcttttccccgctggaccccgcccgcgtgcgcca

SEQ ID NO: 3829 - DNA, 2422 bp, Toxoplasma gondii
  source 1..2422: mol_type = genomic DNA
gagtccgcaggttcctgtacacctgaagtctcgtcctgggtgtgagtcggcgcctcgatggcgctgcctcctgtgtcttccacctggatctcttctgcagttgctccgccggcctcttcaggcttgcgcttcacgctgacctcagctcggttgtccgccggcgagaccggcgaagcctcggaagatgccgtctccccgtccccctcaggctcagcctcgtcgggagcatcggagacctctgagagagagtccgaagcaggagactggaagacagagcttgcgtcctcgctctctacgtcgccgagagacgacgtcgttctttcgtgagaaatcggaatgcagtagggaggataaacgtcaaagtggctctcaggtagattcagcagagcgccgtagtgtctgtacacccagtccactggtaatcttcgtcgcgccaagctcagtccatcggtgatcattttacgtgaagcatcgacatagaaccacatgaagaagcgcgagcagacgtcctccagaaggagttccctttgcttcatcatctccgtcacctcacagccttcgcttcttccccaggactcccaaaattcgttctcccgcccgctgcctccgtttttttccttctcgggagaccctccctggccgtcctcgaagcagtgtccgcgcagccgagtccctgcaccccgagtgccaccggcgcccactctctcggtcgcctcctctctcccgccaggcttccgcccacagtcttctgcagcttctgcgccccagcacaagccgtctgctcgcagtctcctcttgactcgtctccacatgagtcgcggccgagagggcaggtaggcagtgtgcgacagttccaagagagacgcgcggaatgtcgcggccgcgaggctctccagagagacgccccaggaagcaaaatcctctgcggtgctgacgaggcccgacagtgtggaaggcgcaggaaagtgagacggtgcggcacagggaaagagaggcaaaggcagcgaaaaatacaacggagcagacagaggcgtctgcagcggcttctgtctctccccttctccactgcctgcctcgtgaagcgaatctacagtgccgacagaggccgtctcggtcccgcaaccaagacgagttgagccggccccgcgagcctcttccccctcggagccccccggctggagatccatggagtcgaggtgagagaggagaaaggaaagcgccaaagagagccacggagaagaagagagaaaaggaggaagggtgcagtgtttccgggatgcacagggaaaaaatcagggtgtgcgctcggaagaagccttcgcgagcgcctccgcagctacatggaaagagtggcgggtattgcagtgcaagaaacacgctgtgactcacgacgcccaggtgtacgtacaccgcagcattggatgttgcagaaaaactgcgtcgcgcatgggaatgcgttttgttgcccgacgcggaacggctggcgggcgaggacgaactgcagcttggcagcgaccttttaagtgaagttcgtgcatgagggcagcagcatttttacctggtgagcagcaccgcacccactgctgatattttctggggaaaaccgcgcacatggaccggggaaaacgtggttatgcaactgtccgagaggctccttaaaggtccagcagaccacgtgcctctgcaagttcctgtccgccctccaggcggcgaaacgccaccgttggcttggtttagacggtacccacgagctcgattgtctaccccagcttctgaactcctcaatttgaacgtttacgattgacgaacagaagaaaacaagcgaaaaaccagcaagacagcgggttcggtttcccctgcgttaacagcgttccagtgcaaagacaacaccagatgcttcgtctttgatgtgaaacgaagccgacatgttccacgcgggacgcatcgtcccctgacatttacagacgatgaaacatttcagaacgaaacttggtccgtcccgacgtaaaaaaacgctctttctgccacgccgtggtacgaacaagcacacacaagtcagcgaaggagagggtggtcacagacacttgcccgttggcaacctactctgaagacgagcatgtggagaattcggcctatattcggagcagcagctggcgctgcgcgattctctgggagggcatgcgaccaggcgggtgacttttttgcttcgactagaagctgcgaagaagatcccgtgatggagaggcgcgtgcatgtgcgtttctggtcggacagtgctgagacaagaagagggacagagatcagctgaaacgaaacgagcattttttccaaagtccatgctgggtttctcccctgtgtctagggagccttctttcgacctttctctcagtggaacgccccctgcccaactatccagccacca

SEQ ID NO: 3830 - DNA, 4753 bp, Toxoplasma gondii
  source 1..4753: mol_type = genomic DNA
ggtttctcgaaatgattctttttgggagcctcgctcaccttttctctgtaggagaaaggagagacgcgcgacaaggttcgaacccctcagagaagcgcagctggcgggcagccacagtgacaacaacaaaaagaagaagaagagaagaagaggcatcgtggctgggatggaggagagaagagctgcggcaaaagaaggggacagactgggaagcagcgattcggagaacgaacgtctcctcgctgactaaaggaagcgacggacagaaagcgccgtctcgcgtttctgagcagtggctatcaagagacaacaaggggaagcgggggagaggaagagacaggtttggagagcagtgccgttccgctcctcctgagaggggaagcccggcctacagaccccgcagtgcattgcacaactcgactgcagaagggggacaagcagaacgtggtgaggaacgtttcaattctttttcaggactttgttccagctgcagcgccccccttcggtgtgcatcccctcttccctgttcttttggatgtactttctcgagtgccttttttcatgttcgaccttctggcctctgtgcactttgtcagcaaaaccgtcgagacaagccttcagtctcgcgcggtggagaagaggaggaacgagaggcagagtacagctgagaacccgaagaagacggccaagaaaaaagagaacggtcagatccaggatgcggcgacaccggacagcacaaaatggagaagctgacagtctgcaggagcagttcagaaaggagaggaggcagctggaaaggatttttcaatgcaatgtctcggcaacagggctatcagagagcaataaagatggactctttcctcaacggcaagtctttgaccgcagcatccacaacgcaaaagtcgccggtaaaaacgtttggtggattgctggaaagttggcgcaagcgcaagacgacgaaaagatggaaaggcgctacgccgtcaagaagaaaaacgaaagcgcgggcgagacttttgcagttgggacgcgtggacgaaagccgctgtgtcgagagtgaagggcaagaaagcaagacaaagcagagacaagagtggaaaatccgacgaagcgaaagagacagaaggaaggagacagggagacggagacacaaatggccatttccggagacacgggtggagttcgaggaatccagctgtcattataaagagaatctttcctctctgcctcaacacagaggcatcccttggggagaaatcaagcgggcatgcttttctgtatgagaggaaacgagagttttcgtcaaaatgacgagcagagcaaccgtccagatgcgcggcgtgtttatttctcggcacaatgccgccgtttacagtttgaagctgcatgcgcacccagagagctgtggatggcttgcagaaggaagccgagcgtcttgccctggatagtcatgaaaggagaactaagtcgccatcgaatgtcgacgcattccccactcccgcagctgatcgaacctggaaataaacctgggagaggtgacgaagagtcgagaaagtcgagcctctcgcgcaagttgaaagtaagacagaagaaagacatgcacatggaggcccttgttccgttccgtctgtaaaggagacattgcgatcactgcagaggaaggagatcggatgcagccccttgatctttttagcggttttttcttttgtggaatacagaacacacactttcgtaaccagacgacgtttccgggttttttatatttgcaaagatctgccagtcacgttaacaggcgacagtggtgagacgtagagagcacgcgaaaaggggtttgcactccacatcactccttttcttggtacaaggtgtttcgcgctgtccaccgtgctgttttttctcaaaaggctggtgtgtgcgaaaatcgcccgcggccctctacggggctcaaagtgcatttgcctgtgcagggaaccatcgtgttttctcggggtgagctgcgctgtcaggttctgagaaacgacactttcgtcatgcggaaaaaaagtgaggcctgagttgctggccagaggctgttacaactttcttgcgcgggttccaaccgcgcgtagtcgaactgaggtgcaagattgctactgactgctgccgttttattcgagaagaaggagtctttccatgcccccgttgtgtgacgctcactgcggttcgtgaaagaggggtctgccagctgagaattctctcgtttgctttctgtgtctttgaagacaagttctgcgtgtttgtcatccaaacgcgaagaagaggggttgctcacagggtttgtcgttccacagtttacccaaggatctgacagacacgcatgttccgtcattttttcttgtcgcctcgtagtgtgactcaccaggtggcagatcatctttggagttctattcgctgatatcgtctaaatcgatttcgggaagttcagaacataaccgtactttgttggtctgtacgagcgcgggtggaagcgtgatgctgcggagcatgtctacgtgttgaaaattttcattagctggaaagagaggcttggcaatcctgtcagctaaagagatgaacgtgaacagactcgaagacgagaaacaatgttaggtccaacggcatcgatctagggaaaggcccggaagtcgaagtctttcttcaacttaaaagaacgcggggagatactgcttctgggctttagatgagatttgtgcaaggaaagctcacggaacaggagacgggaagcagaatgtcaaggcaattcagcgatgtggtgcttgaaccgtagtatcgcacgacaatatccagcagcatctcagtcgtaccgttcacttccgccgagctgctaaccctatcatcagcaaaagaagtcaacaatgcgagcgcttctgcttcgaaggagattagcatgctaaaaggagattagcgtgctacttgccagtttctgtggcaaaaaagattaatctttttcattttcagtctacctggtgacaggactcggtgtatttgtggggttagggactgcctcgctctctgtggcacagacacgaactctcgtttcaagtgagacttttcgtcagaagctattcgacattgcgtggaaccacaaatacccttttccttgaacactcgtcaaacatcccctctgcacgaaggcgctggatctctgcaggcagacttagtcaaccgaaatcccacagatatcttcatcacacacgaacgtgagtgcgactcagacgacgcgcgatttttatcagagctgatcaatccaccccgtccggtgcacattttccctaatgtgtattgtttcaaagaaagacttctctttgcggcttctgtggctcagggtacacacgacggcagttgtcacgcgttaattcaagtgtctttctcccttgctcaatcgcgaaaactctttttgttccacgaagcacgagctcaagtcgatgccaacacgccagctgcaacaaatgttgcaagagaggttcagaaagaaggcgcaacgcggaagcagagaaaaggagagacgggcgctcttggcttttcagagaaaaccacctcggagaggccaccgtgttttttgcacacagaatacacttttttctcgtctcttcaacatgcggcgagcatacggaagacagtaggcgcaaagagttttttcgttcagaagaagaagacggcaaacaagactacgaaaacgcctcctctctcgagtacatccagggctcggcatcgggcacaaacgggttgcatgcagtttggagcaaaagggtgaacagccaccttcacgctggagtggtaagacaagaaacctttgaagaaacctattttctctcccccactttcgcctacacagatcttagagaagcaggcgacaccagtctttgactgcaacgacgctgttctgtgcacatgcgttttcaaaacgaagctgagatagaggctctgtgagtcttgtggaagataaatcgaaccgctttttttctctgaaaaactgcacaggaccagcatgtgtcgtttcgctaaaaacgttttttttgtgtgttagaccttccagtgtttctccattcgcggtttgtgtacatgccagttggagttcagtggggcagtctgtaagcttttctcactgcgttcttctcttctgacgggtgaacatcgtctctaatctttctacaaactctgcctttcttccttttcgtctgtttacggtttttgcgtacgtgaaccctcagtcgaagtgaaggagttctttgtggacagcgcataccggttcattcaggagctggggtttcgctgtgtcttggcggcttaccagcctcacttgcccggtttccatgctccctctctgaccccaaaggacaaaggccgccggtctctgtttcttttcgtggcgcaacctgtcacctgccgttattttcgagttttctcggctcagaacgtttcactgccacccgtttctctgtcgcgacttctacgcagcggtcacgagtcggcacacctggcaaaagctctcgaaaaacagacacgacttccaagacaagggccgcacacaagttcacccttgctttactcaactcagttaagtagcaggactgggtttgatgttctgtgccagcccccatcgcggtgatctgctctgtcgaaaaacgcgaagtcggaaagacagcttcttcacgcttacagttcagctggctttcgttcggcgcgtcttcgcttctgtcgggatctccacaga

SEQ ID NO: 3831 - DNA, 3712 bp, Toxoplasma gondii
  source 1..3712: mol_type = genomic DNA
ggtttcggcgagtagaattagtcattattggtgatcactccgtgtcgtttctttcaaaagacgaaacgccgggggttgggggtggcgcgatgctcgctgccagcagtgctgagacacgcgccctacggagtatatactacgagcttgaggatcagttcagctcttgaaggtttaccgaacgcaagttatgtgagcacagcagagaggcggaaaagcctcaccgtgattcgcgcgggcgcttctgttctctggcgtctctgactccgcaggtgctgcgttcgcagacatctgctgagcaaggacgatgcacccgtgagttcgcgacggcatctgcacggtataggggcaaaggaaggagtgaggaatgagagaagagcgcttcttgcttttgcaatcgagatttttgtctccgtatgcctcgttgggtccccgctgtcatttgaaatcgacttcatcgtatctgatttcacctgcgtggagtcggggtgtacgtacacgtgttcgttgtcattgtacagggtgcgtcggccaagagcgatcttgccaccatgaactcgaaaagaagagggcctttatttttgatgcgttcgttggatcttgacagagttctgtggaagattcatcgatttgtgcatgctcagagcaaacaaagctaaacggttgtcaccttttcaccgtgcaacaggcactctgcagcatctccctttacactttcccggttacaacacagtgaaaaaaaagggggggaagggcgttgagagcggcgcgctggcgtttctctcacgaaagcgccgcactcttgtgccgacacctggatccgaaccggcacagaactgggataaattgaaaatagacacactccacaaggacacaaaccaatacacgacgcgatgagttgccccagtatatgtcgttgccatgcatgcgcaagacggcgaacgtcgtcagggccctgtcccccgtcctcaactctgtgctaaggtcccctttccctgacatttccacttaggaatgtgcacgcaaaggggcatgcagaagaaccacacaatgaacaggtctccagaagagttcaaaatatgtaacagcatgtgcgtgattctgcagaccgtgtttgccctgtggcatccctaacgctggggtgaaaacgcgagttcgactttggcgggaacgccttttacttacactgcggactctttcctcgccacggcttgccgtggaaaagagaaggcattgcctgttttgggatgcttttgtttgcttgccgttgttaccccggctgaactgattgttggacgggacccgctggatacgtctcaagcctggtctgggtcacgatgcaaatgccagtgccatgaggaccttttctggtgtcgcctgcgtgcgccttctttttcccattttcatcgaaactcgccctcaagggagaaaggaggtttcggggaactcctagtaacaaccgaataaagaggatacggctttccactggcaacaaccgactcactggctggcttcaagaaaggaaaaagtgtacgacgacagtagtcgtggcaccaacagcaccaatttcggcgcactgtggacaggctcgaaggcttttgtacggtgaaggatctagactaggattagtcagagaatcctcacaggtttcgcaaggtgcctataatgatgaaagaggtcatactctaacgcccaaagactagcctacccactgcttgaatttcgagtcgaaaactgtttatctgtgtcaactctcggggacttgagggatcatccgccagtactacgctaagcggccaaacataaatcaagccaaagagaaagacggacgcgacagggaaccgcacaatgacgcacatgggctaagagctcctacacatcttcacgaatgataaagaacgataaacaccgctgaacccgctaatttagacacattaccgaccaatcccagtcgacggttgtgcgatgaaaaagagagaggacttcgctacgcataaatgaaccaccttattagctctcctccgtcagaattcagtccacctagcaaggcatatcccaaagcaggggcgcacacacctatatatatatatatatatatatatatatatatacatacatacacttatgactctcatgcacgtacctgccgcaagctgcaggagtctttcgtgttagttaaggagacgaaaacgtacactgtgggtctacgttgcttcatcagtttgactttttcacagtctaatcacattttttaaagctgccgacgcggatctgtagaggcgccaatgctgaacgtcgaagggggtgcccgaaagctctttttgcgtccctgaggcagcacttgtaccacgtacatttttcattttgatctcggttatggcttctttcaaccatgcctgttccagaaccaggagcttttccccctttcctttcgactgaatcgtcctttgcagctgagctgacagcttcgttggaacaggggattttctcccgtccttgctgcgcgcaaggaagcgcttcctctctcgttccttgtcgattgcgacagctgtcttctcttggagcaccatgagcatttcagacttctctgtagctcctagaacagggggcatgtctcgcgatgcgcctgttcatgcagtacaacgtccctctcttctacagacatctgtgtacctctccctctctctgtctgtctatgtatataatatatttccagatacgtacccctacaattaactgaccatctgtaacaatttttatttttaattcactgtggatatgcgtgcacgtgcgtggtcgatagtgaaaaggagtttcgtgttttctgctcagagatgcatgcacgagttgcttgccaaaaagaagggcagtctgtacacctctgtacagagaaattgcagatgaatatgagacatttcctccgtcaccgtttctcctttgagaccctgacagttttttctgttctccggactcactcacacgcattcacacgcatgcatgctacatcaacggcgaaaaacagccgcggcgggtcctcatttgagagcgtctttgcggcggaattggcgattctcagcactcagagaaacccttgtcctccttcgtcccactaaatgaagccaagagaggaactgtgtctctttcttttcctttcgatctctctttctctcgattacgctcgcgcttagctttctctgtctgtcagaacgtggttgtgatctcctgtggccggagagcagcaagccgtcgtccatttttttgcaggatctcagccttcaacggacatccactccaaggaaatgagacacacagaaggatttcggtgactgtaaaccgagtctgcctgtcttgcggaactgtcctctttttcgcttgccattctcgttctcgcctcctcgctcgctccgctgtggccttcgtccgcctcctgtcatccgcttcgtacctcttggcacttctattttcttctcgcaactaacataagctcgtcatccttgctgttcaccgctttcaccttcctcttctcgcgtcgcctctgtactgaatattcttccttttaatcctcatttcagttgtcgtccccgcgcctccgcgatcgtccatcacacagaaaccggcagaagagcgagaagaaaagaggaaaagaggagagacgcgtgaaaggcgaagagaacagaggcatggctgaaggaaggaggtcaagttgggagagaaa

SEQ ID NO: 3832 - DNA, 2783 bp, Toxoplasma gondii
  source 1..2783: mol_type = genomic DNA
gaagagcagtctccgcacaacaaagcgagaggctgtcgtcgtacttctccgctcttcgctgctgtgcttgttgcctcctgaacggagacaatgtctctgctgctggaaagctctcccgagagcctgcgccgcgaactcccggaggaagaagcgaacaactgagaccgacactgcgcaggcgcccggcatcgcgctcgcagctgtctatacacctcaactgcgccgctgccccacacgggcacagaagaagaagaagagagaccagacggtgaagaagaaagagaagaagatgacgaaagaggagaagaagaagaagaagaagagagagaagacgaaaaggaggaagacggcttcgctgccggtgattctggccgaggtgtcttgcctgttgaagaaagcggttgcgagttttcatcctcgagtccgagagaaaaattcctcttttgttgcctgcgaacgccatgcagggtgcacggcggggcctgcagccgccggcgcggctgcagtgaggccaggagagacgagagagaagagcagaacgaggctgtcggagctggagaggatggaaagctgtggggacggtgcagtggacttcggcgagatagagggtgtctccgcggccgggagttgcgtcgggggaagatgctgccttgagaaacggactgcttttcgttcgcagaaaacgcagagagagtgtctctgatctgccaagcctgcgagcgaaacggcgaggaaagacggccgtctgaagccccagcgctcgggcgcagaccacacgaagaggaggagacagcaaggcgagaaaggagactgtctcctctcaaaacggcgtctcctccaacgcgaacttctgtgaaaacgttgtcccctccaccagtgtctccttcgaagagggtctcgcctgttgaatcttggcgcgaattcgaggggtctcgcattcgtgcgtggagagccggcgcagacggagagacgaagaggtgagatcccggacaagccgagaaggaaggaaaaggacgcgattgtgaggacgaagaggaagaagaaaagaaggacgagtgagaggaagaagacgccgtctgcagagacggagaaaagaaggaaaaggaagaggcgtcgtcacgctccatcgtctgcagttcgcctgatacagagaaagaaagaacgggaggggaagagaggcacaaaactcagagaaagtgtaaagctctggagagcggagaagaggagaaggatgacggatgtctgtacagagagacgctgagtagtcgagaggagggagaaggagtcagtgaaacaagttcttggtccctgcagggccgagaggagatcttttcctggatgctctgtcttgccctagaaggggaacggcacaggagaggaggatgaggaggcagaaaaacgaggacagtcgtgccgcgaagaagcagaggattttcggcgatgcgttgctgaactcatgggacgcgtcttgccgcagatgagcgtaaattccaaaagaaagaacgacacagctgcggtgtcgcggtcaccgcgcgccgcgacggccttgcaccctctccgcgaccctctgggagcgcggccatttgagcgagtccctgcgagccgaagaagcttagagagaacgacgagaagagacggcaggacagggcaaaagagagaaaagaaggagaggagagagagaaggaagacagagaagaaacgagaagagaggagagaacaagcgagaagagatgcatgcggaacgccgtcgggtcgacgcgctggttcttccgcgcgccagaccaccagacacgcgaaaaaggtacgaaaaagaacggggaagaaagggagattcgctgacggatgccgaaaagcaaacaggaaatccgcagtttccttcttctccatgacctctgtcctgcggagagctcggggaaaagaggcgcagatccggagttctctttcgctgtgctgagagagagacaagatcaggagcgagacaaatcagggagtggtgtgcctggtggatgccgagacaacctctgcgactcggagatggaactttcgcgacgattcttctttggaacgcagagaagagatttgcggcttccattagtgagttgaagaccggaggcgacggacagggcgtttcttctttcctcgcggaaaggtgaaaaagtctctgtcggctggcttcgcgaccttcgctgcgacaggtcgccgtgtgatgccatgatctcctgagaaccgtggcgctgtcaccaagttcttctctgtctttttcttctttgagtaccgcccctcgtttgtttctcgtttgtttcgaacgcgctttcctcctatcctatgcgctggacatccttgcgtctcatcattctcacggtctcctcgccttcagtctgcaacgtcatccctcctcggccgtccgtctctcctttcgctctcttctctcttcttctctcttctctcttctctctcttcttctctcttctctcttctctctcttcttctctcttctctcttctctcttctctctcctctcctctcttctctctcttcttctctcttctctcttctctctcctctcctctcttctctctcttcttctctcttctctctcttcttctctcttctctctcttcttctctcttctctcttctctctcctctcctctcttctctctcttcttctctctcttcttctctcttctctctcttcttctctcttctgtctctcctcttctttcttcttctctcttctgtctgtcctctcggttcccgggcctgcgtctgtcgcttgccgaa

SEQ ID NO: 3833 - DNA, 5015 bp, Toxoplasma gondii
  source 1..5015: mol_type = genomic DNA
gttctgcttcccttcaactcttcttcgttcgtgcccttccttcagcaactctgcagcaccgttctggtgggcaccgcagccaccgcggcttttctgttttccttcgcctcgactgaagttcggtacgagcacgagcaaagtacaggatgttgcctcgacacacaagtccagcgatcgagagcgcctcggtggagcaaagagagaagggaggtagcgtcgcggattgacggtcggcaccccagtgcgcagagcagacggaaagtgaattgcgaggttgagagcaaagggtgcatgatggatttacgcgtcagtcgagggtctacggtttagaaacctagaacccgccgttctgtgtctcggagagagtgagcttgcaaatatagaaaaacgcctcgtggtactagggaacaggagaaaggaaaaccgaagtggagagattcgccgccctcttacggcgggaaacctcgtagtgcgtcttaacttagacaggctcgaaagaaacgcgtaaaacttgaccggtccgcaatttgctcgagtctcgtcgctgaagtcgccacctttccacctgcggtttaggtcggggatccacggactatgtgttgcagatcgacaacgtctgggagcgagaagcatctgactcgggaaactttggactggggtttacggttattcggtgggtgctcgaaaggaaaacggtttcagtcctacggcagtttttctgttgctttttgtctctgtacagaaggcgaggcctgcagcagctgtcgatttgggacgtccacacctcctgaacgaggaagaaaacacgactgaggaaatccctcgttgaggaaatctggaatccgcgttccttttcgatgtgctggttctctccaattttttcgcctccctggctcaccgtagagatacgtcatttgcaacgtgacacggaaacgaaaccgttgcttttcgtcgctcgaactcgttgttggctgccttttgaccgtacagggctgtcaagttttggattcaacatcgtagggacttcaatgctcgtgtgtttcctatctttgtccccggaaagcctttttctttctccggaggctccttttgtctcgcgagtgaaggcaacctcgtcaaattacttgtgttttacgcttcagttcgtctgaagttttccttctctaggctaaagcacggcacgtggacaacctagaagtcgcacggtcgattgacagctactccataagatacaaccatccaagatatattgatctatcgcagtttcggtcgaaaatcccgttacattacagagaccacttcgcttcaggtactttgagaacatactgacgacgagaacggaagtgcgcttcacggaaaaggcgcgttttgcggcgattttcgcttctaacggaactatcgcgtgcaaaagtctggcggaaatgggtgcgcataaagtgcatagtagaaggaactgctagtgaaagtagcagaaagaattccgttgataaactactgcacatagacccttaattccttcggagaaaaagaacaagaaccactccacgctccccgagacttcactacgacctgagaatggaccttcggctgtatctgcacccgcagcgtctcgctactgaacactgtccaaacttcgatctctagcatcccggccgaacaatccttcactttgaaacacacttcccttctcgcttagagcttactcacagaacatcgcagaaaaagtccatcacaggtgtggacagataccgtcgtccgcgcgggaatcgtactgctgttcgtcgaatatagtgtcgcctttgtgtgcagaaaaaacatgcacagaaaatcggaacacatgctcaccaaccgcattaattcttttggtgaaatggacccacccgtgacacgctccgaacatgtttcactttgtgccgtgacctgcagtctgaaattccgtcggtcaaccgtacctcccaaaccaaccagaagaatagtcttttcgacttcagtctcacagtttgtggtgtgcttcagtgttgctccttagcttgtaccgtgacattcaggaacatactgttatatttgacgctcttgtgtgttcacgttagtataacaaatcggatgaacacagacattacggttgctaggatactgaatatggctacagttttaaggtacacgcaaccctgtttttcttgatactgaggattcaagatctcctgatgagtagtttcgctgtcttctgcgacgggcagggctctgtctcagcttgtcgcttttgcgcctttgacgaactccgcagaatgcaaatgcgtttcccaaccagctctcaattcactgtgtgcggccaccgacagaacacgacggagtcaaaatttgattttcgtctggaaccttttacccatctctcgtttcagtttcaatctgaaggacaccgtcgagttgaaccgtgtaagagtccctgaacgtttatagacctggacgtaccactcgactttgttgcttccgtagctatcgaagcaacaagacgattttccgccgtgcatgaccaggcaaatgcgactctcgagtggttgcctcctgcaggcttgcctgcctcaaactaattgttaccttttccgaaacaagtagaactgcacaggacagtgtcacagttcgctgaaaagcatatcgggtgtctcctccaagcgtcaccagcaattgccacgcaatgcacgataaccgcagagggcatgtggtacagaagggtggactcttctttttgcgttgtttagccgaccactttcgagtttttcacacgaccggatgctggttcgcctcgggtgaactaaggatcgggcggcttctgttacacctcgaatcattgggatgtatctttcagccctcttcggcactgactggcacaactcccccacgggactgtgtgttgcgccttgccgttccttcacccgtgcgtaggaaagtggatttccaccgtgtcgcgcttgaaagtgaagagtttacagcgagacgaacgcaccccgtgcaaatcgagcagtccccggggaccggtgtccgagcatttcctgtagtgtccaggcactgaaacgaggaacgcggatatgcacacggccgctggcaaccgagggcgtgaacttccaaaaaatccgctggttgccaggaggaaacagacatttggggatatggccttcgaaagtgtgtaaagcaagtcgttgctgctaagcggccccaaaatacaagccgtgagtgtacagaagttctccggtcccggacctgtgtttttcctcagaagcacagagctacctcaagtttctagccctttcactgtcttcgaggtcaaacccctgtagagaattctttctaagcgaaccccgacccgtgaagaaaaggaggaagcccgagtgtagttgcacttgccctcttccacgtgtcttgctctctgccacgacgccccatctccaggcctcgcgaacatctccacctgttctcctggactgcgatttgtgtcctcggtgcaacatgtttctgcggcaagatgcggatttcgctgaaaaagccacttggggattgcgcccgacagaacgccggccagagcaccccgggccgagcagagttttcctcgagaatgcagacagctcactgagacagcgatgaatctcgcgtatacgccgaaggttggaaacagcaggcggcggggtgcgacggactgccggagtagtcgagtgcctctttggcttgagaaacaaggagaactccgagctcactaccccgtgtgtcgcgtcttctttccacgccctttttctgctcctgcggcttagctgtttctcgcgtcacctagcatgtttcgtgcctctttctctcgggatcggcttaggtcttctgcacctttcctccaggtagagagctgagactcgagtggccaggaactcccgcgttccactcgttttgcggaaactcgtcccaccagacggcggttctcacccagcctcgatttcctacagaggtagcggcaggagttcccgcgccgacaagacagcgggcggaacgcgatgcgggagaaggcctcgacggtgcaaatttcccttttttctgttctcctgcatctgtgcagtgtttttctggcttcctcgaaaggcgggcactttctcctttctgaaactcgcaaccgccatgcgggcaagaccccagaaagtcttgcgctctccatacgtgtctccgtgaaaaggctgtcgagtcgtttttgttgagaggtctgccgttggtatcgcctttgtctttttgttctctgcctccttttgttccccttcgggaaaggcgcgtgtttcccgcgtggcaatctgtcgaatgtctttccggtcctcgtctccacgcgaggcctcccgctcctgtccccggcgcggctggccttttcaagtttcctcgtttcctcgtccgtcgattctcttcgtcttggctctttcgcaatttcttgcggtccacgcgcctgcttcctccggacttccccctgatatgcccagtccgtggctgctcggttcctctcgtttccgaccggcggtttcactcctcccgcgggtcctttctgccctcaaactctgcggcatcttgccccaagtcgctttcctcaggtttcccttcgtttgcagtctctgtcaccatgtcatgcggtgtcacgcagccgacggtggtcgctctccgaggttctttaccttgaccgactcgctgtcttctgcagccacacttcccaccttgctcccgcgtcacactgttccgagcctcgctcctttgtccaagaaatccctcttcccgcggccttttcccctgtcacaaaaatctgcccgctcaggcgtcatccgccagcactcgtgccctatagcacgacttccggtgtacagacacactgtttctcggtctcgagctttcgtgcagagcactctccttttgaacgcgtttttaactttcctcggctccaattcttttgaatcttttaaatcctccggcggctttcctccgccacacctcccacaacactgcaa

SEQ ID NO: 3834 - DNA, 1517 bp, Toxoplasma gondii
  source 1..1517: mol_type = genomic DNA
agagagttccatcacaagcttgtgttgcagttgagtcgaaccagaaaaaactgaacgggacttggattccagtagaccccgaccagcgggacaaaggccacttgtactctctagaagaaagagacacatcgatatctgtaggcactaggaaactttggcaggcagttgatcaattcagggttttgaactgcggcactagttgcagcagcaagaagccacttggcagtgagagatcccttgttggagtttcgagttccaaacgaatgacggaaaaacaagatttcttgccgttctgctggaatacgagtttcaagagggatgagtaggcaagtcacgatgagacatcggcaagtcagtgcttgctcgtgcgtcactcacatgaggtatttgtgcgacgactgttaatacatgaccacttaaaacacgtcgcacctttatgcttttcgacatcacaactatccatttagactgcacttgaatggactttcgtaacatgtgcggttttacaagtaatgtcatccaaaacccgtgccaaacatatgcatatcgctttcttcaacagcgttacactctgtagaaccgttacgttgacggggaaaggaattatgttagtgggaaccacacactcatgttatgtcgtttattgttctagatcaaataaatcctggttgacctctgtgcttcagacgaatctgtaatgaatgtgtgagctatcagctgccctttggcctctgtcgtcgattcgagcgctccagactctactcaaggaagcatctcgcttcacatattttaatcagaaccttgtcccgtgtcggaaccatattttttaaagtcgttatgaattgcgtcaggaccaagggtgagaaaaaagaaggctttgacccaacatcgtgggacgaatacgtaaaaagtccgcgttagacaaaatgcaaagaataccaacgataggtgtctcgtaatttctgagaggtcgacaagtcccacgagcgacagtagtaggggggaaccgcggcaccaaacaaccaatgcagtattccttttctttggcatctctgtttcttccgaagtgacaaagtccacaaaagaattcaatttcctggaagagctgtttagatggcatgcgcttctgcccgctcgctggctggacgtctgccgtctccgctatagggtctgtcgctcgtgtctccgtcgatgacggcatgcggtgaatctttttcttccgctcgtgtgacccttgtgttcgttcattatagagcgtggactgaacctatgtgtttttatggtgaatttcagttttttcaaagcctgatagtcgcagtacagcgtcgtcaggcaccatttctccgtcgcgaatcgcacctgagtgaccatggcacgagagatctgcgtggcgaacagctccgtttttgtgaatactcgctttaccacaaacctttccgcggcaacttagcaacttttcacttcctctacgtgttagaaagatctcagagggcagtagccatgatgctcggatctga

SEQ ID NO: 3835 - DNA, 1575 bp, Toxoplasma gondii
  source 1..1575: mol_type = genomic DNA
cgtttcgccaagtatgattctcgctcacgaatagcatatcctccaaccacgtacagctaatttggaggccccatgctgacagtggtcgttgactaagaattctagagcgccacaacgatccacgaaattgggctggttaccccgcgaaacgggttgaatgacgaaacaatagttgaggcactacagtgaacacacggatactaagcagtatgtgagaactctgtgcggagccaacacctgtacttgtcgaaagcatattgagactgggatccacatatcacttagcctatttgtactaaccagaatgataccatatgatgtaacacatcggtttcgagacacttgagctaagccttgggtggcaggaaatcaattatacgcaaggtctcgcgtaagtgaagcaaacacagattgaaggcatccgtctgttagtgtgacgtcagcgtgccattcggttcccttgtatcacggatttcctccggccacggggttctccgaaaacgcctctttgtggcgtcgactgtgccagtcttctttacagagaacagaagcattcttgtcacgaatagtcaaaagaaagctcgacgtgttcgtccggttatccaggggataatgcccatcgcaaacctactctcgaccgacgagagaggaaactgagagaaatgcagacagacatcgggtgtctgctctataccgctggcaaaagacgaaaatcgttttcatgctggttagtatatcacacgactggttgagtcgcaagacctgaccggaacaccacgactccatcgtctgggctatctgttttgtgtgaagtgtgtggttagtctgccggaggttgcatataaaggagtggcttaaacaaatggccttttagacgaacacgccaagagaagtagaacgcatttttgctccgcactgtctatcgtagggctgaattgtttcgctcactgacacgtcacctttcgtcttttgtgctggtgttcagagcactctccgacacaatgttcgctctcttcgtgttccagcactcgtttatgcattctttattcgcatcaggtgacgcgaaagccactgcgagtttttcttacttccgctagtttcgatttcgcacccatccatgctactgtattgttctgtcttcttgttgtgctgtatagcaggtgatatgttccatcggtgcttgatttatcttccaggttcaccaagtgctaaaacaaaccgaatcaactgtaaggatcaggaggaaaaggcaaacggcagataagcatttttcagtgggttgttcctgccgctctccacaaacgtgagcatccctggttggggtcccctccggtcagaggaacactttctcaattggcaggtttgcatctcaagtctctttctgcatcgacagtgtagccttcgaaattttttgctcccaggagtttcaagcaaaggtattgctttctatctcagttaccggagacggttttggtttaaggtggattcgtctattgttccccacgttcggggtcgtggtaatcctctatctacttacgttaaacggttagaaccgcgatttttgctgcattaaaa

SEQ ID NO: 3836 - DNA, 2596 bp, Toxoplasma gondii
  source 1..2596: mol_type = genomic DNA
aaaactgaagagcgaacctcgagagctcatggaagtctaacaaggttccccggctttcgatgctctctctgaaagagccccttactctcgacaagtgccaacctacacacaaatatactcatctatatatatatatatatatatttatacatacttatatatatacatatttatacatatatatatatatatgtatatgtacatatatatatatctgtatatctatatgcacatatgattgtaaatttatgcatgtgtgtgcatgcggtgtggacggtagaagagagagaagagacaggttgttttcgctctgtgtgtgaacttttttgacgaggatttgcgtcggcgaagcatctttgaatgtagtgtgaagaacgatgtcaacgcctgtcgcttcggctgttcgggacctggaagtctgtgcagatcaggttgcctcactgcagcgcgagcggcgtttgcctgttgcttgatttgtgttgtcgagtttctacgtgaggaaacaggtatgagtcgcgagtgaactccacagagttttgaccgccagaacgcaagcgctccgtttaatgcgcgactttctttgccgtcgagaacggccgccctttccgtgaagtctcctggcgccgcgtccgcgacagacggcgacacaggcctgaacaggaagtctctgtccagcgcaggactcgactttccagacaaagaaagtcccccaacgcacacctgagcggccgtgagtcgcaggcagtgcagaacgatctcagcggaaacccgcagcgaggcagcatcagtgaagaggcgctccgctctaaagtcctgccgctctcgaacgcgaaggagagagcgtctcgcaatataacgtacattcatatatatacatatatatatatatttatggatatttataatgtatatttatatatgtatatttgtgtggaccacagtacataggccacaacactgaatgcagacaatctgtgtgtagacgtttctttctagggtgagacgcatccgttgtcgtagttcgcgccttttattatgagctcggcatgtgtgagggtggctgcgttggcgcttcatgtttcttggagtgtacgcatgggcgcgcgtatttctcgaccttttcacaaagaaggcggcgcgcagatttttggaaggagtaaacggaagttctgcctgggagttgcaccgcctggacgctgcgccggcgagagtgccggacggacccatcgacgggcgcagcttcaggtcgaaacaagaagagaaactgagcgagaaacagaagcagctgtttttctttccaccggcgaagttggacagagagaatgagccatactgcgtgtagcgtttcggggagtttggtcggctgctgccgcgctttttctcgaattggcccggcaagagaagaaggaggcgattttcgactcgtatggcgcggagtctctctggctgtgtggacgcgaatgcaagaaactcgacttctttctcgacctttttgcccaccagttttgtaccccgcatgctcctcgcttttctcccaagaaaacatgtccactttcgacggtcctttcgcgcgaaatcacgagttccgaccgccatactcccggcaccaaaacacagccagcaagccatgcgcgggtgtgtgtatcgcgggcattatagaccctcgacgctgccgtggtaactctctttttcgcagagttcgcggcggcctccccgttccgcgctttttctccccgcgaaggcctcgcgagtttctcggaagtttggtctttgctgcacctcgctgtccggaagttcgcctttcttgagaagaacgcgaaaacgcgcgtcctctgccgcgactcgcggccatcgacgactcaccaccgtatcgcgaagctcacactcgacggcgcgagcgcgcgccctcggctttttgctcttctcgcgggtgcattcttctcgcagaagaacgcgactccaaacgcctctcgacaatgagcctgtgcgaccaggtcaacgaaaacgcctgacacttgccgcatgcatgagaactggcgaagctcgactacctctctcttgtctgctccttctctcttccaaacagacagaaaaacgcacactcgccgacagcgacgccgagaaacgccttttgagtcgcaggacgctctccagctgtttttcctcctctcctctcctcttcttctctcctgatgtccaaaaaaaatgaagttgctctgctgtccagggtagtcgctctgtgactctctctctaagcgcggaagaacgacttcctggaaggcgcccccgaggcaacggctcgcaacggctggtcaccacaacttcgtcaaccattctttcgtctgaatctttttgtcctccggcgtttcgacctcgcctccaccctcgtcctcttccactgtctaccttcctctcctctctttctcttctttttcctctgcttcttctctctctttctctgcttcttcccctctctttctcttcttcttctcctctctttctcttctttttcctctgcttcttcttctctctttctctgcttcttttctctttctcttctttttcctcgaatcccttctctgtttctccttcaaga

SEQ ID NO: 3837 - DNA, 2188 bp, Toxoplasma gondii
  source 1..2188: mol_type = genomic DNA
ttttcgccagagactttgtttcttcactggctggcttctcttgacaccaagccgctggcctcgagtctgtctgcggatgaagggaagacgaaaacaacgggaccgctccaagttctctctctccagtctcctcctggcgttgctcgacgcgttcatgtcgtcgtccccctcttgctccaatccatatcttatccagccggcggactgtgttctcgcagtcacacagactcacccacaacgcgccagtggccagggcgagaagcgcggcgcgtctggcggagcgtggaagctctcgagacgactcgcgggaggtttgcccttcgaggctcccgccagctggactggagggcagcggcgaccagcctgtcgaaaatccatgcgaagagacacgaagagaggcccttcttactgaaggaatataggggagaccgcctcgaaaggcgagtgaagcgaattgacccacaagcgtcttttcgtgcgaagagctgaacgcgaaagcgttttcgttatcaaccgagctattcgaaccaaaacgccgacagccacaaaaaatggttgggcatattcgttgacttacacggaatgagggcacgagcaccatagctgcagaaaccgacgacaacacgcggcaacgagtggaagaaaaaccacctggatggctgcaaaagcgtagcgcactcgttgattcttgagcgcgtgaaccagtgaaaacgacctgcgatgtttctataggcaaagccgagctcaacgagcttcggccgagaaagtgacgcgaccgaaagtgacgatatgcggatcgcgttcgaggagacagacgggaaacaaagcgaagggcagactctggcattttcatagttgagcgaaaacaggagtcgaaacggaaaaggggcgggaactaggcgacaggagagtagagtggattggtcgcggcaactgcactcttacgatgaccaaagaaaccgtcatttcttcaagacaagcttgcttcttcgagacgcgcggcaggtcattcagaagcaaaagaaacataccgcgaacagatgagtcagcataagccagttccacgtgaggctaaagcgaaagcacagcgagggcgtttcttgtctgtacctacgccacaagttgtggcacttctgtgttggtactgcgtcgagatctaccgtattctcaagaagttgcgatggaaaactgtctctacgtgtggaatgcggcgcactgtgcatgcatctcgccgctgtgtcccgaggacagcaatgttgcagtttccgccgcagtgtgtgtccgtgtccttttaacaggcaaaagccatacgaaaacgcaacaaactgtttctgtccaaatatggagaatcttcgtcaaagagcgtccgtcttccatctgtacaaatacctcgccgttgcatgcgggccgaggacatacacatgcagcggagtaaattttcgaaacaggagataaggctcgcgcgtttgtaattttgttattccacatgcgtcggttcccttttccataacttgcctctctttctgccaaatctttgagacgctggtgagagcatgtgctgtcctgcaagacttatcgcaaagaacggcagagctctgccttaacgtggcgcaacttgatttcggaaatcggaagcggcacaagatcccaagactctcgaccggaggagacacatgtgactaatcaggagtctctttttgcgttgtcgtaacaagagattcttttcttgcccctggtgcagtcaacgtttacgtactcattcgtcgctggcatgttcttcaggttccgctctaaattcgttgaatcatcgggtgtctcaggttccgcttccgttaaaacgcttcgtcgaagttcctgaaagccgatccatccctcatgcccggcacctgtcgagcttcgcctattcgtttccgccgcgcgttccactctagcaaagaacggcaatcctctcgtcctcgacactctgaagcgtgtttctgcagccacaaaaattctacgcaaacgcttttcctaccctcgaccctttcgttgcgtctcacgttttctcaaccgcacaccgtgaccacggcgcctctcgctgctccacctatccgacaagttgggaagcacggcaagacgccgaacgcggactggcagtgtgtcttcctgttccttgaacgggagaattcgccatggttgtgagccaaga

SEQ ID NO: 3838 - DNA, 1804 bp, Toxoplasma gondii
  source 1..1804: mol_type = genomic DNA
ttatacgagtgaaggccctcttccttgtctaaccaacacacatgccgcaagcgttgttccccattttgcgacgggagtcacaataatcatgcaggaggcgtgaagttttgtactctccgagctgcggcaggatacttttggacctgcaacacatctgtagaagtgatgtagggtagtgcattctctgaacgaataaggttccctgatggctgcttaatccgcccaaaagggataataaagggatgatgtgtgctgcggttgtcgatgacctgaaggaacgatcttcgatattgtacgattgagcacgagcaaccacgtgtgcactagtgaacgtcagtcaaggtcgtgaaggtcaggaaatagtaaagaatgcgtgaatgaaatgcgcattcactttgctcagaacaccagccgtatgtttggtagctgcttgttgccgcgtctgggatacgccctctgaatatcttagtttcgagtacaagtcaattcaactgcgtcactgttatacgtgaatcagatattatctagtagcataggggaacgatgcgttatgattggatctgccagtttgtcggcgggaggcgacattgaccaatcccaaaatcaaagtgaatcagtcacatgcttccagctcctcccggttttcattcgcaagacaaaactgtgaaccagagtattcgacgactcatacgggtgagagccattgatcagacgacaccaggagctgctcatcaattcgactcctcactgcttggaaaacggggcaagcttcgattcgttcggcttctggtaaagcagaacgtgtaacggacaccgaaggtgcgttcgttaatgtaacgaagtattctacattctggaatactgaaactctcacaactgatagggggaatgatattgcgacgacagcggtaacaaagccactagagtgctttcactgactggcactgagttgtctgctgccaccggagttatgccctggggtgctggtgtatgccagtaatcgttcgaagatgttgacttccgtgagaaggttcgccctttcgtcccttacaccgtagcaatacggaagagtacttgaaatgctacattttgtcctggtgtgttgcacgatttgctgggacaaacaatggcagccgtcccggggctttcgctatttgggatggcctcgctttttggtgcccaaaagacttgctcagtgtgtttccaaggcgacagataggcatttttgatggaatagaagagcatttttccccgccgaggtttgatagtaggtaaaggcgaaataatttgcttggttaagccctaaggcggagtcgctttctctcattaactctattgcggcgatagggcggccgtgtacagcacggggcccctcagcccacagacagaaaaatgtgacgaaactgtgaaagtgctcagtgctgcatgaggacgagtagatcttgttggcgtccataaacacgtgtatctgtccacggctccgaaagacaatcgatccttttgctgagcccaccgtaacattaatactcaacgctgacgcccgctacgaccgtcccctcccgtttagaagatttgcagcagcgtatgaaggtaataaaaggaaccgatcgaagcttaaagcagcacacgtttgagttgggccgacacaaagcggcgcgcgttttgaggaacgaaagctggatatccccagggatttgtcaataatctaatcgactcgggtagttgatgcaacgatatggggataagctcactcacagtccagggtgctaccatttgccacatttaataaagcattgaatcagca

SEQ ID NO: 3839 - DNA, 1290 bp, Toxoplasma gondii
  source 1..1290: mol_type = genomic DNA
gcagcggcaacttgtggcggaacacacctcccactggttttattcgacaccttttcctttttttagcatgcgatgacaccgggtattagtgtttgcgaccatagtagtgtattcttgaaatacgagtacgcgtgaggttcccggctgtggtgtctgtaaggatggcccgggtgtttcgtttccgcagtagcagtatctctggacactgaatccacgagtgtgaatactagattcgtgtttgtattttcacaactcccaatggtcgagggcatgcgtgcatggccaaatccaccagagatgttccgggttgccggatgcaaatggaagttcgcatgacgacgcagctgaaagggcagggggttgaacaggtcaaagttacacatcgatgtgcccacggtagttttagataaattgagcgctcgcgcaggtgttccgccgccgcaccgatgcagccggaactccaagggaggttctacatttcagtagacgcagaaaaaaaaagtgaagtttctgccgcggctccattagttacagattgttcagtggtcgtggcttcataagtgaatcctatgaggccataagaaagcgcggttcattgtggacgcaccatttctgggcagctgcaaagtgcacctcatagtcagggacgcttctgcgcagcaggtgtgacattcgagctgtacgattgacaaatggctttcgtgaaaacgaacatgccaccactaccactcttgtagtatccgctgcagcaggccatcgattgcttctcgtctgacatgtctagcttcaatgctacaaagagcaccgctgtgtcaaagagtcgcgctaccttcactagaagacatcctgctccccttgagttccctaccagtagacctttgtttatctcactgcggccatcttaccattaatgtagctacatgtggcaaataaacttctgctgagactccggcggcgccacttctcgtcgttctcgccaagctcttgatggtcacctcgacacaaccgacagcttcgcgcaataaatggccttttatgtccagatcgttgtcttcaacagatacttcgcattcgtggatcgacacgcgaatacatcccattgttgtacgtgttttgatgacagcaatcttatgtggagttactgccgcgctgatgtctgagtgaacttgccatatgcaataatgttcgaaggggaagaaataccacgtggcagcgaaacgacactgagacaagatgatacgtgcacagcattcatttttgcttaccctgagggataacgaacgaattcca

SEQ ID NO: 3840 - DNA, 2417 bp, Toxoplasma gondii
  source 1..2417: mol_type = genomic DNA
cttctgtggagttcgaaaccgtccttcgcgtcaggctatctcccgaagctgcgcatgtcgtctgctccatctttgcttctctctctgcttctctcgcgctttttctccttgtaggcactcaggacctccccctgtgtctctttgccttccctctccgttctctgcgtcctgcctcgtttcctcgcgtctccgcgcgcgcttctctctcttcgcttcctgctgcggctgcgtcctctttttttgtcctcttttgcggcctggtctggctgagttgtcgtttacaagggcacagaggaagacgcggaacagagtctcggttcggcctcgcgcatgaggagaagccgcgggtcctcactctgagcactggctccccggcggcgaagtaggaaaggcagatcgctttcttcgccagttctccgcgctcgcgaagaagaacagctgctcagagagcttcacagtgccggcccaggagagagaacgagagaagagaagaaggtccaggagaggggaaggaaaacggaaggagacccggagaggacagaagaatacacacagaggagagaagaggaagacgagagaaaaagacgaggaagaagcgaacgcaggaaagaggaaaggaagaaggcaaagtgtcaacgtgcagcagtgggctttgtctctctttgcgtaggaccaaagttcaaaaggaagaggcacaacacagacctggaagagcaagagaagcgcgttctttcgaaggcttttctcacgactcgtcctctctctctttcctcctctctctctctttcctcctctctctctctctttcctcctctctctctctttcctcctctctctctctttcctcctctctctctctttcctcctctctcctcgtcggttgctttcttgtctcggacgatgacttcgtcgactctcgcagaggaaatgcgtttcgcgactttggcggcgttgccgtgtgttcactggttcacctgcttgcctcgcgcaccgccttcgctgcttctgtcgagatccgccattgtctctgagcagctccgcgaggcgggccggggtgtacagacagccgagaagcgcggagtgcgagcttcttcccggcgttcaaaaagccgaggaccgcagaaggattgtctttttggtcgagctgcgtctgcagaagtcgcaggtcaccacccccgtctccccgcgagcgaagaaaactgggagcgaggaagcggaagctcagggagacttcctcgaggctggaggaggcggagcgcagagcaggagtcgccagaacaaggcggaaaatctcaaaaaaacgcgtttcccctctcctcccggtctcgcctttcgacggtgtgcgcagctggaaaagagggagagagctgcgaccacggcgccgcgaggaaagaggaaggaaaacaaagccggcgcaacgccttcgcgaggaacaccggaagctgcggccaggaagaactctgaaagagaaaaagctgcggcagagcgacgcttttcagtccgcggagatgatgtgcggtgtgtggagagagtcgtgacgctgaccgagagagagagagcgacgcgcgagcgacggcagtgtgtgatgcttgctcgcgggaggctctcttcttactaggtcagggggggggggtggacctgcacctcaaaaagcgtacagattgtgtccgctgtttgcgaattcgcattcgctgttgctttctccatttccttcaaagcaagaggtcttgaacaacgtcggagagaggcgaggttggcggatcaaaagcgattttccaggcgctctggtggtggtgccgggcgagaagcgaagtcctcgcggttcggtgtctcgacgaaacgcaccgccggcgcggcgtctgcgctctgcacagactcgcgcttctgctcctctgtgcttttttccttctcttttcgttcgcctcttcaaacgaaacgcgcgaactcaggagaccctcgcgcaacacaccgcgcgcgggcgcaggaaggggaacaaacgcgcttggccggcgttctctcttcggcgcagcgttttcttccaccacattctgcttcacaggtcttctcgccttcgtctcgtccgcgaaaaaaacagcgtccagagtctttccgtccaccaaaggttccacccgtcgctttctcctcgttgcattttcttactctgcgtactcgtctcgtacacctcttctctcttcgagtttcctcgtccgccgtcgcgctcgacctttctctccgttccgagcgttgtctccgtcctctgccccgctctcctgtctgtcttttcgttttccccttcgccagactccaccgtcgtcttcctcgctctcttctgtctcccccctcggtgcctcgcctcggcctggcctcgtggaagcgttgccgccgcgtccgctttcttcagcgcaagagaacgacca

SEQ ID NO: 3841 - DNA, 4873 bp, Toxoplasma gondii
  source 1..4873: mol_type = genomic DNA
gtcaatcaatgcaagtaaactgcatagaagtctacttctgaggacatctgggtaacatctatagcttagtttaccttagcaagtatgtatataatatatatgaatatatatatatatatatatgtatatttatgtatgtgttcgtacaaacttgcgcttgtggggccagaattatctacctgaatatgcgcataagaacgtgttgtgatttgccttcgcatgctttgtgcgtctgttggatcgcctgtagctttccttaaaacagtcagcgctcttttctcgacgacacatccatctaatgatgctgggcagacgagttcaaccttgctgcctccaccactctacccagccttttcgaccgtcgaccatgatgaacaagccgacggtctgggtaacgtttcttctacatgtcagagcaatctctgttgatttaaccctctcattttcagggccggaaccttgctactctcccgttcactccggctacttcctacaagaatgcaggcgacgcttcaaaacgtcatatggtggcacacttgattctgttcatattgcatacgagacttggggaaatttgaatgcgtctaaaagtaatgcggtccttctcacctgtggactgtcggcgtcctcccatgccaggagtagccccatgaatcctgaaagtggtccgtccccattccagaatgtttcgggggaaaacagcctaaagctacacggactctagatttcaacctttcacatgccggctagtgatatttctaaggaaaggtgctgtcattctgggatatagtgataccattgtttatgaggcttattctgataaccacatagtttcggctcttccatgtatctttcttacaaccggcatgcattgatatttaactgtatccaacttgtgataaagaagggcttcaagctttcaacaggaggaccatgcgatatattcggaacatgccggtgtagatgttcgctgttggtttctcacctctacggtttcagtattttaccatagaagaggtgacgttgaaaagtgccactggccaccacacatgctgccgaacgatttgttcctatgtgtatgtggacgcatcgtcttccaggctggtgggagagctttattggtccaggtcttgcattggacaccaacaagttcttcataatctgcgtatctaacttcggaggttgctcaggaaccacaggaccgagctccttcagcagtagaggcgacgggaagctcatacgttatggtttggattttccgatgttttcggttcaagatatggtgcgaatcatgttccgcgttgttggtaagattcatcaatgagtacggtgaagacgatttaaaatggtctgtttgtagctggctttgcacatcaccacaacatgtctgttgcagggtttaattctgcttttctctacgcgttcacgtgtcgagtatgttgtggatcaccagcaggataaatctacacgttgcttccatgtgtcgaaaaggtttgctttagcatccttaagcagactggcaagttgtttctacaatacataatacagtagaagcgcaacgggcgcgttgcgtctgggtacccgtcaccgtcaatgacaataccagtagctacatctggcacgggagtcttgcgatgaaacaagggaaacacttgtctttttcccctgtttcgaatgtcaccaaagattcggatagcccatctgcttccctgcaaatgcagaccacctgggagtagaaactctacatgctgttgttggcagcagcctgggtggcatgcaaagcgttgccgccgcggccatgtacccagagagggtgaagcgccttgtcagcatcagcggtgcggtaaccagttcgcctctctcaattgccctccgatatgctcagcgtcaagttctcgtaagcccctgggtagaatttttgtcgaaaactgcttggtgaccctggtttcggggtggacgagggtgtgtgcaaaaaacggccctgccagcagttcgttcaagtctctttgtccagggattcacgtgtcgctgttaaaaacggattagtatggcagaacattaattattgattcaaaaataagaagtaaatggagagatgcaaacaagcccttcctcgcatattttgaaaaagagtgcgaatctatctagacagggccactaacccgttcagtacaagtctaaagtcacttgaattttgtcgatatggcgccatctgcgagaacttcgaagtgtagtgaacatggtgctacgcagtgctctttgttctcccagatggcagatccccgtttcaataatggcaactactatgaaaaggcatacccgtttaccggcatgaaactcgctagggaaattgcaaccattacctaccggagtggacctgagtgggcccaacggtttggacgccagcgtgttcatcaccatcttcagagcgaggaagcttctcagagtgaggaacgcccaacaaactttgacacaaaaagccgatacgaccatcctcctacgctggccccggactttaccgttgaggcgtatctggagcatcaaggcaagaagtggtgccacctttatgatccaaactcgatgttatacatttcgaaggtgagacagtggcacacaacgtcagcaggaattagacggacggtatcgtgccagagtttcttttcttctctacgttctgacctacctgctgcgaaaatcgtttgttttcaagggaagagtcaagctgctaagagaaaacgtcaaggaactatctaatttccgtttgcgtgtgtcaggtgactccacagggtcagcacgaaacactcttagccagcgtgatgccagcgacggtcgtttttgctgaagaaaacaagatagtccataacatcttcatgtctggttctacgtggctgtttcccgtgtgctcgttgcattaggcgatggaccacttcactttggaagagcctttagggacgaccggagagctttctctagaatatggtctgcgccgagtgcgtatgcctgccctggtcattggcgtgaaaagcgatattctctttccaatatggcaacagaaacagatggctcattcgctgcagcgggcaggaaacagatctgttgcattttacacccttgattcaatttatggacacgatacattccttatcgacgttgccaacgttgggggggccgtaaaaggtcatctagagcagagccactcgtagttttcttttggtcgtgctaaagcactcggaggaagcccgcttagaaagcattcaacttcaacacctcgtcaattttcaagtggtcgtaacacgggacatacttcatggacaggtatttagccaggctttgccctggatccctgcacccctgcgtgttctatttgtggaaaacttcctgatgggtcgtcatgaggtacctccaataatgtggcctgcctgttcttaatgtcaccatgggcactgctagggttcattctcaaccaaatcacaggtcggccttcatcgcacgaacgcgcacacacgtgaacaccttacacggtaattacgtgattctcgttcatgcagcaccaaacagcgcaccacagcaacaagcatacaacagcaaccagcctgacgccaccgctgaaaaattagccttgttacactcatgtagattcttgtttcagccaatgtttgttgcagctccgtctgaaatgctgcatcttgttctggtcagtgcagactggagtaagagcatcagaactagaattccctagtagaggggctgtcccgttggcaccctcatgggggcaaccactcatgccgcactgccaaggaaaatatgagcgactctcgcacaggcaggagggtatatcccagtcagatcttctgaaagcctcaagaacaaacggaacgttattcgtagggacttactgaacttctgtctgccacctgttacacaggaaccccccttcaaacccaccaaaggcaggcaccgttgcatctcacactggagcacgagacatgggggggagggggggggacgagatagacagggcaagagcgggaaggttccttgaactgcaggaaaagtagtgacgccctgtcagaaagaactaacgctctacaaccatcatctacaatgaaactttctttattccgactaaaaagatgttcctgcgtttccatggattcaaccaaccgcttctgtgcagaagttcatttacgctggctactgcatgctgcggttggtagtggaactggtcgtgctccattattgtataaggcttcactgggaacacaacatcagagacgacatttcaacccttgaggatgttagtaagaccgggccaggatggctggtctactgtagccaactagatggacgcgcagaccacacgcagcgcttgcgctttcataacttttacgcagagtgcggctcgatttactcgcgattcgcggctgcactgcgagcaagcactgctccacagcacattaaggatttcccatagacgagaaaagacagcacacaagaattgcttttcattagtttcaactaattttggcacaacatcgtcaaagcccttcccatctgcgtgttccacccatatggttggacgttacagacatgcatccgtaggcgacctcgtcttctgcacctcattccaagaagatatatccgaaaagcttgtgtcctatacgtgctatgtcatgttccattattcttttcttgaaggtgtgtggtatggactgatacgtgggcctctttagtatcgtggcacgactacgcacttgggggggcggggtaattgctctgggtcgtgtgaggactccttgttaggcacccgggcgttcggttgtcgccaacaggtgcagtgccttgcgacggggaagctgtgagacagctggca

SEQ ID NO: 3842 - DNA, 1707 bp, Toxoplasma gondii
  source 1..1707: mol_type = genomic DNA
ttctttttgagttctggcttctccgcagtgtccgagcttgagtccacagacaacactgaaggctcggtccctagtttcagcgacacgtcgccagtgtcgtccccaccgacgagctccccagacattggtgccttgctgtgccactgtctgtctctctggctcttttgatccctacttcgccgctctaagaccgacaaatctccgagttccgccagggaaacaaccggtcggtgtctcaggcgctgcggactgaacggaggcgacgttggtggaagttcacgctcagcagattcccgctggtgaccaggaacaccggaagaatggctaacctcatgtctgcacgagtgcgactgcacatgccgcacagaggaaggaagattctcactcgttggaagagtctgtgagatgaaactccgttcatttccggaggaaagggtcacttcaccgtcacctgccggtcctgtgtgtgagtcacgggctttcaaaccttctgaagcgctgcgcgcggctcctgtttcagcatcctggcaaccagagcgttccgtctgtccgttccagcaacgaagacccagaacggcttcgggtgtcagaccccgattgttgacggaaggcagactccgaagaacaccggacgaacagtcgacgtcagacacatgtgcgttcggctcccactcgccagctaccccggcttgttctgcttcgttcagaacggctcctgccttacccgttcctgagacgtgtacacctttccgagcatgctgctgcagtatcagtttgatatgggacgcgcaagtccagaaatccctcagctgctgctcgactgctgacaggaagaattggccatgggcgaccaactcctgaagctgaccaagagacagctctgaatatgggacggctccgttttcctctgcataccgtgaacggtagacctcgtccgctgcatcaccctgctgcatgatgctctttccccattccgtctccgattctggaagctctttttccaggttgtcgagacaaatgtgaacagtggcgtcgccgttcatggaatcgcggagagacacatacggcactgcgaacaaacgccaaggtccgtgtttcggctggatggcagggtacatgcgtctcaggtctccgtctggggggcgatacaacggatcactgtcgacaccgtcgaacataaatctgtggaaaaactcgtgagttccgacgtgaacgacagcagccagcaagtccggatgttccagaggcttcagtgcagccgcggcggctgcgccgcctacgcgcacaaggcattgtcccagagcttcacatttttcccggaatttatttttgctttttatgcgacaacgaatagtacgctgaagcgtcgaattcgacgagctccagaagctgtggagaagagcgcgggtgaacgcgcggtacagccaagcctcctgctggcgttctaaccgagaggtatcttcgcgagagtcaccgtggagacggacactaggagcgaagctgctggaagcggctgtgtgcgatgccatgatcactttagaattttctcttcatggcaaagtgcaggtaggaagcagaggacacgggtaacgtattgttctggcgggtgaacgccctccccctccgtcattcactaacactgcagacagccgaggcaataaaagacaggtggcaaactggtcgaggaaacactgtcacccctgtaaa

SEQ ID NO: 3843 - DNA, 2148 bp, Toxoplasma gondii
  source 1..2148: mol_type = genomic DNA
tcgtttccatgattcgtctctccgtgaggctcgacggtctggccaagcgagcgctcacctcgctctcacctcttgcccataaaaagcagctcgcgtcaacaggagggagaagtcctgtgggctgaagagggcagcgaaacgttagattgtaccccctggtagcttttttccgatgacgcaatgctctctcgagtgcatctgtcttcgcgtctgccttgcatgcgcggcgttgccccccctgaggcaactggctcgttcgctcggctgtatgtacaccccagtagaatggggtgtcgtttttgcgttttcgaccttcgtataggcagataaatgcagcgaagggcgtcgccgcctcagggaaaggagagagaggacagttgcggtttcgcaataagaccccgagagcttcttctgtcgcagcacagataaactcgcgttagctctttcacactcgccgctgcggctctcgctatcgggaagcacaaaagacacgcgacatgtcccttttggtggaatactcacagactaccatcagagtcaaacaggggtcctagctatgaacatctggacatcttgattatttcagcctgatttctaataccttctttcgtctgttcctctcgcctgcttccttttctctcttccagtctacactctacgctctctggctcttccgcttccttacctacagcgagcagacacaatctccctccattcgtatctcttcacgaatgtaccaggctcgcctcctttctccacgtcctcctttcggcctctctgtctctctccaactcagtaccgctctcttcctctctcgctttccctgcggctatctcttcttctctctctgcttgtctgcctacattttcctgtttctcggcctcgctgcctaactttccttttcttctctttttgcctctgtcgctgcctctgatctcgtttttcgtctcgcttcatattttttttagtctcggcttcatctcttagagcgcatctgaagagatgaatctggcagagccctgtttctttctctctactcggccggactttcctgcgacgcccaaaatgcgggactttacgcggttctctggattttgacttccacacgtggtttagagactcacacggcgcgcctcaaggcatttcgcgtcaagtcggagacctgactaggcaggtgtcttcgtcttgagaaaaagtcgcgtgagtttcgtggagacagaaaaaacattaagaagagagcttcgctgcgagctccgttcgaacgctgaccctcccccccccccctccccaaggcaaatatccggtgtccgtagcagcagagcgggtgagtatgcgaaccgcagcgtttcagagaacgaagaaggaaactgagggacgagacgacttggagaactaggagaagcgagagaaaaccacaatatccgcaagagctgttctgcttcttttctctttatcgagctcgctctcctgtctccctacacaggctgcttgtcaagtgtcttcgccgtcgctgtctccgcacccagcgaaggaacagccttcacccttgaagcctttcaccctcctgagcgaagtatgcggtttgtaacggacagagactctgaaattttacgttgcttctctggagaaggaaacgcttcttgctaccgaccctgaagtcggcaggacgacgacggtcttcgcacatcggtgtgagagcgcatgcgaatcggacaagacatgcgcgggacagacggcgatctgttttttcaagcgaggacacagaaagtgactgcacatctacagagattcctttttgtctctgccttgcgaaaaggaaggtgtctctgtgcttctgtgtggagcagctgcttccctctttcgcaccgatcgaacagaaaacagccacgaggaagccgaccggccgccgaaagtcttgcgtcattttctacttcgcttcgtctctcctttctctcctccgacgtgcggtctctcctgtctctcctgtctctcctgtctctgtcggcgtcctctctgctgcgagtcgtcctcgtgacctccgaggcgcgaggcgagagaaccgaagaggattcctgcacacagagacaaacactgtgaagcgagggcagcgacggccctctcgaggcgcgtctcgcggggaaacgaaaa

SEQ ID NO: 3844 - DNA, 1881 bp, Toxoplasma gondii
  source 1..1881: mol_type = genomic DNA
gacggcactcttcactctaggccctgtactactgtactgatcactttaaaagccgaaatattctcttcgtacaagtgatcggcgatccagaactgccgtagaaaaacgagcacatgcaccaagagagagcctcttccgcgatatacagatatgcacacatatgcagtggacatgcgaacgcagacgtgcgaagatacagataaatgcagatataaatgcgatataaatacaacatatatagagaaagatgtatatgcaaagagagatacagatgtgccttcggttcgacggttgggcgtagtcaaggagctcagatcaggaaagacttcttggacttgctctgaattgtaaacaacaaaaaagaattttcgtgaacgcagttccacgcttgcgagttcctgatatgtgagtcaagaagaaatcaggcgcaccgactgataaacagaaggaacgacctggaggggtgctggcggtttggaaaaaacggattttctgtgagagagaatcgtcggaaagacgaaaggagaggccgggagcaaaaggaggctctgtggtcactttggaacggcgaagaaacataccgggaagggctggcctcagtccgacaagtacgtttcctaaaggacgcagaaacagaagcagactctccgagtcaggccggagaggaagtgtttacgggagaaaaatgtggacttgttcggtcaaaaacggaaggaaacgcgtggcagatgctgcttttttcggtggctgctgtccagctatttttccagaggcgatgggccgcgaaattccaagattcatctggtcacactgcgcgttggcaaaagtccattccggtcacatccgcgaagaatttcgggtgtatgtacaaaggagttctcggactttggcgggcgtcttctcggtggaaaaccggcatggcagccgtcggaacggtcacaaaaaggtcgccggcggttttttttgagcaagaagagacacccagtgtcgtttcagtcggtcggcatcttcggcaaaaaaagaaaagtcaagatgaaaaagcgtttttacgaaaaggagggtccgcgagactgggcttggcaaaaagcgcgattttcgccgccatgcatgtgtgtgtgtcgaactctgaccgggacacggggaagaacgccgacgtgttcgcttttgcgaatgcacgtcctttccctcttggtttgcctttccctctgaatctttcaggagtttttcccagaaaagtcagtctttccctgtcgctcgccgcgggccgagcagcaggcttctcagcgaccgcaagtcttcctcgctgcaccgatgcttctgttgatttgcatgtgtctcggatcatctctcttcgtcgtcatagctgtcggtcattcataaaataggcatgcgtcgcttttttgcaactgcatgcgtcaacaggtgtataggtgtaggcgggatgaagcacgcaagacaacttcacagatatctaggaagagtgtgtaaatttatctacgacaggtagaggtgtacgtaaatagagaggcagaaagtgtgtagacgcagatttgttgatgtgactctcttgtttttccaagctggctagacaccttctccgtctcccagtggcctgtgtagagattttccggtctagtctccaagctgctgtctggcaggtgccgaagaagctggtcttctctgcatgtcttcgttttcttacacgcgaacttctctcgcgcctcgacgttcctgctgggtgttcgtgctcctctctcctctgtctcctggcccttcctctcggtcttttactcctatctctttctgctcgccttcttttctgttttctcttattttcctttcgtctgttgttccctttctttcctctcgcttcctcgaaaa

SEQ ID NO: 3845 - DNA, 2134 bp, Toxoplasma gondii
  source 1..2134: mol_type = genomic DNA
ttacagctgttacgctattatgtactctacctatcttaacaggtggattagttatgattctattagatttacaagtgaataaaggaatctctgattctacgttgaacatacgttcagaagacaaatccacatattgttgctaaggttgctccaggagactgtgtctgttaagataggtaaatgctagcatatgagctgtaaagataatggatcagatgtataaaatagaagtttttgctcctttctacagctactctaacgttgatcaaccaggattcaactttgaacggaagatgcagccggaagacctgaggcagtactcttctcaagcacagcgtggtgctgtctgaatgagcctctttcagccgaggcataggggcaagaagggaaacatctaatgtcccaatgctcctatgcaatgtgaacatctacaaaggcgcccgttttttcttcgtggagctccctgcatctgtggtttttacagggatgttcggaagcggtttagagtggggccaacaagcgtaatcaccgtaccgcgcgaacagcaagctcctgttctcggcagtgatggaacgacgtaagacgaagccgcgtttgtgtgtgcaaagctgggtagatcgcatttcagtagtagcattaccaaaacggcgttaagtgaaaacacgcaccgtttcgttgcagctttcgagtgtgcatgcacgcgacgaagcacgagatccgaaatcgatgagctacttctgagaacgccacatcatactacgtagagggcggtaatggaaccgagtcacacacgacggccggacacgtcgtgtgaccgacttacaagggcacgatgacgagcggttacaattaaacgcctctcccactcttgagactggctaacccactctgtaatgacaggatacgcgctcgcgttgcgggcttggctgaacgcagtaactggaccttgacagagaagaaaatgaaagaaccttcccttggcgccactactcaggaaggtcagactctgtttcgcagtcgtgtttttagatgtgctttgacaagggccatgctacacgggttcaagaagaacctgtatatcagttgtgatgcgaagatggagtagagagaaaacaaactgaagatgatcactcaacacccagcagtgtggcaaagcaaatagcagcgtgacagcagaccgacacaagggtccttctgaatgtgccagcggaccggcaagcccgcatgctagactgtttccaacgcccactaacagtgtgccgtctaaaatagtggacacatgctgcgaagatacaaaattaatacagctggtggtcccaagcgcctcaaaggcaccctaagaagaaacgataccaatcttcgtgcgccacaatcccaacatacgctgcgacatcacttgcaagacgggcaaagcggcttgtgcgttttcccctctgatgacgatcttcctgaattttccttttctgttaacaaagtccgtctgaaaaccatgggggaactctactgtctaggccatgcgcaagctcccattccttcgctgacactgatataaaaaagtcagctgtgatccgtccgctcgagccggtgctgtcagcttggcgcgggttcgacgcacgtctctttctttccccgcggctccatcgagtgaatcctgtaccctgtctcgacagggcattgatgttgtgtttttcacggcctttctctggctctgcgttgccttttccagcggctatatcgcggattttctcatgtacgctgcgacagctgacggtgttcgcacgtctcctgcactgtctctacactctccgtcctcctgttgcacaggcctgtcagcctttcgtttcgattgctgcttgcagggtccactcttttgacggatttccagtttcaaagtgttgatgtatattcgatgtgctctgacacgttctgactcgtggtcgtgtgcgggaatttcgctgccggtgtcgtctgtccgttttgaccggtccagacgttgtgagttcttgctttgtcaccgagagaattccaggcaagccgcggaccttttccgtactgggcgctcgtgcccgtcaggccgtatggctccttgtgcctctgtgacagaaggcctgagaggtgagtgaactcgcagaaa

SEQ ID NO: 3846 - DNA, 1855 bp, Toxoplasma gondii
  source 1..1855: mol_type = genomic DNA
ttgagcagacgagcattcgctttcaacaaggcttcagagaagacgcgtcctcagagatccgcatttctcgagtacagcgtctccctctgaaggcgaggggagataatccggaagtctcagaggacccgcatgtagctcctgacgattccctcgaagaaaatagaagcaaccttcgttccattggtttgtgcatccccgtgtgacgtatttccttccagactcgcaccgctttcaggcaattcttttctccctgctgacctctgtaaagaatcacaatgattgctttaccgtgaacgagacgaaaaagttacacttgctctctaacgcccacttcaagcttccagagaaaaccactggcgcaaacagacatacagttgcagtttctatacatacagagagaaacatatgcgtactacatattcacataaacactggcagatcaattggtatacatctctccttttatgtcacatacatttacgcccatagtcgaatatatatatatatatatatatctgtatatgcacatgcatcactatttatacatatgtataatccggggtgactgtatttatacatttgcatttccctcttatatcaaatgtgtacacatgcttaggatattaacagtgtagatgcatgcatccatctagatgaatttgtatctacatatatatatataatataagattgagtgcgttttgaaatgtgtgagtgtgtacgggatgccctttattcgctgaagtctagattttggtgtattttgaatttttgtttggagcttcaatcacgcttttcgtaggtatgcagcatgttctcaagactggacacagctggcatttctcttgtgttgttctacgcgcattctttgggtcgcgaagtcgcggtaaccactgtgcttttgtcttcttgaagacggattcttgcaggggaaatctcttccttctgttttcttcagcgttgtctctccgcttctcagtttttcttgcgactcgccccaactcgcagggcaagtcctgcagtcactcccggaatgaagacggaggaaagttgtcacttccgtcgacaactcgaaaacaatcaacatcgcctttcaacgctcgagtgagagagcgagaggcggcagggaggtcaaagggaaaagctccagcggtgctttctagagaagcgttcaaagtgaagaaagagtgaggctccccaaagtgaaaaatgcgaaaggaaacgcacacaagactcgaaagaaggctacaagaggaaagagagagttcaaatctctggacaaccaagggtgtgcgccgcattagagaagactccgcaggtttcttccgcatgcagtggatatatagcggcgcaaaatcgaagactctgccgcagcaccaccggggaatttcgggtgtctagacagttgaacaaagaaagcgagaagaaaacaggagttgcgcgaacgatcttttcccctcgatagaaagtggacattcgttgcgagacaactcggaaaaacgcacaccgctcaccagcgagacagcgaatggtcgcgagccaagacacactgggggaaagcgttcaacggaccttctgtaaaaagttctttctcaaatgcagttttcctttcgcgctgctttccattgcttcaccaacctcctctccgctattgttccgcttctcctgtgcgaacgcaagtttctctctggcgccagattgccgcaagcgatgtcggcgcattttggattatgtaggcaggcctctgtaggattgcagagcgacgaaatacagatacatgaacaggcagacatgtggatgctgaagaagagacgtttgtgcgcactggaaagctgatgtaggacaacaactgtta

SEQ ID NO: 3847 - DNA, 4278 bp, Toxoplasma gondii
  source 1..4278: mol_type = genomic DNA
cgtcatgccaagtaaccggtacgcaagtgcgttttaaactgcacagcctggacctccttcttctgtccgttcttcctttacaccaacaggaaagacgatccgttgggagagcggcgggacgagcactgacacgcttctcagttttgaaggtgatcagctatcgagatggtcctcctctacaactgcgttacgaactgttgtttcgttggaatagcagttaaccgttcccgctaactgaagtgtctctctggatggctgcggtcacacaggcctccattctccaaagctgctcacccatttcgtcggcgacaattgcgccgacaccattgaggtaatggtcaatgagccagagaaccccatcttcctggtatgagtggagcacattcccagcagagttttggacgccctgaagtccccgaatctcctttcgcctcctttctgcgagtccactttcaacttgctgtctccgttcgacggaggagagaaacgaggacagctttgacaccagctggttcacagcgagttcatcgtccacctctccagtctcctcttccgtgtcaaagtcttcagttgtgtcccacatgttcaccccggcaaagaatctgaggcaacgctgagttctaaaccagatcggtaattctttctgttggttcaggaagcgagagcaagagccttgcaaggcgcactccggttggaactgcgcgttttgtggtacagaccaccaggaggggaaaagcaacaagttcttagaggtcgcgagacccaactgataagagcatttcacatcgaagaacggggttgtcaaacagtggagggaaatgagtaaacatcagaagcgttaagcagaaacgatttagatagtcggttcacaacgagcgaaagatcccagcttctcgtcgccctctttgccagggtaacatcggacctgccttggcaaagcttctgcagaaacgttcacgcgacatttttgaaaaggagactgccggatttattaattgaaaatcaacgtggctttagcagtgcatacaccgggagcttttcctcgacgaaatatcacagctggcggggaggttggccggctctggcgccacaagaccaacaccaaagatacaagcgcaccagtacggaacatgtggaagatggaactttttcaagacgtcggttaagtcaaatacgaaagagaaaggagattcctcgagtaaggagacaaaaccagctgaattgtcttggtatcgactcgcctacgtgttctattaacgcgtgcatgcactgaaacgcttgtgtcatcttgtgagagtcaggcaacatcgatagcaacgtctggggaagagtgcgtgtatgttaagaaaattggtaaattcatcggtgacgatgcagtcttagtgaaaaataaatgggggtgtctccgttttttactgcacacgtggttcatcagttccttcgactaccgagccagttctttgccttgtaccctcctttgtgcactgaatgagtccctgcacgaaaaagccgttaagggtgtttttgcgtttaaatgatcgacgatccccgatatatcgctttgtgcaaaagaagaaacaggtatgtacggggtgaaagaacgggcttagttctccaattatttcctgtttctcaagagaagcatcatttggactgttacagggttccgagatcctcgcccagtaagggcaaagcctcacacattgcctagctagaagcgccttcagctcacaaaggaatcataccgatttcgaaaggaatgtgtaactgcatcgtgtccgagaatcgtcgaaggcggagaaacagcaagtcgcggttgtgttccacaggctcacagccaattcagtcggaagtgactgcgggaagcacttctcaggttccgagtttgtgtccacaaattattccccagtttcctgcaagatctcagagtttccttagcaggggaaacaaacttcatgtataaatactttcagggttgattttgaatctaaacgcatggtaccgctcgtgttcagtttaggcaatggtaatcgataaacttcatacgaagtgatttctttgctagcgtggggatcgcatgcttccgcggcaccctgatttggaaaaactcggaagcaggtgcatctctgcacaagttcttagatgcagatgcgtgcaagaacccttccgcatgcctaagattgcaaaagtgtcccagccatgttgttcatagagaaggcttatgggaaacgcggcaaaaatccgctccactctactcatcagcaaatgtcctgctatgcggagattttggtggcaacacaaggagtcctttctttattctggaacgacggaaagagacgatttactagctgctctttttcgcaacgccggatggtaaacggggattttacctatttattgtatagatggatactgtttacagattcagagggaacgggtttacgacgaataaaggaggcatgacattgctgttaactgtcctgcgaattagctctctgcgaccttttgcagaactattcaagaacacaagcagcagccctgacaacctgtggcagacgtggactttatataacaaaagttacagctctgcaaagcgatgcattcaacttccgtccgctccgatgtttagatgcctttgtatccggcctcaaagtctctagacaaccccgagtcgtggttctagggtgaaaattttccaactctccgagtgagcgaaggcaacgaaagggcaaaagatgcacaaacaaaagccttcagcttttctagatctgttgccgaataaccacccctgccacactcttcgaccctgtagaagccagcacctcttcggccatcgaacctgtgtcacttcctgtggcaggcatgtttatggcaagcgtagtcgcaaaggccgccaaagtccacacggcgcttactccaagtggtgtcacaacggggttcgatagtgaaatctctgccactagcacctacgcttttcggtaaatgaatgctgcactggcatttcaaccagtgccacggagttacgcgcagcagcttctcgtggaggatccccatcaaaccgtgagataacaacccccgtttcgaagttttgactttgagcctcgccgagcagtgtgtcaagcggaacggtagtgacggactgataaggtcgtggaagcagccgcagctcaaaagcccgccatttgaagaagaacgagtgcgtcgggattcgaaccccctttgctgcagacagtctctaaaagacgaaacatggaggtctgtgaagacttttacgagaaaaaatgcaaaggtgatgaggaggaaggagagaagagaagcatgatgttttcttgtctgtttgtcagcccttactctccgcgtattgttgcgtgtttcagcgaacagtaatcatgagacgtgtggctgtccggtgaggcagtagcacacgacgctaacacgtgcagtgtgacgttgcatttccttggttagccaccccctgaaatgaaagaaacacacgtttgaactgaaagcggtgtcatattaaaaaacacatgacgaaaaagcttccgcgtcatcaccgcttcgaactgttacctgcatgcgcttgtgttcaagaagctgaaccctaccagggggtccgagaaagagcgggcgtgtgaggaccaagttgcatggcggaatttgaagtgccacataattccttttcatatgctgcaaatggttacaacgcaaaagcagatctgttgtgaggggggaccgtggttgcgtcgggaacgtgtgcaaccgggcgggtcgccacgtgcagctacatcgtcttaatcgagtgtagatatttcgccttcgttgcccgcttcaagatgtgccgtaattggactcacgaatgtcgcgtttcagctgtgttttgtctggcgcgtgtttgtcgccacaagacgcctagttggaggccggttctagcggtctagtcagagcgtatgtgcaccgaatcccgccttgtggctcatcagatgccgcttcttcgtttcggctgctgctcctatgcatgcggccgttttttttagctttccatctattcgtcgtcgttttgtcggttcatgatcgcaaaacataggttctcattttggctctggatacgagacaccgcgcgacgtgctgattcgtgaatcccttgtcgcctgaggagtgaccatgccattccatccttccgacggtttgtgcaaggcacctcacacttcactcgctcctcaggacttcctcccggaggcgcatctctgcgtcgtcccttcatagaattactattca

SEQ ID NO: 3848 - DNA, 1688 bp, Toxoplasma gondii
  source 1..1688: mol_type = genomic DNA
cagacagctcatctgccttccatatgtaaaggcagtcaccagtggatttctctttccctgtaacagcacttagcattgggcctgctgacacagatgtaatcattgtgggcagccctttcaccttgcacagtcctggagcttccaagaagggacactggactggcaccgtattttgtggcgttccgtccatggtgtcctctctgggcttgtaaaacaccttctctgagtgaatagttatttgggaaggcgatcgcctggtgactgtcgatacgttcgaagaccactgcatcaacgaaggaggcggactgaacttcggtgcacatccagcggtgagaacctcacctcgtttagttaaaaagatggtgtgccacattccgcacgaaacttgctttactggatccggtatcggtacaagctgggggacggacatactttcggtggatgaaaggcccagctgtccatgcaagtttaagccgaagcagtaaacgcggccgtctgaagaaactgccgcggcatgagcgaagccacctgccacgctaacccacgaagaaatattccctggtgtgcataccctggtggggactagtgcgtcttcttttgagttaatgccaagctgcccatatttatttgatccccaagcaagtagaatagaaccactttcatttttttggtcggtccctcctgaatcttcttggtcattgtcttctagggcgaaagagaagtcatagccagcgaaaacgcggatacgctttgaagtacagtcttggacaggcacaataactggtgtcacttcatctgttaagcgcccagttcctagctgaccgtgatggtttttgccatatgagaagatcttgcccgtgtcggtacttaacagaacgtggctgagaccgcatgcaacacacacgactcgcccgtaacatgatagaatggtgtgggtcagagggttggtcacgcgatgacgaacgactgatgccgtgttgttgtgcgcggtatcgtcagaaaacgttgttgagcaggtttgccttccaaagaaggaagagaaaacttggctgttgagcgaggaatccaccgagacaatggtaaagaagtcctcgcacgctgagacggtaccaagaattgcgagctcgcctgacaaagtaggatgttgaggtaacgacagcgagtttccatctgcagccctcacaaaatacgaaagtggtttgctaaaatagcatgggacgtcgctgtcaagattgtcatctctattgaatgaccgcggcgagggctccgactcaggacactctttctgtagaggaatgcacctgcgggagcacgtttttttgtgctccacgcttctcatcacaaacatcggttctccagaaattcccatcatcctatccagatacagaaaagtactcttctgtggcgtccaaacttgtgcttccatattccttgcgaaagtttggtgtttcaagacactgcatgcggggatttgtaaacgggtagcgtgcggtactgtggcggtggtagtgtaactgttcatacaccggaagctagagcggcatacgtgaattatccgctgcgttgtgtggccgctatgcagcgcccaagttgtacaacttatatcctcgtcccctgtgtcgctgaataagcatttatcacagctcttaaaagtcgatataacgagctgtgaggtacccttttcacaa

SEQ ID NO: 3849 - DNA, 2055 bp, Toxoplasma gondii
  source 1..2055: mol_type = genomic DNA
atgtcctatattcttgctggttgcgtaaagagggtctctcgcggcgaaccaggaaagtgtcattgcggcaacagggggtgtggccgttgggttcatgccgtatttcgtcgaatggcagcttccgtcgcgacatacgcatgtgtcttgttcccgaggtcaaaaagatgcgctcgatcaggtggcacgtgctcgtggtctagaggtctgggtggtgagtccctggttatgctgtgtttctccaccgctgtgccttgtcgtcttttaggcctgtttaaggcggtgtctaacatacatatggagaaagcgtccacaccctttggcttttgaggaaacaccctttcctccatggtgactggagcacaactgcgttgtttgttgttgttttgctagtggtctagcgactgttctatacccattccacaaaaggttaaacactgcaaccatctctaataaggccgttgtcctttgcagaaattccggaacagacattcatatcgcaaaacgcatcacgttaggcgcccaagcaccatcgttataacataccactgtattctcacttctgtcgctgcacgagctgcttgtttctccaacgatatttcgtatcgtcgttgtgtgcccagtggagccgctgaagagcgagttgtgctccgtgcctagttgttatctcaattcatgcagctgcaggggttcattccgaaggtgttagtcggcgaaaagagacaattacgttagacatggcgaaaccagggcaagcacgcctcaatcccagaattccagaaaggtggtttagggtctatggctctacttgaatagccgtaaggctgcgctgtgagttcggtattctggggggccttgcccctgaccgcaagccgatttcaagccccaagcttgcctgaagaagaaagaatattcacttgtttggtgtgctttgaagccatacggatagaatccggtagtctaagcaaagcagtagagtgaggttcactgacctgcccatccacgtggagtatcgccgagactaagctcagaaaactggtgcaagtagacagaacccctgcagccagtcctagcacgccgcagtatccatagtttgcgtatagagcttgagccaagttccaagaagagtaatggctgaaattacatgttattgccttcatatcaaataggcgaaaatgtgtgaggaaagatacagtgccaaaaatgataggtgcccacaaatcacaaatgtctcccggattaagaagaaacagctttcgacgccataactcgtcgttcaggtcgtcgagcaagttctccgttggccactgcagcgatggtgaggctttgagaattcggacaactccggtggcaatcgttagtgaacccgcagcgagtccacagatgcacacaaggtgagagagacgctggacgcggggctcagctgcacttttcggcggcggcgttttcgggtcagtcgacagtggcaagaaggcctgtggagatggcttctcaatggtcgcgtcgcgggactctgggagagacctcggaggcaacacgtttcctgatatcggcgacggcatgtaaaccgttggcgcaccaggggactccgtcggaaggcactcttcatggtcgtacgggaaaaatgaagcgagaccgtacggctgtcgtggagtagagctacacatcatgcccgcttctgtcccgtggaacaaggaagagaacacagatgtcaaaacgagaccaggtcaccgaccgttacgtttaacgtgctgggctacgggccccagggccggccgtctgctgcagtgtgtttccacgcgtctttgctcgagatgaacaaatacactagctgaatactgagaacgcaagctgttcagtgaaacacgtttttttagtgatgctcatcggtacagtacaacagtcaggagcttccaggtgtctaacagggatgggcagcgcatacacccgaggtgcagtggcaaatgcgtgtgaactttcaaagcgaacctgatttctttcacagaatcccacagtgacaattgccagtctaaacgctgaaccagcaggaggcagaaa

SEQ ID NO: 3850 - DNA, 2203 bp, Toxoplasma gondii
  source 1..2203: mol_type = genomic DNA
gaaggtgacagaagaatacgggagccacagtacgtctgagaccttggcgctggtaactcgccaggcgcttccgcagcagcgcagccgctcggcctccttgttgctctccgcctcccggagacagaaactcccatttcccctccagggcagggtcgacctgcgactcgtacgaggccgcagagtagacagcccagtctgcgtcgcgcatctcccgccgcaaactcgtctgcgcatgcgacgggtgactgccgtctgtcccggaaccgagccgcgccggatctccaacctctggggtctctccctgggcggcagagacgcccgcggctgcgtcggaggcttgcgcgtgcacctcggggagacgtttcgagcgcagagaaggttcgtcgaagttttcgaggtctgcgaggacgtcagaatcttcgtcggggaattcgggaggcccaggagaaggaaaggggacggcagagacgctgagagaaggcgcgcttccccccgacggcgccggcgacgctggcgaggggagcgcctcctcgagggcagaagcctccggatctgtttccaagacttccatctggacagtcaagaaagagaagcgcttcgctggaaacaaggaaaagccagatgcgaagtcgtcgtctttgggccgccgcactttgtagaggggaacggagaaaagggaggacaggacgggggggaaacgacgagagaacggagagatttgccagtggaaaacggagggcgagacctcaggggaggggggagaaaaaacggacaagggaagtcaagaaaacagaaagctagtcgcgaatagaaacggctacaggtgaggagacagtgcgtggaggaggaccagacgagccccgattatggagggtgaaaggaagggagataatcctggagagaaacgagggaaaaagacgaaaacaggctagaggcttgttcaaaattgccgctttcaaatggttgcattacaccctgggacaagaagaaacagccgagaaaagaacgcgagcaaaggtcaactccagcgtagatcaccccaagtcgacagtcccccaagtgaagcgtctatcgatcaggtgcctataaaagcgaggaaatctcgagaaaaactttcttcctccgtggatgcgtaggcagatcctcctgcttttcgctttgcttgctgcttctgtgcatgtcgattgccagcgcgcgctttcatctcttctgtgcatgcgcagatcggtctctggcgggtgtagtgtacagtgccgtcggcaaaaaagcaaaagacaaggagcggtggtgcgtcgcttttgcagactgcgcgaatttcctgaaggaagacaagtctttccattttttccctgtccatacaactctagggacagcacacttctctgggaaaatccagtgaaatgcacgtctcttttgcgcaggaactcgttccggccgatcgtctcgattcccgacagcgcgtgctggatcctctcgggtgtacgtacgtacacccgaggttgggggctagctgtctttcgctgccgtttctcgatttagggggatgcatagatgcttttttgtggcggactttaattacacattgtttccacgctttccacttttgtgtcctcatctgatgaacggcagtcggcggcaaacatcggggtttcgagcgcgagtccacgtcgtatcgattctacccaccgccgggcaaagcgacgctgcgccgtctctgccgtcggtttctccatcgttctggcgtgcactcggcagttttcatttccagtttcccccgcgtttcctccctctttccacgcgcgtcgcttcccaattcgattttcacccgtaaattcccctccagagcttttaactggcgcgtcgcgtacagagccgagaggcgcactgtatccagctggacgggtgtggtgtcgctgcggcgtcgctgggcaagctgtccgatcgcagcttttcgagtttttgaggcattccccgtttcgtctgtttgtgtgtgtattctggttcggatttcacactttggaacaccacgccgagtctgggagtccccgcttcgacggtggtaaaacccccgtgtgacgacgttttgagaccggtagagcgtagaacccgctgcacggaagacgctctgcagacgttttctgcgtctgcagttcgcccaagtctcgactgcttttcttcaaatcttcccagaggttgtgcaaga

SEQ ID NO: 3851 - DNA, 2629 bp, Toxoplasma gondii
  source 1..2629: mol_type = genomic DNA
gtgtgttcagggacgcgagtgtgcactcatttgatccattgacaaaggccgtcctatgcgatagtacagcgaagtcatgcctaggaaaaggataaactggcggctcttggtttgccagctctccttcctgtttttttccatccctgcatgcacgtcgccacttcaggcgacagcacgactttgcgttcagcacattagtctctgtcccctcaaccgactctggcagacgactgtcacacttgcgaccccgtctctcagttgcatactcggtgggggcataccaatcgtctccgcattcacggaggttttggcactgggtactgcaggcggtttccacttgccgcgtcctccgcttgcttctctgtaggcactcagcaacgtttcctttctttctatacgtcatttgtgagagggacagggaagtcgcctcggtgctaaggtgcccgttcctcaggctgtcgaaaaaaagtgccgtctctgaggctgtctccccagcgtcagctgaaccagcagcatggagacgatgaggcattctttcccgcacacttcgcctggatacacttgcttcgtcaccagttctcgacattgtgcgaggctacagtttcgacgactgtttacgggggcgctactcggccgcgaacaaatgggcatcgtcgacaccaatcctatgtgacctgtggcgaacacgcgaccacctccccagtgctggcggagagaggcgaagaaagtgtgaggaagaaaatgcttacagtcgtcgacttcgcgggggcaacctgccttgccacgagattgtcagtggcccaccacctggactagggaaaccacggcagtcgtggtacaaaccaacgcgtgctaaaaaccggaccaccgcttggagggttcttatcacagacaattcaaccagaaggaaaaacacatccgctgcttcattcttcgataaaagtaaaccacaggtcaatgagcacaagagttggcatgccggtgtatgcttcagttacgttgccgatgtttccaccacatgtcgcgtggccggagacaacgaagacatccagcttctaacagagtgacacctactgtctgcaccgtagttactaagagataatcgtataccctgaaaaaataaaccacatcggaaggtgattctacggaaacaagttcgatacgaaaacgagtgagattcttgagagctcccccttcgtggacggcgcatgcaacaggatggccggcaccacgccgtcgcccggtgtcctcgcgtggccagtgggagcaggtcactcctcctgacgacctagcatctccgttgaacttgtacaagcatgctgcccgagaggaaaaaaacaatgcaacacagcagcttgtcaagacaatctgactcgcttcatcgtttctttgcagtatcaccaaccatcaccccagtcttcaacctgatttctgcaagcaagcctactacatttcctttgtcacgagcgcttttctacctcagatagtcaatctagccgcacaccacgtcgagatgtggcagtatgcgtggtatcaggccgtacagcgtgagcgcagagaaatgagccacaaacccacacacactttcaatccggtgacaacataatctttcataatcgatagtaggcttctttatgctttcaaacacattaaagaacgagccgacgtctcagttggagccttccgtgtcctgaaccgtgggtgcctttctttttcacactacggcactcctgtgattacccgctgcctgcgccgacggggcagcggcgagttccgtgtccacagttccagagggtctgcgtacggtcgtcgcggaggtgagattaaaaacctgggatcatccgtggttcctcttcgcaccgctccaggaccaagtcttttactgatgtgtttctgtcgaaatcgaggtccaatttcctcttgaaaattcggtccggggacctccgggacggcttattccgtttcgcagacgctgccgcgaagaaagtgcatgagattcagggaaccacagtatccccttcgttttgaaatgctcaaaagacgagttaaaattcctagaatttgccgttggaaaaggatcgaaacatgtacctggatgtgaaattgtggtttactgaagtttaggaacaattcctaatttagccttccgccacgcttgtgtcgtgttgctgacacagttgggggtttggtctctccctcgcaacgaaatcctgtcttgcctttttttcttgcgatttctcgtgtcagttgctggttatcttccgagaaactacctcactcgtgtcttggacagtggagttctcgaacctacctcgcaaggaggttttctttttcaaaaatctcagcttcggccccggtgacggggaagtgttttggacgtattcccggtttattctgctgaagaggatctcacaccagatttcatatgagcgccctgtgccaagatttctagtgtcacacgtagtcacaccagggccttacagcggacgctttttttgtccctaagcgtcggtgaggtacgggtaacaccactgcggtgcggctggataacttgcttcattgtagacgatctgtccattcttgtgaccgtacggcaattttcgtatcagtaaacataaagagtttacaa

SEQ ID NO: 3852 - DNA, 1964 bp, Toxoplasma gondii
  source 1..1964: mol_type = genomic DNA
aacatctccaggcttgttctctttgtgattgtgtctcacggtgtcgtcgccgcctgttagactccttcttctttctcctggctgtctctcgtgctatgcttcaagcaaaatacatcttttttgcagtaaattggcggcgacatcacactttgctacgtaacgaaatctaggcgtatatacggaggcaatcctgctgatgactacagtgccaagcacaaacgtgaacgccgggtcgcgtcttcattttcctctccttcattatttctgtgccttcgtctcctgcttccttctcgtttctcttctccgtccttcttgggtcagaggctctgagtttttcttaggaaagtaaaaaaacagttcatcgaacaaaggcaactctgccttgaaaagcctggaggttcagacacatcactgataaaagcaaatgcacgttcctttcgcaccttcttgcggcgagaatcgtcccgcatcttctcggggtcggtcttctcgcggcttctcgctttctctgcgccttaaagcctctcccggcttcgacggggagagaagcagaaggagacagagagacacagccgcgaagattctccaagaatatctctccttcattctcctctgcgtccctgaggagcctcaggaaagagaagaggcaaccgacccagcggagatcaaaacagagaagagacagcagaacagagcgcaagggagacaggagggagagaaagggagacggatggggcaggagacgcagagacaggacgaaacgaaggaagaatggcgaaagggcaagcgaacaaagaagacagaaggaaaagaagacagaggagggacagccgcgaagagctgaagctagaaaagagacactgagagaggcagcgtccaagagaagtccacagggacagcagagaagggagatggaagacagaaaacaagacgacagaggaggacaccaaacgccgaaagaggcgaggagcgaaaaaatctaaggagacacagcgaatgggagacggcgagagacagcgacagagccagcgacagggccccggagacacggggctggggattgacgagacagcgaacagagggaaggagaagccagaaaggggaaaggaagcaacacaggccgagaatgcggaaacacagggagacgaagcacgctaaaaaagacaacgaagacagagtgagacgaggaaagggcctcaaggtgaaaccggactttacagcctcgcacaagcactgggcgtggaagagaggagaaaccgagtcagcacagggttcctccgttccctcttctgctcataaccttcacgtctcggaacggcacctttgtactgctgttcgtgcctcttttttctgccagaaaaaacgagagaaacccgcaaaaacgttctgtctcattggcgaagccctcgcgcatgcacacacagaaagtcgtcgagatgcgcaaagcagcagcgggagtgtcgaactgcatctgcaaaggcgggagcggagagactctccacttgtcgatatctctcagaaactttctttgctcgcgacagaggcttcagagaaagttccctcttctcacccccatcgtacaagcgcgcgagctgcccgtctcgcctccagcgaacgagacggcgcggaaacgcaggcttcgtccgtttcagtcgagtccaccacgcagaaacgagaacaagaaagcttctcaaagcacctgcagactctgtgttgaaaggagagatacttccttcctcttgtcaaggggagggagagtgcaggggaggcaacgccttctttccaggtgtggtatcttgtagacaggtagagttttttatccgagagctaatcgccgacttccctcggtcggagccagctgcttgtgttcgaatcctttcggagtcttctcttgtctctgcaagtagccgcttcgcgcgtctgtccagaaccgtctcgccgagaaaaggcctctttccccagaa

SEQ ID NO: 3853 - DNA, 1584 bp, Toxoplasma gondii
  source 1..1584: mol_type = genomic DNA
gtctttcggacttccgacatcgaaagacccacttgagaacgttccagcccgcctgcacgtgctccctcttctttggaagccctcggtatgcctggctcgcccccttttggtttatgtcaaggaaagggaagccgtcagtggtggcggtgcatgatgcacatcatcgtgatggaatattcgttttgtccgcactcaggtctgttgtgtcactttttagctgtctactatcaaaactgatcctccgctacaaatctaattagggtccgtcgggtccctatgactggatatctcgttttccttgcatatgcgaatgtgaagatggagcaagaaataaggacaacggacccccgataaacgcgtcacataccatggcagctattggaaggatgatcgtatcgcatactagcgaaccgcccgtctgattatctagagtcgcaagagtctccgctgcgcctttctggatacatccagcgattcagtcgccgctgaggcgcaggttgttcgtgtccgtcaggagatgtcggcttgcctagaacccaagaaactccccaattctagaactaataaatcatgggcaacggtggaagattgtagagttacagaattccagaatcgagagccgcttctctcaactgaggcaaccatagaaccaattgagaacactcacacagcaaactgacaaaggtgggacgtaacaaaagcacacgtaagcacttttttgtattaacttccgacaacattcatgaaaaacggaggatccagcggtcgtcgacggcgctgtaagatctgccaagagaatgtttgatggtttctacaggagaaatgtctacctgtagcaccccatctacaagattcgacatgctatggtcttaatccagagaggattctcaggtctaaaggaacagaagagaagatgacatgtagaacagctgtgtgcagtctaacatccttcgttgcggcttcatcctgagcaataactcgcaagccgaactccatttcctgaatagatgcgtcgctgcttgaaatcaatactctttttgccatctatttggaggcggtcagcagacggtgagcatggttccaaattctcttgcatggttatggtttaaggtgaagtgtttttttgccagctgtcggcggtgcgcagctcaccacgggattcggaacctatggacgaaactgtgctgatccgaaattccggtgccaggcacctatctcacggggagagacccttgcgactcctgggtagacagagcttgacaggacagggttttcacctggcgattcacaacagggagtggcggtgtagccgataggataattgcagttttattagttacgctcgcccgagaccggccgttgcctttcaggtcctcacggctagaggagttacgctgcatcaagttgaacatcgacggagtttggttctcaaacattacggcggcactcaagccggtccagagaccacacagtactaaagaaatgtacgggagcttatgcccgtagtgatctgtcataacgcacatacgtggtcgaaggttttatcctggcgtagatacgtttttttctaaagctcttcgacga

SEQ ID NO: 3854 - DNA, 2440 bp, Toxoplasma gondii
  source 1..2440: mol_type = genomic DNA
ttggcagccttacctttgcctttcgctacctgttttgttgcaatttctttcttagaggccggcttggtctccgccggtttagccgctttggcttctttggccgcttttccagacttatctagagctggctttgtcagagcggccttcgtgcccgtgggctttggcgcaggcttgacaaaaggttttttctcgggggcagcggcatcatgacctaggacttttttggcaaccgggactggtttgggtggaggggctttcacaggtccaccgggccctggtttcttcagaccccctgccggtgaaaccggtataagtggtttcttgacgacaatgttcggtttctttagtggtgtcggtggaattaccatcttcggcggagctgccgccatggctgccagcacctagagaatggagagacagcgtgaatgctccagacaatccgtgcggcttatcacaccctcggtaaggcggatacagcctgcaagactctctcaaaggaaggcatgttcgccagtcgaccacatcctcctattggagcgatatcatgaagcctcttaactcgaaatccccgttttaaactcatccgtttgcagacgcctgcccatgaacagtaaacagtgactatcaagcgccagcggcacttgcttctgccttctgcggatgaagtctgccgtggaacgcagccggaaaggtcacttaaacgagctataagacctgacagggaggagatatgaactctcacggatgtgaacccatcaagaatttcagttgcgtaagcaagaaacgatacattgtagcctattatcgacacccagtccacgacacaaggcgccagtatgttctgccaacggcgcagagccgacgcacaagccaaggggttcagtcatccgagacctgtgtgttactagtctttccggagttagacgtaccgccaagcgtaacaatagaaggagctccagaaaactgagaagcgttgaaagagagcgtagctccgtgatgaagagtgaatgacacccttcaaccgttgagctagatctgcgttgcgccatgtacggagtaacaactcgggtttccggccccactacataaagtagacaacggaagaatatccggcagggagacacggagtcataaattcaaaccaacaaagacagcctctgacttcttggaagtggaaggtgaacctgtcgtgaaaaaccgcttgtcttacacgcatgcggccagcgagcgcaagctacggctgttgaagtgtacgcagaagctatcgtggctctgggtcatatgcgttgcagtattgttcgtgtctacagattccatttttatattttgaatcgcggtattttgtcatatgcgccacgaaagggcgaggagtatttccgcaaaggagacacatggcagccacatggtaggttcttctgttgctcattcctcgcagagcacgggtgggagaactcgaagacggcacagaccacagcgtcgctgagcgagaggcggagggttcggcgagcggaattcttgctacaattgtctctacgactgcaggggttttgcgagctccttgtgggcgggattttttatctcccggttcgctgctgttttagccatagttactgtgggaactggttagtactctacataaaagggtaactagggaacacggggggccgtaaacctcaattcttgtgcgtggcaccgaacatgggccgtgccttcccggcccagattcgcccagagagccttccatgattcagcatggaaaaactttaaccgaaactctctatgaacgtgttttccgcggatgagcatgctaggtgcatctgaacacaaacttaaggtgaaattcccaaaaataacgtagtggggctttacccaggcggctgcgcgctagctatctcggcgagagacaaggcaaatcggggagtccggcgctcgtagccgccgccaggactgacgacgggtaaagcaaaaccccctgcttgttgcccggttctccgagcctgttgctgacgggtagtgggcacgtatttccaggtcgaccttcactgtagaggtgtgctcgtcctagcaacttgtttataaacttagcgtaagtcgtggatgcatcgcgtagtgaaaagcgctaatagaggagtgctgctgctcggtaaattttgtagagcactcccctaccgggcttcgtcgattgttggtatgacagaggttgcaggatctcctggagtcatcgagccccacgcttgcgcgagaaattgcggaaaggttcccttgtcatgagaattcgtggagaaattcccccgtcatgagaatatcttgagtaaaacgaagaagggaaaggcgacccagttgctattcagcgagctggcgctgacctccagtcacccccgcagcaagatctgagagacgttaccttctggagcatctgtctcctacgtttgaacagaaa

SEQ ID NO: 3855 - DNA, 2715 bp, Toxoplasma gondii
  source 1..2715: mol_type = genomic DNA
atgaatctacgaatcccggtaaatatgtgtctgtgtctctaccctcacgtctggttgcaccctcacctagggtacatatatttttgtatggccctcgtttttttgtgatatttcgatgtgagtttttcggtgtgtacgaggctgcgctcgtaggtctcgaggggggagagcactgggattgttgtctgttgatttgcgttcagcgtttcttcgcgcggaccgaggcctggcttcaggctcaccttttctgtgcccttgacgatgaagtagccgccagggtcgaaagggcactcgccgagtctctgcaaggtttgaggatccttgccgtggaggacgcagacgcggcttcggagcatgacggggatcgagccgatttccacatgctttctgcggatgatttcgtcgcctttgctgtactccgcgtcgacgaagaccggcgccgcgtaggtgatttcgcgggtgcggcaaatccgcggtgtgagtctctgcagaatcatgccttcctcgtagcgcggcgttccgacggagatgttgaggaactcgatgaagaacgacgggtcgacgtcgctcttcacgagccgattggaaggcgcgcggagaatgttctgcagctcagtgtccacgaagaaattgtacgactcaatgtgttggtgcaccagtcccttcgccgcgaagaaggccggaagcaagcgccatttgtccggcacagtgcagacaggcttccccgacgcgtaaggatctgccacagtcgcattacaagaagaagaagaatcggcgctcttcttcggaacggaggcaaatcgaacgctcttcttcgcgcggccgccctcctcgcgcgtctccagagaagctggggacgccggaggaacggcagaaggaacggcagaaggagcggcagaaggcgacgaagaaggccgcgagctcgcagaggaacgacccccaggtgggcgacagtaggggattcttcggtcggaaggaacgctcgcgccgtagggaaacctcagcctcgtcgacgaagagggagaagaggcggaggcatcaccagacgtcttctcgctctcgttttgcgtcgtgtctctccagttcttcagacctccgaggcgaggcgagagggaggcaagagggtcaacctcacccgagacgacggccgcaggcgccggagagactcgcttcttcccagtcatctcgacagacggagaacagcgactctccatcggggagaagaggacagagactccttcacaacaggaaatccattttctgctcggtcgctctctctgtccgcgcctgtttccacgcgactctcctgcttctctgctggcgttccaaggacgagaagaagacgcgagaagcgtttttggacggaaagaagcaaacaaagatccgccagcaaggagaaacgaacatcaccgccggtagggacgggagagcgcggttgacaaggtgcggaagaaattcgaggagcttcgagttcctcctcagcgagttttaacggaaaaaaacagagactcaaggcttgccagatggtcgtcacgaaaaggcagtcaaacgccttttgacatctgcggcaaaaaatacagttctcggactctttcagttctctttgagttccttctcctctccccgcagccgcgagcggaggagagacagcgcttcgtcgctcgacgcctcgcccccccccagaaagagggaaggactagagcccctcaactctcaagggagagaaaaacaacaaaaaagcttgctttcgaaattgaaaaacgaaaaaaaaggaacaagtcgtgagaaaagaaacatgaaaggtatcctgaatgtataccgtggggatggcttttatgctcacaccccactgggagtgaacagagaggagaggcgtttcgctttctctgcgctgtctctttcttctagaaccttctttgctcgtatacgaagacctaaacgtttttctgtcttctctccctcgactctctctggggaagtcttggactctaggctttctctgtcctctatttatcggcattccctcttcctttctctcttcctttctctcttcctgtttctctttcttgttctcttcttcttctcctcttcttctctttcttcttctctttcttcttttcttcctcacgagctgggcgcggctgagtgttacgcgttcttcttttctcgctgcggctgtcgtaaatcactcgagtgaactcttgtgctggaactccagcgtctctcgacagactttttttgcagggcaattcgctttctgcatccttcagaatctccttcttggaaggactttttctttctctccccgccctctccttcactgctcagctggtgctgttctggcctgtctcatctgcacacccctgtcagctgcgacgcctttctctcctctcttttttttctgaggcatttctctctctaaaactctctggggtctctcttctttgttggacttccaccgcaacgccaagaccgctcctggcccgctctgtctgcatctgtttcttccttttcttccctcctctttcttttctccgttgttcttcttctcctcttctctctgcgcttctctctctgttcttctctctctgttcttctctctctgttctcctctctccgatctctgcccttctctcttcttcggcctgccttctctgctctcgtcgcccacgcaggcttttttctctctgtactcgagttcttccccgagaacaa

SEQ ID NO: 3856 - DNA, 3045 bp, Toxoplasma gondii
  source 1..3045: mol_type = genomic DNA
agaaagggagagataggccaaaggcagacgcacgacagagtcctcgcggcgtgctctggtcgtcagcatcgagcccatggtttcccgcgtctgatgcacaatcgaaggaagccgcgaagtgtagactttcttccggggcctctcgcagtcttcgcggcgaatgttgaaggcaacaccccgcgctacacgagacgaatttcgagggtgaatcgtcatcgacaaggaagaacgggcctcgcggcgacggaggcagcacgtcggtggtagggcggaaggacgcatcgtggcccggagggcacaaagaaggagacgctctgtgggcgaagctggctgttgagtggtggaagagcagagaaggcgggacacactccgtgcgcgatctcggcgcatcgccaaccaatctctctgtcgcatgacgagcagccgacgagtgagcaaaacacagggacggccagacgtcgcgggcatttggttgactgcaaggccccgtctcagactccaggggagaagaaagggaagcgagaaggggggtacgacagaccccagcttcgggaccgagagggaggctaaatgagcctgccatggctgcggcggcgctttcgaatgctgccgtgccacgactcgatcgaaacgaagcttgtctttgagttccaagctcttcgtctcccttttggggaggggacgcaggcgaagaaggcccgcctcccagggggacgacggggtgagggccgccttcgcgagaagacggcgacatatcactgttgtctttgcatccccagacacacagcgtggcacccagcctggccacaaggaagcaactgacgaagtgaacgcacagaacgaaagcgaagacacttcgcggcaaggcaactcacccaagtctcgcgccactctctctctaggcgagatcggaccaaggtacggacgtaaagtttgcacctagttgactcatcaagttaaactgaggagttcggtgtttacagactgtaccgttacgttatcccccaaagagcattcagtgatcgtgtctacgaaatgtggttagatcacctaaccagcacgatccggctgctcgggaacaactgaagcaagatgacgactctcgctttcaatgtgaagggacttccccctagagcgaaggccgatccgacagggtagagcaaggagactgacactacgtaggcaaaaactaaggagatagcgccaacagtttggccatgacgggggaacaggaaatgaacggaaacaaatacgacaatagaggagagaagatcaagcgaaccacagcaacaaaccagtaaggatttgccctcccgtgcgaggcagcgaacagccgttgagcagagtgtgacgcaagcgaaggaaatggtcgtaacacaggaaagatattggaatacgaaacacaggcatgatacgagaaaagaaatactgtggagaaggtgaggagaaaagagggatacccaggaaataaatgtgaagagtagttcccaaccatctagtgatgaaatgagcgctggatgatgttccacaacatgctcgcgaataaaggaacacaccaagagggaaactggaagtcgacgaaaagacacgtcaaagagaagcttacaaggaaaggatcagaagccctcaaaaatagtgttctttaagggaaactcgcgaacaggacaaatgaaccgagcgcagggacacaactgacacacacaggaaattaggatatacccggcgtagggccaggagtcttcgaagggacggaagacagatgatggtacaaacatcaaagtctgttagtactgcgacgttcatatatatatatatatatatatatatattacacggttaaatggactcggactcgttgcgtgcatgtgtgtaaacatctgtgcacaagtgcaggaaattctctttgggaggaacagatgagtaacgagacaaatgaggagataggcgacgtctgtcctcgccgcaaaaagaatgggtcgagggctgtgtcgcgatgttgaagcgcgatttgtcgccaacggccgaccggagcgttggcacctaatggctcgatgtggcctcgcatgtgcatccggggaaaaagaagctatgtccactaggactgcaggaagaaagcttgtcgtcctgcatggaataaacgctcacagattcggtttgaaaaccagcagtctgttgtccgtcttttgatctcgcgccgtctctgtgagggttgaaacgagccgcgcaggtaggcagcaggctcagaagagacacagggaagagaggtactgaatctttacttccctccttccactgccttcatcttctgaagccatttcgccctctcgcctcaatctccaagaaaaaaccaaacctggtctcgtaactactccctggttgtgaggcgctttccccctctagcgctgtcgcgacctttcgctcccgcttcctctgtctcgggtgactgcgcagtttttttacggcctcggagcatgcgcatccgcagtcgcaaactgcattctgaaacccaacccaagtatcatccccttggtagcaacagcaagaagggaggttcctccaaatttcgttctgttggctgcccttctctgtatacacacgtctgtcggcgacggcctgagttctttggttcccggttttcttccccacgaagtgaatccttggttgtctccttgtcttcttcgttccgtcagcgttgtttcgctttcagtgtggctcctgtgtctttctcgtcttcttcgtggtgaagagaattaccgtttcttcgcaactttccatctttctcagacctgcgcactgactgcttcgccctgcgtagccgctctgtctggccaactgtgaaccaccgggagaaaacaacgcggcggaagtgtggaaagtgtagagagctctgtttatacgatcacgggcagaaaacgtcggctttcattgcggtggatgcgtgtttaagtcgcgaaaatcctccgcagacctagaaagtagtggcccctgggtcctttctgtctagaagctcgcgatttcgtgtttcggctttcccctgcgacaaca

SEQ ID NO: 3857 - DNA, 2463 bp, Toxoplasma gondii
  source 1..2463: mol_type = genomic DNA
ggggtactacctggatgagagacaagttggaaacgacttcgtttcggcgcgggagaaagccttcatcaccgacgctcggccgggcgcgagaagccgcgcagaagggggagacagggagcgacacgaagaagtagacatcgatctggagggcgacgttcccgatgaggtgttcggcaatctcgccgctgaagcaaaggaaatgcgcagaaacaaagagtgaaaaaagtgaacagacgcacccgagaggggagagcagaaagcggaagaagacccgctaggttttcttggtgtggtagggggggaaaggataggaggcagcagtggtgagtctgaagggagctcggttcttctctgttcatgtcccgttaccagcctctgtttctcccctttcgcctccttttcccccgtgcacacacctcgcggacgaaactcggtatccggaaatctaccagtgttcgtcttatgttctgttgctcgtatgtgtttgaagaccgttcgcgttgggaggtgggaactaggcaatctctgaagctagcaaacagtcctgctctgttcgttcagctagaagcaattctgaaagacgagcagactgctgttccgcgcctgccccaaaagcggaggactcacccagtcgttgggcagtcgaagtcacgcggaaagaagtttcgtagaagcgtttgacacccagacactacatctgccttctaaatcgacggctgatgactacgtgttttcctcccgaaaaatccgtaagaaactagcattcgaccagagccactgcgtatacttgtcaagattgccgctatttgcccgtttccgacccccactagctggggtgcacgcattgacgcgacctgaaagatttcgtgaatgtgtctatgcagactcggcccggtggtctcgccaccagaaagagttttctgcatcaggcggaactcgtgcacaagggtgctgaaacgactcgccatggtattgtagcttgacgctgttgacaagattcactattctcgatttcgtagagcaaagactccgaacgaggttcctaccaacacgcggtcttggtgccacaacttgacacacacacacacacacacacttttggtcacgcgtttcagaggggccatttccttctgacaagaaggcctccacttgacagaaagtcggttctcagaagggggggttcgaattcacagcggtacgccgatcgtgcctctggcaacctagatcagtaaaaggtacagcagaggcgttaagatgattggtgtatcgcctaaatgattgcgttttttgcacgttctctcgaaactaaaggtaccggaggaaccccaaacacggtacctccacttcgtgagggcgagcctctggcaggtgtacaaactccgtctggtacgtgtcgcttatccgggtgcttgtctgcttcctttcctttcatgtggattggatttcagtgaagatgtccctacccctgacagacatcgcatgcgtttcatttgagagggctaccgatgaagcagacaaaggcagtgcgcgacgagtaagattcgcgtgtcgcctcgtctctaatgtggcaagacactacaggcagctacgatggcaattgaactggaaggccgccggtgcctactacgcttccttctttacgctgtctgacgttagcagcttctgcagggcgctctttttgtttgtggtttctgcctccattatgtcgtctgttcagaacctctttttgtctatcctagctttgcgggggcaaaacctttttaaggcgcagtagcgcgaaacgcaaacgatgacggctagctgagccgtcgaggagaaccttctcggggcattgcttgagtggttcctcgcatgaatcttggcagcaggcacgtctctgttgtcagccgtacatgccttttggagtttttgcccatttttgtaggggaatgtctctagacccaggacaaaagttcgatcgacggccgaatatggcaccttgcccatctcgcaagtgtgccagaacaagtcgtgcactgggtcgaagcatatttgtggtcaccttccctgttctgtccactaattttgattctcagtgccgtgttcgtctccaaggcaaaggacacatatagaacattcgacgcacaagtcagagcgggggaggcttgttctccgtcgacgtcggcgtttttttctggccctcgatttcacgtacagaacatatccccctcgtgtgagtgacttccgccaaacttccagacggaaaggacaccgcgaaaagcagtcttgcatctgtgtatatagttttaatggtgcctaaacggtaaagagtcagccgttttgtccatgtgctttgtgtctcgctacgtgcgtacaagccgttcgacacgcagtcctttttgtgatgccgctctcccagaacagaatttctccttcatcggtgtgactctgcggtgactacccattgacgaagtttgtggagga

SEQ ID NO: 3858 - DNA, 4779 bp, Toxoplasma gondii
  source 1..4779: mol_type = genomic DNA
tttttcttgtgcaagcgagcaacacacattggagagagaggtggtttcggtgacagccccatcgttttttcaaggatttgtctccctctcgtggttgctcagtggagtggtagtcttcgtgcatgcgtcgtgatgtatttcggtggaatggcgaagacagcaaatgcgcgacatctttgcggtcgtcagtggcatgtggcggcgatggacaaattgcaccaacgtagccgcaagtctctttatcgcaaggtgcaacatgcgcaggtcctgtagacaaaaacgtgggctgagcccttgaagtgtcaccctgttgacacatttattttcaaatcctattgctgactatagctctttaacttttttaaaaaggaaggaaaatggtggtggatgaagagcttcagatacagagatgaatagcgtgttagcaaacccattcatgcaggataatgctgctttcagggagaggttcagcttatgactgactaaactggtgtaacctaatgaaagcgctttatctgcttccacaattcgacgaccaggtggagaagcttgaaaaagtgattcgcgagcccacatcaagggcttgctgaacgcagtcaccaacaagcttcatctgatgccgacgaatgatgctaccgtcaagatgtggttcttctgcgggtcatctgccactggtatggcgttgtgacatccctagtataggacttcacccgttaccgtcttgtgcttccgtgatgaacaaaactgcattttccatagctgtccatgatacgccaataccaactcggcagcagaggagagaactgcgtggcttttctttgcacagatatggatgtctgaaatgctctaatggcttcgttactacctttgtcagagaaaggtttgctggcgtcccttgatgacagtttggtcacggctgctaacctctaaattcggcaggcctggggacatgcatatatatctccgagttgctcttcagcggtggacccttcgcccgccatccttctttatttgatacagaattgcacagcttacgcgaaagacagacaggcggacaagcggaattgatactttactttctttgagagctatagaaaacagagcagagcaatagttgcacttcagcacatcaatgcgcgcacaggtgacttataggggtgtatttgaggaaatcatttatctcgaggtaggcacttgcgagaggaagggtatgctgggcaaggatgttccactacaaccacagatgcgcaggtattttagtatccatttttttagagttgcggttatcgaccctgactcttgccgttataaacatttatttccaacaaagtacgtgcctgcataagggcacacagtacccgcgtgtcttacgggtaccaatgtgctttcgccaagtggtatcatctatgaagcaacgaatacagataccgacagctacctgtgttgtgccccgctggcgacaggaggaaagcgacagttcagctgatgaatataaaatactcgtgcgtatcgcagactggaaagtgcggtagcccgcgggctttgagcaatcaacgtttggttcttccatggttggtgagatagcttggttgtaaaaacaggcggaagattctctgtacactgtttcttccctgttcccgctttgatcgtgtagaaaatccacaactcagcagagcagcaaatttcgagaggcagtaacgtatgagggtaccacgaacagaaacgtttccttacgcagcttggcgatctcccaccacagctgcggtattaagacggtgcaggagaaaaggatgagaaaacactaacgtcaaacagttcatggataggcatcagtcagactgagctacttcaacaatggttttcctgctatacgcgacatctggtttagtggcagaatgctcacgcgtcgacgaacttcaccgcagcgctgagagggagctcttcgattgtgcgctgcatcagtggtttgggaacacctccactacgtccacagactatcgcgtacactgcgccaaggattattacggagatacccaggataacgtcgaccaaacctttctgaaggattacaagtccaatggtcacgtagaacaaaccacgtccaacaggtatataaaagaactgcacgtaagcgaacagtgggagtgctttgacatctgcgatgatggacagcactcccagcatgatcaaaataacattgacggcgagacggagcggatcgaagaatatcataccgacgatgcctgatgatattataacgcctaagagaacaggagacacagttgagccaaaagcagctggcaactccagaggaggaattcgaagagaaaatggaatagtgaataagaatgaaagacaagaagcaaacgacaaggaacacgaagtgctcttcaacagaacgagaagcatgatggcacaccaaaccagacctgctgcgtgacatttacgacgcccttcgtagaaacctggaccagaacacctgctacatctttgcagggcagcagctattcgagcgccaagatgacgagccactctctgggtgttgcgggttactcattcaacagacggattacttcaacagccgaagcaagagagcctctgatctgaaggacggtgcccaggcattacttgaccactctttcggactcgtggaataaggtcgaatcacttacctgcagtaatgaacgaaacaaacgtcatggccgccattgagagccgcacactccgacagcgatcaaggactgcttctgtcgacattttgggagaaaagagaacgtcgaacaaaactttggtttctcacgtcttgactcttctgttcctccgtggcattgccgagacgattaaaaaattgatgagagccccacaacagattcacgaatctatcgaacacacgtgtaaatcccaaaccaactctcttacggatttttcttgtagtactttctgcttctccagggcgagcaaaagaaacacgctttgtccctgacacgagatcagcccctcggcaaatggggaactcacaccccggtttttgagcgatcaacgatggacctcccatcgccggttcagccccgcaggagccctttcggtgacgctactaatgtacttctcgttaatacctaccgttttgtattcccattaatggttctttttgttggcggcttagtgccccaaactgtctctttccagtcttgctggtttacatcatgagtttgtgtgtatcatgtacggccccctgcatgtagcctgacgagcatagtgcgcctagcttccctcttcgtctctgtgcaacttactgatttctttcctccgacagaagagcaaatctctacccttagatgcgttgctgtttcatgcaccgcacatggcaagtaacgaagaagctccatactgtaccggtgtgcattaggaaccggggcgtaaagagcactgcaaacagataggatcaacagatttatcgggcaaaacatacgtggcgaacaagaaccagttgaacgatttacgcacaggcacgctgctagcgagagacagccgacaacctaatgcaacgctccttcacaggactcatagaccactcgataccggcggcctgctgctggctcgtgttggtagataattttcaattcgtccaccagtagctgttgtgcgtgttcgagagacagcatatccttttatggagttatgtaggatggcaacaatatcacagaagcaacggcggggcatgcgagaggaaacgaacatacgagagcaagtagaaaaagctgaaaatcaggtggaaccccatattcggtgatggatgcgtgaggcgaacttcaggagaaagtgtgactcggtgccattttgtttgcttggtccggaatgtgtgtgcaggccgctcctcgctgatgtcattcccaagctgtattcatttcctaagcgtcttatcggaacgcgttcaccaggatatacacaaacgcctaacgagagtgtaattgatgtctggcatttagaggacgtattcactgcttgcgcagctgcagaatatgtcaagccctacgtggagacgcggcaacgcatcaataaactcccgactggaacgacctcatcgtgtgttgagctttgcagcagccatgaagtcattaacaacgacgctgtcgatttgacaattgaaagtatgtgcaaaagctgcacccgtatgggtgatcgtccttcagcactattcatatagctgcgtcctacacccacgcgctgtgcgaccacccgttacagcgactgacacgggacctcagaggatgtgtgtctccctttcttgaattgacgtaggtagtcttttatgctcttcagtcacggaattaccaaaatcatctctgtactgttgggttatggtaagaaccgtggaggctacaggggaggccaagggcgtatctcttttcgcatgtctcgtggttccgacccgcgctgcggcgacttcgcgttgatcctcgcgcatgcaacactgcgggcacaggtaccaactgtaaaattcacgaattacacagtccatttagaatatgaggagctcctttgtggataacatctctttctgaggtcattgggacgtatcgagtgccggctgatgagaagtttagcgttcatgtcgcgaggttgtacgtcttcacgcgcatgcttcgtgtttactgggtaggggggcaacgggccaacgaggatgcttttccagtttaactaaaagtccttctttccgtaaaccgtcccgcgttgtggaccaatgacaccttgaaccctattacgtggctcatacgggga

SEQ ID NO: 3859 - DNA, 2092 bp, Toxoplasma gondii
  source 1..2092: mol_type = genomic DNA
cctccaaacaaaccaccgctgcgtctattgggaaccattatctggaggcagttcaaaaagccgcctcgataccaccctcctccgtgtttcaacaggcccacaatgtctacacgggctggagacggcttagcgcagacaccacatctcctccgaacgacagctgccagagattcaatgcacagatcgatttcgtttctgttcgtcgatgacaggcccagagctcggcaagtgtagaccccctttccacattggcagtgcctcgctgctgaatcagagagtttcccttgccgcagcatttccacactgcctcaaaacctcgggtcgccttcgttactcccttcagtcacgacaagaggcgcgacgcattggtgtggctggcgcaagactgcatgcccgcctggtcggtcgtttctaggtttccacaggtcgtcacttctgtgcaagaagagcgcttatcggttcgctgagaactcgcaggaaaggaggtaggagaggaaaaagggagaggcgccactcacctgggaggtcgtccttatcgatccgaaccatcttgcggtaggcgcgagcagaagcggagatcaggggggacgtgacgggcgccgaaaagccgcgatagacaccctggttaaaggggaaaaggccggggaagagaaaacgacgagaaggactgaggagccggttaggggaactccgtgactgcgtaagggagaaaaatgtgaagaaaaagtgaccccccacaagctttgcgactggggaccagacagaggcttcgagagacagagggaaaaaccgggagtgggctacggaaacgaaggacgaaatggaaccggtgacggataagagagacaggcggagaacggcaacgcgtcgtgggggctgaaaaacgattcaaagtaccataaatctctcagtggcgaggcgggaaagtcggggctgccccggtgaaaatttccgccgcaagactgacaccttctggcgatgccagattgagaaaaagaaaagacctcgaaagtcctcggtcccgtcgcgcgcgatttccagccagcaaacacgccaaaaaaccctgcagcgctttcccctcagaactctcgcgcacacgacacaaccttcattcgctcgtgctttccactcccctgaattgagcactgagtgcatgcatgcgaaaagaccgtgtgccccccttgtgagggaaaccccagcaacgtgcagcatttcgccagccagtccttgcagggcatcgcgcgcgaccttctacctcgtgttaccgtagcccccccgaaacagccgatacgccgtccaaaccggaaactgggcggcgtttgagcggctttctctgcatggcgtggaaagaaggggcttcttcgccgagacgaagagacaagaaaggatcccaatacctctcctagaatggcttttgcacagggtgaagcggaagtgagaaagaagagctgtacacaaaacggaaaaaacggactcggcaaatttgcgggtagagtcttccgcgttcgcagcgacttgggctgctcgtacgctgcagcggcgccgagagagtgtgtcgcgaaatcctgaacgcgatccatatctgtagggaaataccgcgtttcgctcttctttcgccacaacagcaaacataccgctgcctgagacttctcggccgtcaacacgcagtttaaaacgtctctaccaagcttactcgacacttccgtatcactcaatccagcaaccgaatagcttgctgtacactaccagacacactgccgctttcatgatgtaaaaccaacatcactttctctgtgtctgttctgtatcttcaagagatttcgaatactctttgctgggtgggggtgtatgagatcccacgggttcggtcttgaccaggccgcgacaaggcatttccttccctcgtacctggcacatttccatccgctttccctgatttctaaattttctccaccaaaccgtcattgctccgggcgccctcctctgccgttgcaccgtccagacgtccgcggcgactgcgggtccactgggagggattggccatcgtcctgaccgagagaacatcacttactctttcttcccgagcccacca

SEQ ID NO: 3860 - DNA, 4012 bp, Toxoplasma gondii
  source 1..4012: mol_type = genomic DNA
agtccacccagagacgcagcagaagatttttgttactcccaattctcggggtcagtacttcctcgagggcttcgttatgagtgcatgcgtgactgcctgcgggcttgctgctgcttttcttgtctttttgccttcttcgtttttcccgactcgccaagagctagccggtgaggctgggacgccggactgcgagacgggaaagaaggggagcgtgcaagcgctggcgcgccccccccgtctttgtcctatagatgaagaggacagtggaaacagatccacgagttttgacgtggaattggaagctggtgaaagccatggcagaggtgacgtgtccagtggcacgctcagggaggctagctgttcgggagagcaaaacagcagcggtgtgtgtggagcaaggaaaagcaaagacacaaggaacggaggaaaggcggtttctgatggagaacgacatggaacagatgaagcaattctgcactggatagatgcagaacacagcctaaatcgcgaccagggggaaggcttgaacttgtgggcgacccgcgtttgcatgctcatatgtctgctcatgacagcctttgcatttgttgcgtctgcaagtcttgtgttccaggtgtaccggcaaaaagccccgtggtacacagtcccgttctttcctccaccagaatacaagcgcggccccatgagagcggatcgaggcaacgaactgtgaggctccgagacgaaatagggttgacatcaaacaaaatgcttcgaaggttgacactgaaacgtgtcatgttttctaccgtgggatggtgctatactcaattccgctcaagggactgcagtggtaaaattgtggggcaaggaaaaacctagtcaccggagaaccgggaaggtgatgccacaagtgtgtggaattatctcctgtagtaaagatatgttacaaagccgccatcaaggatttttttcgggttgtttccgtgccaaacgcagccgtcacgcaatccggtgagactcgagacggaggatcagaagtcagctatctaggcttgcacaccacatcacatgcgattgattgcttgcttgaccctcagcagcccggaacattcacgaaaatcgtcaacgtcggagcagctttgttcgacgtagacgcactgcaccagatttgcgctatctccaacggtgggaagacgacaacatgctagtctacacatctcaagacgttttcgtggacacaaccggggcgactggcatgacactgaaaggagttgccaacattcccgagtaattcggtgaaccgatgaagtttgttcagaggacggtgtcttttttgctggcaactttctatggcatccagagtcaggactgggtggtggattagtgtgtgtccgcatccgtgtgcgtaccaccctccgctgttattcacgaacatgtttccgaatcaaaatgtgccccacttttcgaactagaaacagtctttgtgtttgccatcacccgtcagaccagtggtggcggctgccataattaatgcagcggtaccggacgcagaagcccggctcctatagaggctgcagcagcctcttcttccacattaatttcatggaaaacctcaacttcgcacgtctgattcacattcagctgataggaggcaatcatccaatatatacgtatccatcgcatgttcagtctaagcggggattcgtaggcggtagggacatccaaagctgccactggtggtgaaggcgcatgatgtcgcaggagctttgtgaaatatttctgtctaatcgatctacgtctgttgcattatccaggacattaccgaatcaatatgcggttccctatgacagtaacctcacataacggtggtcacaacagtataagagtccacagaggggcggggctatccgctctgccatgttcacgaagccttgtcaccctctatgacgaacttgttgattggtactgagttgtctgggtgtgatagatgtatcaaaccgaaaaccgatttgttagaagatgaatccagtccagtgcgacgggcatttagcatccgttattaacatatcacgatacaagacaccttctgcatccctttcggcacgttaagttgaaccctcgcgacggcgacgaacgcctgggaaagtaccactgtccagttgccgagttctcacccttctgggtcgttacgaggaaccccgcaaatggagcgtctcttcgccgggctagttgtctcaagcttcgtgactgtcgtgaccgcggaaaagatttaacaccaggcaatatctttgttttttaaggaaatctgtgttgggccgaagtagttggaggtgtagagaggccacgacgtagtatttttttttgggaagcacgccaggaccctgtaccagacgcgctcttgcaaccgcgcagcacccggagacaggctgggaagcaagttctcatagtcgcattcttcaagcaactcaactggggtacctcggttcgcagacacgaactggaagagggttaggcgagagtcgacacttcagaggaagtcagcttttttctggtgtctgcggtgaagttttgagggtgaaggagacgccatttgttaccttctgtcggaggaaactactttcacttggaatgtgtctaggctctgcagagcgcgcgaaccggaagcggattcctcgtgccggcttgcttgtctgggtgtctggcatttaacacccactttcaaacctttacaggttggttccgtcttcgcatgtggcagaaatgctttataaaactctcgctgaaattgtttcctcgtcttggggcttggggggactccgggtcttcctcccttttgcaggacgggcaacggcttgccagcgaacccatcccggacaacggaacacctgacccaggccgccagcgatctggcgattgctccgacacagtttcctcggtttattctcttcgtctcatgtgagactccaatttgaaatctgtagaaatacgtgcgacgtaggctcctagtggctctctctgggactctagagagacttgttcgtaccctcgccgaccggaagacgtcctggcggtgctgccgctttgactgctggcgttgagccggttgcccccacaaaacatgtctagttgctgcaaagacagcttgtatttttacgcgactccgactgtaattgggattgtgacaagcgtacttgtcgattctgcgggacctgaaatagcttgagattctttccgcggcggacgtctgcctagggaatatctcgaattagccgtcacactcgtacttgtgataggttccgtgtgtctttcatggtaagtaaagaccttctctgtcacttggtgcgcttggaaactggatttttctgcctctttgccgttgacgagtcaacttttgcctcgatgacccgaaccacggtcaaaataagacagccaagagctgtctgtgaggaaacaggtgtgtcttcaacctgggggcctgaggcattgcgtgtttcctctcattgtcggatgtcggttatagaatagtatgtactttacctattctagcaggtgggttacttgtaattctattaaatttacttaagctgtgttgttcgcggttccgtcggtccttcactgaggaggcaactgccacttaaaacctcgcgtcactgacgctcaactctcattatggattttgcatgatcgtatctgtgtgatctgctctctccggatgtaccaaggcggaaatccaggagccgtgtggaaggaatgccagatctgtggtacctccgctctatgaggaacaaaaattggtggcctgcgtaacgaggttcctctcgaaagacaggaatcggtgtgccggacgactgaagcgccaaaaactactgaaaggaaacacaaaattgtgccggtgggcccgtcaggttcaatgacttccgtgcttgtcctgtgcttgtgtcaggacgcttctagaagccacctgaacaaagacgataggcattccaaacggagttttttccttctgccacttttttgtgtgtatggacaa

SEQ ID NO: 3861 - DNA, 1930 bp, Toxoplasma gondii
  source 1..1930: mol_type = genomic DNA
aggaactcgaggcgcgtcatgtctgcgcagagatactccattactggcgggagaggaggagagcgaggagaagaaggagagcgaggagaagaaggagagcgaggagaagaaggagagcgaggagaagaaggagatcgaggagaagaaggagagcgaggagaaggagacggagaagaagacgaagaaggaggcgagggagaagacgaagaaggaggcgagggagaagacaggtacttcctgatgcattccctttcgtgtcgacgtttggcttgaagcactgtgcggctgaagtcgagattgaagacgaacggcattccacttgccactagcgcatcgctgagttcgctgttgccgcagcccactgtgaggacgagcatagacggacggaggagaggaagcagaagcggtagcagagactctggagactccagccattcgtagtgcttctctgctgcaaatctgaagacgcagaagagaccgggaacccacagaacaggagagaaatgcaaggacagcaagaagagctgcagcgagagaacggggaaagagacgccccgggcgcgaggagcgtctgcacaagtcagcagcagcagaaaaagacgaagaagcgacagaagtctgcttttttctagcgactcgctggagaaacaactgctagctactgcgagaggcgcccaaaaagaaagtcaagaagacacacagggcgaagaacaaaggctacgcctccaaggcaatcttctccgcctaaaacgagagagaaatctgtacctttcttcccagtattcctgctttgcgtaggccgagttcctccgaggcaactgtcgagccgtccccttttcctccattttcctgaacactctgaattcaaaatggcagaagcaagagagagaagagaggacaagaggggagaagcgagaagaaaaaggagaagaagaaaagagaagaaaaaggagaagaagaaagtagggaagacgggagaagaaagaaacgcgagagatgcgcaaaagtccagagaaggggaagaatcgactgagagacacgcagaagaagagggagaagacgcaaaagacgatgcatgccccgtgaagaggcaggcgagagcgccggagaaagaaaggtgcagaaacgacagacagaaaggagagcgaaccagatcaagaagaatggcagaaggcgaggcagatgctcatcttccccccaggcaaagcggaaaaggcacagttggagactccccacggcgacggcgagagaggaaagcagaagatgtttcttcttcttttcttcgccttttcgagtgcggacaacggcaacttacgaaagcgaatcgctgcgtttcttcgactcagagagagacgggagagagagactcaaagacgtctcgctttctgcagtgtatcgatgcagctggctggtttccggcttcttttctccgcggtgtctccaagacgcagacagctcgagggatccggccgccgctgcctcctcgatccttcccgtggttgagatcttccgagccagttcacctgcttgccaagagagaacttgactgcggtttacctcacaagactccaagacctgtctttctcccctcggtccccagctttctcagcgaaacggagacaccccccgcctccgcaaaagcgagcacacagaacgacatctggctgctttcgcgcgttttcttttttctgtcgcgctttgcatcaattttctctgactcttctccatctcgttctctgtcgctcttcctccctctgtctctcggcctctccggtttttgtcacgttctccctcactgtcggtcttctcctgtctccctttgttccagtctctccccgaaatcgttttttttcgctttttcccgtctttctcctcttccttttcccccgtctgtctctgtccctttcgatgtttttctgaggtctcccca

SEQ ID NO: 3862 - DNA, 2609 bp, Toxoplasma gondii
  source 1..2609: mol_type = genomic DNA
tctctccagatctatcggtctgtcttatgttcttgtagcttggagcccgtctccgagatacagtggatgaaggatggacggaaatgagttttttgtgtgattcgtctgatagtattcaccgaatgtgtttcagctcttggcgtcctttgtggctaggcgttcttctgaacgttccgactcaaccgcaattttcttacgattttcgcttctactccacggtcaccatcgttgaaaccagaacgagtggaaccatgcagttcgcagttggtgaaacaaagaccttcgagagagctaaatgagtgaacaaagtctcagaatcttcactccccagaaaatgctgaacatccgctcttgtctcagagaagattattccccgtgcgacggttctgctcctacgagcatctgagtgatcgctttctctcgctattgatgagagtgcaggagttttgcgtcagttatctaatttcttgacctaataccacctgggtggaataaaacatgtctcggcatcgctcgcgctcaaagtttccccgcagcatttacaatttgccttcgctttataaatttttgaaagacacttgatcgaatcggctttaccccggtgaacaataacttttgcagattcatagtctctttcgactgacaaagcagacatcaatccgcactgtagaatctgtacctcggaaaagatttgacctttctttatcgtatgagtcactttgaaaatggactcactgtacaaaaaacgtaatgtttcagggatttatcgaattaattttagtgccgcgtaagagggcgggcagcgtgtgtcaggcagcccaggtccaggcgacattccagcaaatgtagtttatcttctttcttgctacgggattttcaacccgagtaaaagcttgtgtcatagcctcatcacagtaagaagagaaatactttaactgctgtctccgagatccgcaacttgtgttttttttattttcaaagcgcgaatcccagatctgtaaggaacgacgcaaatgtcccgacgccaccggcttttacaggaattaatcctaccaacagagttcattaatggtaataggaaatatgatgttgcgcgagttctgcgaaaaaggttgcattacgaggaccatggtcaaccgttcaacaaggaggcttgactcgtgcagaacaccggtggcattcagcttctggaaaccggacaagctgcacagaaagtggcctttcgttcagctgggaaaagccaaacggggaaaggcgcccagagagcatttcgtggtgactcgcatgtcgacaacgagagaaactctttttagtcgtccagaaaaatccgtagggtgtgtgccataaaacttgcacctaattagcgcagcgtaattaagataaggcgaaaacgaaaccccacatttttgtcgtaaagaacatgatatcttacagaaggcgcatttttgatgagttttccatcaaggcgaccctctgttgggtcgagcggggtctcgagacaccaatcccggagacccagtttcaatcttcagcatgggcagcgcttgtcgacatgggtctcttgaaggtagaagcatccggactgttgacatatctttattttcattcaggagatgtcaacacaaatatatgtgtagccgacgaaaacggtgttttttcacctgctctgcaccagcctagaacgccagcgagtggccggcgcatctccagtgtgcatgcgtttgagactaggaccccgagtagtcactcgtccttttcaacggcctgtcaacacattcagccgaattgatcgaccaacatttgtgcgaggaggcacaaagaaatgtctgtctgtcgtccctttcctccattacacactccgcacactcctacctgagacatgtcaacaagcgcgctgacatgtccgtccgtgtgtatcgagcatgttgtaacgccggcgtacagcgcttgatgccgactgggcgttttctctcacaaatttcggcgttttgcttttcgtttgaagttccttcaagtgcgttcatcacatcggactgtattagtctctcgacgtctctgtcgccttgtttgtttgaatctgtcgtcttcatgggttccaaagtcgcagaccacgctggcgaccgccacagatcacccgttattctacgattgcctggttggagggagggttacttgatttccgcttggatctgttgtttctcttcttaactactcattaattgagacacagccttccccgaaggccctcccgtcgtgcttctctcactgaacaacccagtttaacacacaagtacacagtctgctgctgcaaacgggtcttccccgttgagtctgacatctcggagtgaacatccgcaactttgtcagcttgtacatcctggacttccctcacctacctcaccggcaatttcacagtcaactactcaagcttcatccctcgtgtaggagtctacacggctttgtttactctttttgaacactgtctctcgtttccgctccacctgatactttgcttcccggccgatggttttcgtcgtccacacacttttttcatcgtgttcacttgccgagactcatcgttcgtttccttcttccagttttttctccaa

SEQ ID NO: 3863 - DNA, 1265 bp, Toxoplasma gondii
  source 1..1265: mol_type = genomic DNA
ctgaaatagaggaagcgctgcttgggatagccgataaccttgtccgtacaccagctttgcatatatatatataaataaataaaggccaagtttcagattttaggtgggcatcaacgccaaccagcaagcatctcactgtctggtggcggctgccagaaacaacaaaaaacaacactttgatgatatctcttgtttcctatttccttgctgagtctcctcttgccttgcgatccgcaatgtggctatcgttttcagcagctgttccacgctttaaatgccaagaattctttgggacagatagaagaccggttccgctaccgaggtcggttgcgcgcatcggtgatacgagtcccagaagcgccatcaagcgccattgttctcgcccttgtaacgcccttctttgccttctgtgactctcctgtgtcgtcttcaagtccattgacagcatgtaactcagcaccagccgcaacgtgtgtttcctctcttcgacgccaatgcataaacggcaaaccggcgccgaataggtggcagcgaagagccacgcacaatggaagagattggtgtgagaaaagcgctgatatactaggaagaagaggtcctcgaatgaagcgacgatgagcctcaggatctcgaaccatcatcgaggtcgagtttttgttcattctttaatggaaaggcgcgtacacgcaacttaattaagactggaattccacgcgccacaccacctcccaagtggaccgtgtaagaccagcgaaagtgttagatctcagtatcgtaccagttttcataccagcttgggagctgcggctatgctctcgggtcgtctacacaaatctattaacatttgccaacttcctgggatctctgaagctcaccgcgtactggaaagcgtgggcgagtcaaagaagagaaacatttatatcctaaccacttgcctcgaatacaaatccggccgcgtcgaccacgggcgttgcttcgttagaacaacatgcttattgactagcgcgagcgccacgccttctgcgcatgcagtttgtttttcttggcgtgagttccgtcgatagagtattctgttgctttgtccctgaatagtctgtgcccgaagaactcgctgaatccttcgcgacatcagcaaatctctttttttcaggtatccgaagctctgtctgttgagtgccgactcctgtttctttggatttcccgcgcatgcaggcatatatgctggcagatcgccgttctccattttctcgccctgagcgcgagca

SEQ ID NO: 3864 - DNA, 2807 bp, Toxoplasma gondii
  source 1..2807: mol_type = genomic DNA
gtgcaagaaacatcagaggcgaaacgccacaagcactccgcacatcgccctccccttcactaccactgcggaacccgcaaacaaattctcctgcagaaggggatgtggcgtttatggagccgcacaagtgtggcgagaaaacacgcgcaaacgagcagggcgacgaatccactagaggcgacagagggtgatctgttgagggtgacgggtctgtggattcaccctccaagtccgccctgtgttgcttaactccactatccgcgacgcggggtgaacgtccagtcgtttgcgagtaatgctcatctgtatgcacatagttatcgacccgcagcgttccctggcctgctactggaacgtaaggggaagttatcggggaagtgtttttgccatcctgtgtctcggttgtctgaatatcagcgcccggtgatattttgcagagcccgcccacgttgcctcccacaaatagagagtgagaatcgcattcctcctctccttcatgccgaaaaacgacgtgcgcaattttttgtggacacgcacacacagatagggatgatgaagacgacaaacagacggaggaaaaaattgggcgaggagaacatggggaagataactcggttgtcgattcacacagactgcccccgcgcatccgggaaaatgacaccgcctcacttgtcgaagcagaagcggtttcttcggtgattgtgccgaccttgccgtgtcccctcggacgccgataagggtgaatcattttggtaggcttccgcaaggtagcacgtgtccgccagtgaaaagcagcgaggcatcagcattgaaacggctttcacactgcactaacaatgccacgactgccgcaggaagaaaatgtttgctaatcttctttaggtagtaggataggcagattaagcaaagacattatattatgattcgcctgagcttgtccactggtatattgagcaggcggacaaattgttctatttcggcgcatgaaacaggaacagagaaccactgttcctacgcagaagttttgcttgtgaacacgcgtcatccggatctttggatacctgggagcccctgctgattgccaagggcagtcgttcgcagtgggacgaattcaatgtgtcggcgctccatcgaatccacagaagcgacaaatataatggcgccgatgtcgaaaaaatcaaaatgatcgactaagaaatgggtgaaatcgtcgccagtacttggcttccagctgtacgtatgtgacaaaagacgagagtcaaagagggagttgaaaaccacattcagcgtctctacgacaaacgggtcacgaaaaaggtcaaaaaacgaggcgcccggagcggctgaggctgctggcaaaccgtcgaagaaagtgtgggaggtatgaaacagcactacagagtgtgtcttattacgcagtcgtattcagcgacgagtgggaaagaggaattgcagaaaaaacgaagactaagtttgtcacgcaggttcgaaaaaacatcctttacagccacggatgtagacaaagctgcgggcgtgctgcgggcaccgtagttgtatgcagtttctgtctagtgggaatacgaaaagtcgagacggttcaaaacaacagcaacatgcaaacgaaaaagtaacagccactgacggggaaggaggccaaacgtctctgtttgccgccacttcaaaagatcacccagagaaagagcacttgcaagtagtttgtgtccaatgtaggactggcaaacaggagggttttccgcggagaaatcggatataaagaactgcctaaagtgaagacttctgtagacttcaagaccatgaaaacgtcggctagacgagtgtatattccgtcaaggcaacctgtgcacgctctcctgtggctcgtgcattgggaccccctcgttagggggccgtctctcagctagtaaggctggaaaacgacgaagcccgtttacagcggcacccaggaccatgaacgcaccaaaacacacaacgggaaaactaggaagaaatttcaaccaattgacctgcacggtcggtgctgctgaatgagcgtagagtttgactcgagattgaggttacgcaaggtcaccaccccaaacatagtatagcgcattgcctctcccggtcgtcgttgagttcggtccaaattacgtaccttgtgcggaaacgctcgctgcaactctcagaaatgaattattcgagaaacatccgcgtgagaagcactgatattagaatctaggccagcgcagcgacgaatctgtatcaattcaacctcccccacggagcaggacaggcctgcgaagttgcggcacacgtagtgtgtctagcgctcaaggacgcgcgcgatcatcatcgcgtccgcgtccgtcgcaggcggaagaagactcgagcaagtcgacagacgccctccttactagttattctaggaaaagaagggaaacagagagaaaaaataaacaagaagccacgcattcctcagtctgcttcgcctcgcgcagtaattcgctcactgtctggaatagaaaaccggtgcggagctgtgccacataagcacggggctcgcgactcgtatgtttttagttcgacaacaatgtcgaccgtttgaagggtgcgggctgtataactgcggaatacttgagagctgcttccgcaatatatgtaaaccatacagcgacgcgagcattaaacggtagatgggggctcgggtgcttcacaacgggcgaatatataatccaggagttgtctgccgtctttccctctcacgaaatgtcagcagcggaggaacacccatttgaggcgtccgcgga

SEQ ID NO: 3865 - DNA, 2134 bp, Toxoplasma gondii
  source 1..2134: mol_type = genomic DNA
gcatggccaagctcagctgcaagtgcaaccaatacaggcaatgaaattcgtcttattactgccccaaactttaccatcaaccaaatctgactttcaacgtgggtttcgcctacacagcatctgctgcattatgctcagttaacgccatagtttcagggtgttgtctggatccccgtaccaggcttgttgttgggcagctgcgaaacaacactgtgattgtcgttcctcgtcacactcaattgccatgacgccagaaaagaggtatttctgctgtgtaggatacatggaaaatgaaggcctacacaagcgggaagggaggcgctaccttaacgccttacaaaatgaaggcttctgctgcagctgctgcctgtccgtatgtttacatctgagcaacccgattctaaatatttgaataccagatctcgatggtacgaagtagagacgtgtctcacggaaatggtggacttgcctgtttaagactttgcaccttggactccaaatcaacgatgcaagcatcgttttcctcctccattgcgtccatgccacgctgctcaaacctgcgcctctcatacccttctttctttctcatcatcggtacgcgcgttgggttgaactagtcagaaagaaaccgcttccacctctatggctctctgaaacgactggtggtctttacgtagctcacacgccagccagccgctttctaccggcggccatccaatatcactgtcttaactctcgctttcttccagtttcgcgttagcgctctgtcctgtgcatgcaaacacgtgggaaagtggacaaataccaaagggaacaagcagaaaaacggatcggggcaaacaggcgcacagcctaccaacgatgtgagggttgcgcggtggaaaacgaagaataacagcaaggcaacgaagagacgactgtcagacgcaggaagtgtgtcacgaagatggacaagtaaaactcgaatacctctcctggaatttgccgggatggcaaaacgaatcctccgaatgccccgaacgtcgcaccgcacggccggtcatcgcacactggtattccaacgctttgaaaaggacagttggatggatcagccgattttgccgtcttaggagactaacagggccgctttgaacgagcggagaagacaggaagaagaacggaacaatgaaaaatagtaccaacaaagatgcataatgctatccgcgcgtgctgcagctttcggactctcaggctggcacgggaaagacactccttgccggcgttttcgggcacacgatgcgttcaatcctatctgttagtccgcttgaaccaagcggatttgtgtctgtcttgaaagtttaggttttgacccgtattgcgggaaggataccgccagatgtgtccaagatgcagacagtcttgatttggaataagagcgttgtggtcactgccgcccaaaccacctcagttctcttcacctgtgaaaaccgttgttcaggaacggaagacagcgagcgaaattctccgcaagaacatccaaaagcattcagagcctggaattagtcgtcgtcctaagccaagccataaaaactgcagccttttcggcttgtcgggccaggactggaaaaagtgtaacaggtcgcagcaaagcgcgacgagctcgagaatgtttgctccgtgcatgcccttaatctctctggggggctggtcgtgtcgcaaagggtgaatcgtccgaggctaagcaattcccaggcgaagtgtcttccggaactctctcagtgacctgacatttaaaatatcatggtgaagcgctttgtcgttttggtaaacgccccctttgttggtggaggagtctttgtctccggccagctcgcatctgcgggaattgcagtgcgtttctcatggatgtgctggaaccccccccagtaaatttacctcgcggaggccttcgggcgcagtcgagccggcagtttcctcattttgagctccacggttttgtgaatgatggtcaacgttggggactttcccctctaacccgagagtagattttgcagcggccacgctggtttagaggacagacacgtgtgtgcggcatttgagggtgcgtgtgactcgtccgcaggggtatgtacctgcatctggagagatgccacga

SEQ ID NO: 3866 - DNA, 3839 bp, Toxoplasma gondii
  source 1..3839: mol_type = genomic DNA
tgtactctctggaagcagaccgtacgaaagatccttgccgcagagagggcagagggagagaaggacaggggaaggaagaaggagaagaagagcgcgtaaagttgtgggggggaagaaaaaacatgacgcccggaagagggaagagaggaggaggagaaacgaacgcgccgagagacagaggaaaggcgcttgggaacgggaaagagagaaaggcgctgtcaaaacgacgacacgaccaaaaacgcggcgcgtttgtcgaaacggagagccgattagaaatacggggagtgagggcgaactgccgagacctcggtgtccaaagaaacgaaactgaccttcctggtatggcaggcgaatcagcgccgtggagcctccacgcggtcgcagagcaccatgagaggaactgaggacggacaatcagagacagaacgagaagaaaagagagagcaaggaagacagatcggggtgggagagaagtcaccttcatcgtggggagttcgcattgttgttgacggggaacgcatctcagaaagctcgtgcatcacccgtagtggtatccagcgtatatttgaaaatccagcttttatagacaagctgcaaaaaaatcatgatattcactttggtagtctccttcctagtgttagtctggacggaatccagggaaacgcggagactgggcaacaacagtagaaggacgaaactggaaggccagctctcgagaaccgtatccgacgaagaagagacagctactcgccttccctctgcggtcggctattcttctgtcggattctgactccggcgaagagacaaaggaaaatagagaagggggcagggaagaaaaaacagaagggagacaaagaaggagataaaggaaagaaaggagacaaagaaggagataaaggaaagaaaggagacaaagaaggagataaaggaaataaaggagacaaagaaggagataaaggaaagaaaggcgacagagaagacatagaaagaaagaaggagggagaaaaagagggggagaaagggggaaagacagaagaatataaagatggagcgggaagaacgtcagagagaaagacgagagacagacagagagatgaagaagggagcgagcgtatgtttcaggagactctttgttgctgcgtcgtggtgcctcgcgggaaggccaaaagcaatgtcaagctcccggaaacaacttttttcctttattgcccttccccatcgatgcaccggttatgacttcttccggttgactgaaacaaggtccagggtgtttaaaaagggtctccaaagaggctggaggcaaatgtcaacaaccttgtgtgtcaactgtttctcgtgttctcgcggcccacgcagaccagaacgggagaaaaaccgagtttcatcactcaatgaagagaggtggaaacaaatggaaaaatgggatgctaagaagcggcggctctgccacagtgcacaaagaattttaccataggagccagcggggtcgagactagcggcgtggattcgcatttctgtcggtaaatcgatggttgtttcgacctgcgatacccaagcccttcaaaggagatgcgttaaatgtcaggaaacgaaaagacaaaggggaatttatggtactcgaaagcgatctttttggaagcgacggcaggcgaatcgtcccttgtcttgtcaacgcggcatgtcgtccgtatacaggggggggcgggtccgacgcgcttcttctgggtttggagaaaagttttcagacgtcacaaggcctggatatttctgtggagaacaacttttccagttgtctcgtctttattttacagacaatttttctcaacgctgagtctcttcaccgtgcacattattccgcttcgggtgtgaagtgggcgggaaggatggggcacacaaggtcagaagatacgttttacactgtttgcgcggtaactactgctggaggaactcggcgaaaagtagctgaatatactgctgttgactagttgctagcaccccatgcgcctccttggccttggcagtggaaagcaattcgttagctgtgagcggcttgtgaagcgtcgggtgtagcgctgtgtatagaactgcgccagcgaaccgtctacattggtgttagcagtatttgctggaaacagacgcagcgcgtgaatgctctcttgcttgccattgacggagcaacgtattcggaagtcttcgcacgtagtcagcgtgaggtttaaacgtcatgcaaccaaggaagggggcactcacgtgaagcgggacgcaagaagctgcaactttcgaaggcgtatggtcgctctcaagacagctactaaatggagagaccaagcctcgttcgtacggtgatcgttcacagcttagcactcacctgttcgttcgggcactgctaggacgccatatatacactctaaggaggatcacgtgtcgctctaactcgacgaacacaaagttaggctggaaacgcgagaagcggataatacgccttgttacactagtttatgtaaacggtaactactatggaaaactgactgagaaaggcgttcaatatcaagtgttctagcatgcgaaagcaacggaggaaatctctcaggctaggtgtgtgactcgggctgtccagcattccaatggcgacgtgttggaaggctgttccatggttggttcacgaatcggatgagcatccatatacctagataatgaccactggactttcagcagagctacgccagtgggtttcaggtgtctcaatccccaacatggtgatagtattctattttgtggtacccaaacgcccaaccgcgaagaccttccgcggtttcgagccggcgggtaagctggcccagcctgtgctatcatcgtgcacctgatgcgagcccatggggacgtcgaaacgaatgcaccaccgtccctcagttcagtcgaaatcaagtgcagctctttcaaatctattatatccccggactgaactcctggtcctcccctcactgtttcttcctccgcgagtaccctcggaaactaggactcggtttgcaacgtttcttgtaccaggatcttggtctggttactgaactgacgggcgatggtcgatgctaggaaagcgtacgacgcgctggtgctagtttctgtcccttcttcacttatgcgttttagtacgtgtcgcaaacaagcaatgccttgtgactctcatgcgtgtgcgtgttgatttggtctcccaccttgccccttgttttgcagcgaggatcttgcgaaggcccgtatgggacgaccatcgccacctctacactatcgacgcgtcgctgttttatccggtcgtgtttgtccaccgggttcgcggcggtctcggggcgtccgaagctgagtgttccgcgtccatagcaagcgggagggacgtggtccacccgcctttccacgtggcgtcaccgttgtgtgggaatgccgtacgggtttcccagtgacggcaagcggcaatgaaattaaagataactaagtgtcatgtgctgtggtttcccattattataggctgtcgggatttgcgtacgacggctaccagggcaagtgaccacgagtactgtttgcgtcgccgtgacgacacgacgtactgccaatagtggagcttacgagggctacacgtcgtgacttcgtgtggaagggttgcgtactaagtgtggagcctggtttgtaaaacgcaaactactgtctgggacatcgtgatggttcaaggcatgttctatgcatcaaccgctgaggcagctgcaacatcctagtcctgtgggagagccgccagagagaaaatcatcaaaccggtggaaagcccttgtcgaatgtctcagcttccaaga

SEQ ID NO: 3867 - DNA, 4301 bp, Toxoplasma gondii
  source 1..4301: mol_type = genomic DNA
aaagctgatgagcgacccgacgttgttcgcgaatgcaacaaactctgagacttccatcgttgggacgtcaaatttcacgaaagtgtcgggaacaacggccatcaactccacacctgccttttcaagaggtgtgtcgggttccaagatacgaatctgaaagcagtaccccaaacacaaaagcagattaacaagtacgcgctgtaataacaggtcacagcagcaattttggtaaggactcgatttgtggcacttccgcagtttttctagtagcagccattaattacacagtgactcgtagtgtgctctgccattgacgccggttcgtactaaccgattctttgaactcaagagggctgaagtggcctgttcgttgagcatacctcgggtttgcacacaaccttaggtcgcagtgaaaataaggcaccgtcgtggaataactgatgcgtcatccacaatgccttttcgtaattggcggtcacgttgtagttcatgtctcaccttcttttgcgaatacacagccaccttcactttcggaggcggttgtagggtcgttgccggaagaagaaccagtgtgccgtccgcggcatccatctgcttcaagaacgtggcccatccgtcgtagtacttttttctgtcggcgacaaaactgctttgcatatctttctgtagaagaaccatccaaaatggacacatacactagcatcctatcctcacgcaccagcgtctgagtagccacccacacatccagtagagtcgtgtccgtgggaaacgctcgcctcggaacatgtttgctgcgcaacaccagccacccgcacgacttgtgaactgctggagaggcccgctctcaacggaatactccaagtgcttctcggaggtacccagactcgacatacctcaaggccgccgcaaatatgttgaacaccatccttcttctggaacttgaacgcgccaacttcctttttcggctcgatatatgccagcacacctggaccggataaaggcgtgttgctccacttcatgtacatggtaccgccattttcagtagcatacacaagatacactcccataccgagtggagctgtcggttctgccggctccgggagaggacccgtacaggcctcaggagggggtgggggggtccccgcagcagaacccgtgaacagcttcggctggcttttgactgcgctctttgggtgaaccttcgctctcttcttagttacaactctagtacggaccgtcgggccgtctgccgccgcctctctcgtcacctctgctcccgctgaagaaggcgccgtttcgccttcttctatctccacaccatcctctacagcttcttcaccaaaggattcttcatcgacttctttgagggcctcttctgttgttgtagagtctgggactagctcctcctcgtcgatgcgcttccctggcggcgcaggtcggcaacaaacgcacaaatagtaacatcccgagtcagaatagccgggtgacgggttgttgccagacatctcgccctgattgattgtttgccgcaaagctgattgaaaaattgggagcaatagagagcaatcacttttcacggaaggggagagggaggagtaaggggctgagcaccactcaacaatcctcaaactacgagagacgaaatcactgcactagccataccacgccgctcgcgggcctgttacggtacgattcaacgatacttcaattttcgatgaaaggcaaataatatggctttgtgcggaaaaaaagacaaccgtacacagaaatgacagttgccctcccaataattcagacgctatcagcgaatgcactggaagagagggtttagggctggcacacgctagcgggtttgtgcaatcgcgtagtggcgatgtgtgcgatgctgtcacgctgatccagttgttgaaaatttgtagggtgcgacgccgcacactgaatcgccggttggcgagcaaagaaatgacaaatgtctttgaatgatggccaccgtgtgtcaatctgctgccatcgtgttacggggctataaacacacttgcctcgtgaggcggccactagccttgccatttttcgccgtgtagattccgagaacctgctggcaaaactgaccgcagctcgcgggacggaaagaaagcaggtctaataatcattgttaatctgcatccggtcacaggtcagatgcctgtatataatgaaaccctttgttgggtgcccatactcatattgcagaggcaagcagtccgtgctcacgaggaaggcagcaggaaagcttttgagcctttaagagtaaccatttgaacaagtcgttgactacagcaacttcacaactgtagactaaaagatggtgacaccatcaatctgggcgtccagcccgctgaaactccatagccacccgaggtgcacaacaacagcggttctcgacggagaaactgtccagaagaggttttcaccatccacatctctggggaacgttcgccgtccaccgtatccagaagtatgattttcgagtggcacttgcgctctgtttccgcaacgaaactacgaccggtgcccgcaatactgcttgtggcgaacaggcagtagcttctgaatcgctgcagtgttggtggatgtggataaagtcgtccattgctgactcttcaggctgtagtaatacggcattcagccactgaattcttctaccttgtgtgttgaaggcgctgtaatctttgaatgccgtcagtagtagctgcaatggcgcgattggggattgttgaaccctggacacccagactgctcgtgtgctgagggaacttcatcgcgagtttccgcatcttccgtgacactgttacgcacacagacagtgtattggtcagtgtctactttttaacaatcacccgtggagatccacgcgtgccaggtcctcctctatcgctagcacagtgcaacaccttgctgtgcttgcttattcaaaccccggtcgagaagaccggctatcgtcacagaaatccgcactgcttccacttgtgagcgaccttctattcggatctgttgtctgagaaaggggacactgttatttgaaggtgggttcaacgctggcaccggtcgagttttaaagggaaaaccacgagtccgtaaacaggggcactgatgtttacggtatctggtgttttcgctagaactgcatttcgcagtattcgcaagaaattcctagcaatcgcgtccaaaggcgtcttccttaagcttctcatatggaggcttccttgcgctgcaaaccactgagcacgaagccctgacgactagcacgaatgtataaccgcctgttctcgttcccagggagagcaagtcgctgcacccgaacgtcattgattcaatgaaagtgtagttttatactgtacggcgtagactaacgcgtttctctatctcatgtttcaacatcgggaccgaatgttcttgctacaaaagagcattccgaatcccgtgttgagttttcctgtgaaccaactggggagttctttacgttgcaagcagagacaaagaaatattgcttccaccccagctgacatcatgggtggcagtcgtgtgagaaacccagtcggtgacgtctggccaactgagttcttttacgcaatgaagtaacaaacgtatatgtgacaaccgcaagaacccttgaactcagtgcagtagccttttgtgcccacctagtggcgtttccaccctggggaactagtttctctatgccctacagtttacaggactcgttgccacgagaggctacgtaaacccgcattggcactaaactttgagttaagctggttctatcacgttgacaccgctcgttgcatagtgtgcacgcggtaatggggctggcccacaggtgtaggatgttcattgtcgcgtctgtcgtcctggcggacgatagcaattagatcacaggcggaacctacgctcgacaaaggacgggcacagggcacacctgttgtgtggtgtacatacaacctccagaaaaccatcagcgtgaacccttgctgatgaagctgtgtgcacatttccacgctctccggtgacgcctgcctcatttttgccctctctgtgtgtttcattccccccgttttcactcgccccatacgctgttctgcttctggatgaaagcccaccgcacggtgtctgccaaagtgcgcgcatgacacccagtgcacccgggaaatctgtgcgagcagatccgtggcacccaggtcccctcaatttttcctttcctacaaacttttgacattcgcatttgcgacactgttttcgcgttcttttttcccctatccccaaaa

SEQ ID NO: 3868 - DNA, 2270 bp, Toxoplasma gondii
  source 1..2270: mol_type = genomic DNA
cacccgacaaccgaatgaagtaaaagaaagagagggatatattcctgtatacatatatttatatatatgtatatataaatatgcgtatatatatatatatatatatatacatgcatatatgtatatatttatgtaaatcggtatcgaaacgattgtatctggatttccggatacattgtggttgaatgtctttacggcgaaaaacctgtttttttctgtcaatggtggccacttggaacaggtgtacccgttgaaccccatcgtgccgtggttcctccaaagtttcttagcgggcggacgaaagagagaggcaggaacgaaaacgaacaacttaccaacggagaattcttgttcttccccccttgtcaaggaaggaccctggacactgcaagcggtgtagagttcgctcttcaaaagagaaagagccgctgcacacgcaaccagaaggactctcaccgatctacctaaaggtagatacatgcacatacaagtatatatatgtatatatgtatgtatatatatatatatatatgtacaaataaatctatatatatatatatataagtatttatatatgtaggtgggtagatacctggtttgtctgcgaagaaggactgaaaatgaagaagagggatagagtgtgagtgctcttatcgactgctacggaacagcaggtgtgactaacaggaaaacgttgaagctctcgagagcaatcgaccttaggtgcctcagttctgttgacggactaggcatgctgcacatactatgcagagagttttacgtactcatatgtctgagaccttgacttgtagacacgcatacgcttgcatacgggagactgcgattttctcgtttccaatatatcttagacaggtctcgggagcgcggcaccaccaggatattttctgctgtgaaagatttttgcccacacatgcgtgtcaagtgcacgactgtttccagactttcaccgattgttcaaaatcgctgccgctacacaggcgtcgtctttttcaccgactgaggctggctctgccctttcacaagatctaaccttctgtttttccttttacagctttgtctgtttatcaggcgacaccgttggtgactttctctcccgttttccccgtgcttgtcagctccggcagtgttttctttgaggcggtgctcgttcaacgtcgcgtgtctcgcgcgcagtgtggcctcgagctttctgcgttgctgcggttctcagaatggaggtgagagacaactcgcccgcgacctccagagagaaaaaagtaccagaaaaaacaaaaagaccggggggaagccttcggatgtgaacagcacaaaagcgagtgcacgtgagcgacacccgttacgcagaagaagtccgtacgcgaaaacgaggcgagagagggaggacacggcgcgcgcgtttgtgtttcactctcgatttttcttgcatgcaacaagaaaggccgctgcgctttctgccgtcgtttgacgggcgacgaacatgagcgaaacgaatccgagtttctgggtctctctcactttaccttgttgtccgcatctcagttttcccccttcttcgccttctcgcctgtccgcctgtccgccccgctccagtagtgtcgcttgcccggagaatccgctgcgttttctgacactggttccagtcctcttctcgcgttctttgttccactctttagattctccgtcttttcagtttctgcgcgtctcccttgctgtctttttcactttttcaatcgtcgacttcctctgccctcctcgctggacaccgaactctgggcgtcgtcgcgctggcgcctctccgtctccgtcgtgtcgggagaggcgtctctctgcccaccttttccgcgctcttctgtcttctttcttcgtctctcctttttcctttcttcccctcttttccagccgactcctctcccgcctctctgcggcttttttctcgaaacaccgctcggccctgtggcatggtgcggcgcgctcgctgcctcctgggggataacagagagaggacagctgcgctccccgcagttctcgtctctcgtcaccggaacaaagagccttgctctttctctgctgctcggaaaaaccacggggagcgcatggccctcttctctggtggagctcccgagagaacccgaccagcttctcaacacgatccctcgcgctctgccttggagtcgaggtgacggctgtgtcgtcgtcgtctgtttgactgtgcaggaggaccctttgtttttccgcaaaagtcgacacca

SEQ ID NO: 3869 - DNA, 2598 bp, Toxoplasma gondii
  source 1..2598: mol_type = genomic DNA
tgtacgtaccggcgcaagaaagcattttattgatgcggagaacgtggaaggggtggacgcgaatgcggaggtggaagttgtctttaccgcagttcttgatcatgtactgcagaaaggagagacaggaatacatttatgaggtcacggatctcagctgctccgcatacgaagaaggtccctcccgcgagtctgaggcaacagacaggcgcccctgaatacagaacatcgtgcgtgtgtcgatctggtcgcagctgtttatcacccaagaaaaaagaggtgagggtgcgacgaagacaagacaagacggtggagaggcctcactacacctttggagaaagcggggatccagagtcacgttgacgcagagagaagaaaggaaacgtcacttcgaggaacaccacaacaagtcaggaacgaggttcagccgagcggaagcagcggagaagagagaaggcctcgctgaaacaaagaggggcgtccatgaccgagaactgtgcacctcgaactgaagagagacagagaagctacagttctctggccagtgaagcggactcgagtttttttgttccgagtcacagagacgagcgtcaacgcgcggagccagctggcgctttcttggcgatggagccggcctccagcgaccacgcagaagggagcccccacacgcacgagctgcatgcagagaagttgggagagatgggagagtccgcagcgaggatgaaaaagagacaagaagagaaaaacgtttaccttgttcgcgcaaacgcgggccgcctcgagcgcctcagaagaaatctgttcgtactcgtcggagacgaggtgggcgacccccgggaactcgtcgacgtctgccctcttgcgacctgcatcgtagattcggattttcgcgtcggggactccgcgacagaaacgagatttagggtacggcttgttcttgcagtaccggtagcatcgcgcaggacggcgccccattttcgctcggcgaaattcgcaaaaaacggaggacagagactggaaaaaacgcgaacctctcgggtggtgtaggtacacaaggagagacagtgcgcccgagcaggactgtacacgcgacaagagaaacgaaagagaggttgtgtgtctcagcaacggggaaggaaaagcgatttgcggggccgccgacgcggaaacgaacgcaaattcctcggatgatccggttccccgtttctccgcaaaatcccagcatgcacccgcgctgcccccacacaaaactcgaattccaggcgcctcgccgatcggcgtatagacggagaccttcgagcgaaacgcgcgctccccccaagtcaagacagaaggaaccgcgtcaacgtgccttcgatacgttttcgtcaacgaagaagcgcatgcgagacaagcgctcttcgaagagcggcagactgacgaaggcgcttttatggatgtgcagctgacgaggccgccttctaccgacgcgccgcgtcacttctggacgatgcaggcattcgcgtactttacagatgttgctttctgctagagtattcaaagggtgaagaaggtagaaaatagagtaaggaaagtgaatcaatagagtcacaagcggcgaaacgcgctgcggaccgtagctagaggcgacgttcacctctccgacggagactagcgaataaagaagctatttgcaggggagaaaatgaaggcccttcaccgcggctcatggcgtagaagaagaaagagcgacgaaagtgtcttccttggggatgtctccagcgagacaaaagcactggggcagacgagacgacacagatactcttggacatccatctttcatcgagaaaattcgtgctctcagagccaggtgtatgtacacctgaagaggaggaagtgcagatcggacaagcagttttgctttcaagtgtgtgtgggtgtttttcgtttcctcgctgtccactgggaggaaggcattaagcactctgggaggcggcttttctcgagctgaaatagtcggagatggcgttcgcttttcatctgtcctccattccttgcctcttgcttctttccttttattcgaccttctcattctcggcggtctttgcctttctccttgctctctcggcgtcctcttccgcttccgaaaaatactggacgttctcggttaccgccggtgctctgtgtcttcgtccactggttgtcgagtctgtcctccttcggtcacctttctgtctgtttttctcctcaacggatcgaaaccggtcttgcctttctccgacgtcggcctttcgtttctcctgatcttctcgctcacctccattctcgatgcgcatgtttctccactgtgtcctccccaacgtccttcgccccggaggagttctccctcctcgcttgctgccctcttcctgccagtcctcctcgtccgcgttgcttcttcgcttcttcttctcgcttctgttctcttcgtccgccaggtgctccgcgtccgcgttgcttcttcgcttcttcttctcgcttctgttctcttcgtccgccgggtgctctgcgcccagttacttggcgcgagaagctgggctgcgaggagcacacaggggaagacagagagacaagaaagggaga

SEQ ID NO: 3870 - DNA, 2931 bp, Toxoplasma gondii
  source 1..2931: mol_type = genomic DNA
ttatgtatggagtgtcacctacaggtatgtggatatatgtgcgttgctctgtcgaccatctctgtctctttctaagtgtatgtttgtgacgttggagaaccggattctgctcgctgtgcaagagactcactagtcccgtggtctgcctgccgccattgtgcagttgctggggtactttcagaatcgatctttcggcagaaggcgagcagacgaggactggaagccgaggagaaccaggccagagttgccttcgtctgcggagagggaagaccgcgaaaggcggaaggactcgacggggaggagccaaagtggcgaagggggcaagaagacgcgatgcgagagaagaaagtcagaggccagctgtgtacagagggatccgagcgcagagctgcaccctgtccagcggccagtttccgcgcgtcggcctcaggcttgcgcgcgcaagccaccaaaggcgcatgcacctcttgcactctctccgagaagcgacgcgcgcccaaccgcgaaagtcgactggagacgaagctgttgatccggagtgtctagacagaagccgagagcgcgatgcggcgaggggatgaggtcccaacgcgcaggttgaggcgcttcgaattacacagctgcgcgttcaagattcgatgcacacctgcctgcgttctctgcctccgtaaacggttcacagaagatgggagaggagacgaagacgcctactgttcgaggtgacgccgtggaaacgagcactcacgcttcgcgacggttgcagagagccagttgggcggccgcggggagcgggggaagaagggcattcagacaggcgttttttacaattgcacaagacgaggcgagcgcgcgcggaaaggcgcggccgtggagacggcgagcgcgcgagaaggagagcaccagaggaaacggaactcagatacacggaccaactccggcgttttcgagagcgaagagaactgtggcgtttttgcaggtcgcgacgaacaaaggctgaaccagtagagagaacagatgtccgacggagaaggaccggctgagactcacggaagctcgacagcgagaagactggcgtcttcatgtccagcgcagcctcgaatggggtatgaggaagagcgaagatccggttgtccaccgacagaagcttccgagcttcttcaacgcgtttctcataattgctcgcacaaacttctatccgcacagacttacagtctttgcaaagccttgtttgtcgagacttgcttacagaagccggacaggggaagcgagctgttcagatggacatgcagctcggctctcgcgatttctggcgggtgagtgttttcggggagacaggccgaggaaactggagattcatgtcgaagatagatgcgatttgagtttcaagacgtcttcttctcccttctaccgcaagcttctcttgtcttctgcagcctgcgtttcccgactgtcgagcgcctcgcagtcggcactgcacacttccagagaactttccaagaagcttttgaccgggaattctccacgagttgcaggcaaaaaaccaaacgccaacgcgcctctgagaacaaacgcctcgcagccgagcgtcggcttatccaccgtgcaaaatccgaatgcctctctcgcctgcggcaggcgagaagtgaagatgtgacggacggcggcggctctttctccactcactgctctctctgctttccacggatccgagcacacagcagtcgtcggcctcaaaacctttgccccttgcagacaaagagatgtacacctacgcatgcacagatatacttatttgtccgcgagaaaacgtggatgtgcagatggacatcaggcaggcaccgggggggggctctagacgcagctaaaaaaggggagagtttcgcacctgccttcgagcagccgttggaactggagagtttgcagtgtgtacagacgaggatttccggcttttccgcgcgcggagaagagtttgcagaactcggaggagagaagctgttcgacgaggcgcgactttctccagaaaaaggcggcgcgttccaaacgcctgaggaggagcgccgccgcggtcgagaggacggttgcgcgcattcgagagagaaaagaagacctgcaaaagtcgtcgcacacagaacgccgtctcttccgatggacaccatacacactgcgtgctgtcccgcgaaattctgtcgtcctttgcgagaacaccgtgactcctctgaggccagtctgaatctctgtctgctctgcggccgttgagagacccctcaactggtgtggttgtcttgctgcacccttcctgtttcttcgtttttctccacgacctctgtcccgaccttctgcctgtctcagactcgctgtttccacatctctgcgcgcattttctggagaaaaagggctcagcaaagaactccatcgccgcctgtctcgcgaacgcagcaggagagagtcctcgttctcctccgtttcctgctcgcggctatcccgacctacggcctctcttctcgtctctgtcttctcgcgtggttcgctgcctcgctctctttgtcgacacacttgtggaaaaccgcgaggatcttctgctcaaacgtcttccagctcgctctccacgcgtcttgtctggacatggagctcttctgaagacggacagctacctccgttcgccagccaaacttccaaattttctcttctgaagcgaagctctctcgggtgcgcctctctcgctcggtgtcgcgacagctgagctctggagggagtcgagagacgtcgtcttcgagctcttctgctccggtctcaaacgttttctctcctcgacagtccaccgagacaggtcgtcttcggcgacggagaaactccgacggcgacggatcctctgtttctcgtgtgaactcgaagaaaacgacttgaaaacgctttcaccctccctcgccacca

SEQ ID NO: 3871 - DNA, 2398 bp, Toxoplasma gondii
  source 1..2398: mol_type = genomic DNA
tgaaatacctgtcgcctattcactattcgtatgtggctctagctctcaatcaattcccgcctgacgagaaatggggtgattcgtccaacaaggactttctcgagtcctacggaggcatcactaagacagatcttgggttctacattggcatgcttgctctgctcggctgcgtttgccgcgtcctgtctttcttctgtctgaagtacatgcacaggcgcatcggccttgaagcgtgacggaagggttcagcaacgcagccgatacacagggaagcctggtagacaaagaaggaatgaaatagacacattgcggtggcgcgaacagccacaagctacacattttggaacaatcaggggtaaaacgacctagtacatccttgtggaacataaatgtcatagtccaccaaggggcaaggataccgaaacatattcgagagttcgtggccccggcgagtagtcgcactgctactacatttctcggccatcactgtaggttcagaagtctcttggcatgctggttcgaaacgggaataaacctaacaatgacacggcacgaggcagacaccaaaacggatttagaagaggggaacgagagcagggacggatatgcacgagaggtcgtaccggatgtcagtggggtaaagaccgaacacgattttacacgcaagggacacgcagttgagaaagccgaaaaaaacgatggacgcgtgagacgtgtatgcatcttccacgggtggtggacacgaagtgggagagaaaaacgcaaagacgaaaaaacaattgtgggagatgagtgatagcggcacgccaaggctaagtcgttgcgcggaaacgaagagttccctttgtcaagcttggcacgcacgttagctcgtgattccaggactggatcagcggtcactcgtgcgccgttacaccaacccaaatttcaagcggagcgagttctgcttctacgggatcccatcatcgcgggcgtctgccgcccgtctttttcaagccgacgaacgtctgtgtgtatataaaactataacagtgtctgtgtgtagtttattgcgcacatttctgttcacatttgcagcaacgttccacgagcacatgcattcgcgtctatttcgactagtgtggtttttgacatccacctcgtagctattctatgcttgtaataaagtgttgctatgcccatttctagcgcaggtgaggcgttcgagaaacgaaggttattgcgaggcgttttctatttagaatgttgtatggacacgtggccgcgcgggatggaacccgatctcgtccctgttgtgcgtcggaaacagccgtcgaaaggcccgaaaaaacgatttggtaccgagcaggaaaccgcgtaacgggagttttgatagctcattgtgatgaaaggcagccaaaaagcatccggcttttccgcagccgaaatggggtacctccgaacgtgtcaagacacggcaagaattcaccgtgagctctagcgttaaaagtgttgttgaagcgggattctactgtggcgaacacttgttcagcatcgatggaatgctgaacgtaacaactttcggtagcgaatcgtgtgtagcgatgaagccgccgtggtgaatttacccgtttggtacttcctttgatgtgctgacaccggtcagccagctagtgggtgaagccttgaggcaacctagcgtgattcagcacccaacactaaggcaccagtctatgttgaaactgtatagcttcaagacgcagtgtattcgcatggagagtgaggcggggcttgcacgtctcggccccctatcgagtctatgtctctcagtagtcatctttgacacggatgcaaacaaagcattcgagaatcgttgagagaagcttgaaccataaggccttttatagctaccttatgtgtcgtaccccccacggccctgggttaggcacaccgtcttgtgttggttgggtgtgtggatgtagcgtgggcttgctgctccgaggacaaacaagaatgagggaggtcaacgctacgcacgttaaatctcggcgtcgcatcacctagccagccgaaagacgtgagccgaccgcgctgactcccgtcgtcgctgagctcggatggccgggaacaggcacaaagggattcgtttgtgaatcgtccagcggtcacggaatttcgcagttcagaatcggggatccacggttttgtgcacgtcctttccttgatttgtaagatgttggcagtagttgattttggtcatttatcgcgcgcaagtgagaggtaatttgttttggttaaccaatggcgacaagtatgccgttcttgtagtgacccatcttcgcacttgtcaatgcagaacaacgagtcaaacatggtcgggtcttgcttttttcgtgcaccggtcaattagtcccgaaca

SEQ ID NO: 3872 - DNA, 4920 bp, Toxoplasma gondii
  source 1..4920: mol_type = genomic DNA
aggttgtattggcaacaagaagacgacgccgagcacacaagaggggggggagaccgacaaaagaggaaagcgcaaaaaaaaatatgggagagaagctgcatgcagggtcacgaccggaagaggcaacagctcgtgtctcaacactttgtctgcagcagcaactcttttctcctgctttctccagcggctacactaagcgcctgtgctgaaggaacaactgacactgggtctcaacgcctcgcgtctttcaactgaactgaggggtcctgctcagaaagcgaggcgggaccagacggtgggtggaagaactcgatcacggacggagaggacacagtgtagagaaacataggtcacaacagtggccggacgcgaaaaaggcactttcgccggacgggtggcgaggctgatctgtttgctgtggcgctctttgtgggcggtgttcagtgcacactcccgacggtttgaggtctcggttcgcatgcacagaagcggtcagcttacctgttgcgcgtttcactagagtgtctgcgtgcgatccctgacttccgtcctcggcccgctctcctcttccccattccacgcctctcgtagaaatggtgattcattgaacggttgggctgttcctcgcggttctcgccttcgatcgctccttggacagcaaactgcggcatatcgtgtccatgttctccaccgtaccccacgtttaagttgaccaaggtgttttgctgctgctcatcttgttcctgctctcccgtgagcatgaaagagtcgtttacccctccagtcagaagcgggtactggtcggaatctccttccccaacgccacggtccaggaagttagcgtgggcttcccttggcggggtggatgccgcagtaacaaaggtgccttcgcgctgcacgacgacacctggaaccagggaagcggaaaggaaaggcgcgagcaacagagcgttccggagaaccctctttgaggacatcccctccgcaaggcacatgcccttgaacgccatttttgcagcttaaccgaagcagaaactcgtggaagagaagctgatgcgacgcgtgattcctgggaaaacgcggcgcagtcgcagccccagaaaagccggatcgacgacagcgcagtggcacaaatcgaggagtggacacaccaagcgcagagcgttggcgtacgagcgggttgtcaaaacgcgggggagaaaacgagggaaagacgcggaagcgtgctgggggagaaacgcgttggcagattgttgtgcaaggggatgccttcgaaggacggtcggtcaagagaggacgcaccgcaggctcaaacgatcgtcgctccttcgccacagttcgagtgtccacgagccgcagttcccaagaacggggagaagtgagcaaagtaaatgtaaaaggcagttcagaagaaggaaaagcttcgcaactttccacgttgagcaaaaccgctgctgcaatgaaatactgcccacaatcggcgacagcggtgcacgacggcgcggccagggatcggaggagagaaagacagtacccacaagcagaggaaaaaatcggaaattattccacgcggaaacacgcaggatcgttagtgaaagagcggatctcgcttttctattccgagggaaaggtcgaacaagttgcacggacagtcgagcgccgcataagttgcaatttcgtgggccagggaaaaggggtaatgcgtcagggccccggtcaatattgagagactgcgcaggaagatttcgatgaccgaagcaacgttcgcggctacaacaacccccggcgcacgacaaggaagctaccgcagcgtccaagcagacgtcgagacagcttcagacttcctccttctgacttcctttctcactccttctcctcactgaaaacctcttccgcttcgttacgcttttctccacaagggggcagcagtcgtttcccccgtgcgtggtggacattttttctgcagcagcactcgaaagacttgtacttcacagccaactgtgtctccagggcttcgtatcatccttgagcaagttggaagttgtgctgaatgtagtctgcttagttcgctttacagccagttattgcctatcacattgcatgtgctgcggatgggcctgcacaaggcaactgccggttttggttcgtcgccgagaacgtcttgttgcagggtccaactccaaaagagttggctccatagttgacttggggagcagaataccgaaatttgtaatatcgtcggaaagaaaaaagctgaaggcgcagagagtttgactagccgtcgaaaacgacagttccttttggggcggaggcgtcgcgggacggtcccagtgtgggagctacaacctcccttacgtcgagacagtcaagaatggatttacgtggcagaaacgaagttaccggtggaaccaaacgattcacaagatgtggctatagcaccagcgacactcggcaagtcttgtcgggatccagaataccgcagtatcggctcaaacgtccatgaaccaacctttaacgcttctgaaaagcacatagaaggaattcgctcagttgtccgaatcctggtcaagacacaagatgtagtttcgttttttcggattgagggccaacaggaatagcgtagacgccgctatagacggtgcgctgtagcggctgtatgtgtagacgaagcgcgcctgcagcgttttccagaggtacttgtatagattagttcgcattccccatgttgctttaagagaaaagaggttttcctactggtatgtttctaggccagcagcaaatcatctgttcctcccttttcgacagaagggagacacttctgtgttcctcatgtggctactgaacatttagtcctctaacctgctaaaagtgcaacgctctatggggtgacatgttctcgcagcaattcgtttgcataaaggcaaacttttgcgcggaacatggataacctggacttttgtagcgaatgccgtgcatggcaaccgggtgtcgtaaacgtggtgacacgtctaggaccacacgcgtatagatcagtgtaaggtgtattcctgcagtcaaggcactgtcgattacgagacggtgcttcacagccaagcgccttcgctgtgacgcaccctgacacctagggaaaaaagagccagaggacgtatgatccacgcacagatcatactgctctctgcgcagttgaactgttgacgcattctgcatggcatggtggacagaagcaaaaagtttggattaccgttctagttgctttcaagatttgttacatcgcagttcggcgtttacttcatctctcgtattgtcattgttgacatccccaaaagtgtgaacccttgaccttgaataaactttccagacggtgtgcagttcctccctggttattatacgtttctttccttgcagagtttgtttcttcgtctgaaatgtgaatgagaccctcaaaaaacaataagaatgggttcgggtgtgtgctggactccgctggttgccgcatgactacgtcctaggggaagaatgcgatctgcgaccgtcctcgagccgtcactctaagatgttccgatgtgtcacagtggtgtttataaaacagtgcttctcccagttggcgactgaaatagacccacaaccacacgacggagtgcgaacaaatcaaactccgtctgtgcactgaccacagcttgcctcttctgtgaaccatggcgatgcttgaaaacagaaggactcagggatactttttcgtgatctacgcaagtatcaccttttttcagtgtgacctttctgcctcggagatgggcgcttcaccacagcgctatgccagaaaggccaatgagttgtattgtgctacctatgctcccagcatcgaatagcaaagcgcattctttagggcactgaagagctgctgagtgcaatgcgttcagcaccggggtacctgtgagctgatggttgagccaattagttgacgttcagcagacagctgtttctttgagtaaggtgcatcaatcagcgtcttcaggtgggcaatgaaacagccagtcagtagaatcgtgacgctcaaaaaggtgcataggtgaccccactcgagcaaggccccagtagacctttggtggtgccgagccggggaagcgaagagcacgaaaaaaaattcacagcgcaagcgcgacatgtgcccttgccacacatgcttgagtgccggagaaaaattttgtttaaggcaaccactacgtaaattgcttctccacaagtgtgtcgtaagaagagagggagagggcgccgacgccggtcagcatcaccttcggcttctctggtgctccgggtcaaaaagacgggaaccatcttactgctgttgaatcgtttcatctgcaggctactcatgactgtccaaaggtttctctgcacaccagccaagtttcgttccacctgcgcccaggcacatactctgttggttcgccccgtgccaactggtggtctcacaagagtgagaggtgcaacagacttcctttcgtcttcacaggatgtttttgcgcaaccttctgcaacggcaggccagaagagacaccaaccatatattttgcttcgtttctccagtacgtgttgacccctgccgatatcttgccttgggactggaccgtgaagggtgacaatgccttgacacatatattgatacaatgctgtaacactgaggaaggctcgacagattctacgttgtatcttggagaggatcgaatctttgggctaactgttccggtcgccgtttaatcgggattcatagcacttctggcaagttgttgagctccgtgtgactgttttcacaaccccgaaatcgtgaacctttgaatatctgtcaagcgaggtaatagtcctgccgggtgttttcgcccgttgttcccaaatcaattcgatttcccatccgagagcggaaga

SEQ ID NO: 3873 - DNA, 1825 bp, Toxoplasma gondii
  source 1..1825: mol_type = genomic DNA
aaatgagagaaaggccatcgtctttttcgtctctctcgttttccgggattttttcgagcaccccgttcgcttttttttttcgaggccggtcgcatttcgttgttctcgagactgcgaagtctcgcacagtcatggaccacgaaagccgagatgctccctcttggtgagcttatggtcaaaatcttcaatccgcttgggtctgctttcgcttctctggaacagcgtgaggacgacacccccccccctccgcgctccctccttccctcgctttcgcgcctcagtccttccagcctgctgttcggtccgcgcctggctttctcggagacttcggcctctcgcctcacgacgaagatcggcgcgttcgtttgctgctgcctctggttctctggtttttcgcgttctccgcgcgctgcggcctcctcctcttctcgttttttcctctgacctttctcctcgcgtagctcacctgtcgtccccaaaccggatgcggcctcgcactccgcagcctctgccagacccggttctcgaagatgccctccgtcagcagcggcacaactgcggagacgccgtcgacggccgcgcggtcgatgcccagccgcgtctggacgaagccggagagagacgcgcccccctcgtccccgccgccggcagcggcaccagagccccccgaagaaaacgcgcctcctcccagcatggtgcagaacggaagctgcccgagggaagaaagaagaagagaaaagagaacagggagactacgcgggagaaggagcgggagaagaaggagcgcggaggaattggttttgacgtggaacgatgtggaagacgagcgggcagaccgggggcaggcaaggaagaagcagaggagaagaggcctgagaacgagaagaggaagacgagaaaagagaggagaaggagagaagacaagagaagccaggaaagggaggagagacagaaaggagagaaaagggatggacggagaggaagaaagaaaaggtggaacagcttagtcctcctccattgttccaggttctggggaagtaggagacgcctccccaggaggaaggcggcgcttcaagcctttctctagagagaaggaatcaaatggctgcagaaaacacagacgcactggcggacgcgtcgagtgaatgaacaagatgccgagaaagcgcaaggagaagatgcatgcatgcgcgatcggtgttcgacattgcatgtccggtcgctcaactctcgacgagtgaaaaaaagaaaacggtttccatgtcgcttcttcgccgcgctggtcttgctggtggggtcgtctggacatttcaacgacattcctcggaccctctctgttgtgggagagacaacggttgaggtgtacgtacaccgggcttctcccggggaggaacgacgctcgctgctcatgttcctggatgatttctacggacgttgaagttctgcctctgcttctttttatccttttcgtcgctccttcgtcctcgcgactctcgcgttcctctcttggcagtcgctcttccgcggacgcatgcctctcatccaatttcttctttctctctttcctccttctctgttcatcctcttgtcctcttgtcctcttgcactccgacgacttggggaaggtcgcgttctgttcaagctccgaccttagctcttctcctcactgccttttcacacggacctctctccctcgcctgattctccctcttcgctgtctctttctctttctctttcttcttcttcgtctcctttccttcaccctgtttccctttttttcgcactctttgtcaacttcttcgtctctgtcttcagtgctccgcaa

SEQ ID NO: 3874 - DNA, 1948 bp, Toxoplasma gondii
  source 1..1948: mol_type = genomic DNA
caggcacagaatacacctggaaaggtgacttactcttccaggatttcaggcgcggttcgagggcgcatgtcctcacattcggggaaataccgttttctgtgacgacctgtcgcatcccgatacaagatctctagattccttgtcattctggcgacggcgctctgctgtcagcagtctcggcaacgctctttctttctctctcacgaatattccttcttctatttgtctctcgatgtcacgagcaaacgcgtttgtgtcgagcagagaccgcgagtgcttttgtctcatggaagaagaagaacgtaacgggcagcgtgcaaacgtcgctaccaagaaggcaaacaccgaaagttcaactttacgttactttgtccacatctcgctcgcctctttgtcttccgacagcgtattcggccgtttcttcttatttcactcagaatgtaaacggagctgagaacttttgtctggcaccaaattcaccgcttctgaatttcgaataaacctgccgctgtgcctcgcagcagactaacggcaagatgcgctagaagaggtgacgagaacgtgtgtgataaacgcacaaggacgatcttggaaggacttcagccaggctaatcgcgtctctctctcggagcgagtctgtctctaaagtcccgttctgccgccaagtgtttctaacaaaaatgctgaaggctagcgaatgcgcgagagctggattccctaacgaagacaacagcacgattgagtttgccgttttaaacgctgaaggtctttgttcacccgattcacattcgaatgttttcccgggtatggttgagacggtgatgactggggaaatagggtaaaattattttgaacgccgtgtatcaagattaacgaaggcagaacgtcctctgtggagtgtcggagaagcacactcaaacgccaggaagcaacggggggcttcactcacagcaaacacaagcatgcaaatcttgttgcgtttcagtctcccctgcgagcactcacgtttatgataagttatgtccatctgtgcatctcacttgataatagaacgtataagtcaggcgttaacttctggggtaaaagtcttactccttgaataacagccttctccaagctcgtacgacctcaaagtactagaagccacgcgcaagcatttgtaaaagcatctgtctactatatgaagttcctgttgcggagagaaacctgtatggccaggtcgtttctataaaacgagagaggaacgcgcaacagagcgtgcactttccgaagtagggatcgccagcgaatccgagacgtctgcgaattcctcggtcatccatgtgcatcttttactctgggccatttcccttctctgtttcttccgtgtctccacttgataatatgctttgacgcgccccgctcgctgcgcatgcagtgtggcgtttttttcgcacccgcgtggatttctccgtggcacacaccatctgcgttttctatgctcgttcgacagctctcgactgcgtgagccattctcgcacttttctcctcaattttaaagcttcctaaccagcggaacaaccctcgcgacgtttgtgtgcgccaaaagtgacgcggcgcctcggcttcccatccctccgtcccgcgtgttttctccagcgtgcgccggtgaaaagtccaccgcctttcgtcgccagctttctctccttttccctctccccatcttcagtggagtcgaactttcctcttctttgtaaatgtctcggttgcacgtccccgtttccggtggacgttaaaccctgtctggggacctcggtttttctgcggcagtacgctccgtgaacgtccgtgtcttttttgctgtcgcccttcgcgccgcctccgtcacgctgcttttcgtttctgctgtctccgtgcttctcgttcgcgtcttgttgtgtctcccgtcgtctccgcttcttctccacga

SEQ ID NO: 3875 - DNA, 1170 bp, Toxoplasma gondii
  source 1..1170: mol_type = genomic DNA
agtgaagaggcagacacacggaaaagaagtggacccgattcacaaacagtggcgctgttgtgaacgatgcactcgagagactttgttgtttgcacgtccagaactggtggggctgggcgtgttttgtcggtgtttgtgtacgttcaagatcgagtgtcgcttgaaagaaaagagaaactggaagaagatgcgttttttgtggagaaacacgcacttttttggcaaataaaacgtttccttagaagccgaggtgaaacagagcagagatcgctgcgccgtcagaaggcacctgacctacgaggcggtcttccagggtcctttgatgggcgccgcactaattgctcttctattcctcttttttaccgttgctcccttcgccaagtgtgactccagcactctgtcgtgtcgcgtgcctacgccggcaggtattttcccttcctttgcttttaactctggtcttacactccagctgttttaggaaacccaaactgtgaacgacgcgaatttttgtccttgactttgcgggaactggcgacacctcagacgtccagttcttcgtttgcctgttgttggaacgcttctgtactttgccttccccttccttgatgtggaagctctaaaagatctgcgtgtcgctacagtcctccgttcatctgacctcccaagtttctgtcttgtgaccgagaaacagccagatcgaacgacgcgccttaccgaatgcactgtcctccttatagagaataaagtgcaataggccattagcaatccactgccaccaacataacaaggttgacctgaatatcgtacacctcgaccaagtccatcctccccatcgacggagagcgaaagagcgagtcctccgtatacagactggcatcgggaaggaaaaaagtgcgaaagggaacacggtatctgtgcagcttgtgtacagaggtgggcatggtttcagttatctggttggtggtggtacgcccacgtggtgtctcgcaacataatactggtgagggggccgcgattccctaggtgtccagtcgagtgctttgccttgggcattgaaactggctcacagctccggtcacgagcacctgcacgagatgtttgtgaacggaaactaattccgagagggttccccactttgtcttttgtctgcgacttgggttagggggcaac

SEQ ID NO: 3876 - DNA, 2645 bp, Toxoplasma gondii
  source 1..2645: mol_type = genomic DNA
tcgtttacatccacctcacgtgtctcgtgtgatatttgaagaagcactttaagctgctcttcacacactatctacgaaagaaaactgtacgtttgtcattcattcattattataggacagatcactgggtagcttatcatctccatctccccctggtcttttccactgtagcatcgtagtctcaagagacactccctctcaacacagcctttttatcacacatcgcgtttcaaagacggctgacttaacaggaaacaaatgcgaatgctcctcaccttcgagtgtcttatcagcgaacggtgtgccttgaatgaagcctgaagaaaggcgtgaaaatgcgagataaaggtatacggaacgcgtcaacatgaatcgtttttatcaattcacaacgcaatgaggattataccgcctcagcttaccagcctccgtagcagcatcagctggcagcacccctactcccacccccgtttctgctctgacagtcttctgtcccgtgctgcagaaatatcacacgcatattatttcgtcattcaaacgtgcaaaacgcttcacagctgttatgtggtggttcgcactacccatgatagctggccaccggcagttgacgttagtcactacctcactccgcaaaccaggttcaaatttcacatcgtaccattcaacttgttgacgtaggcagcgtggtgttttccatggtgaaagcgaagagtctctgcactgatgtgtggcgccagggcgtcttcggcgtacgggaggggaggcagtgtgaaagcacaggcgtttgtggagaaacagtgggcatctcgctgtaggtaaggagaccgcacgtgggcaattctgccttgcacagttttgttgcacgaagaaagcgacgcggatggaggacacaaatgcagaaagcgagacgtcacttggcgtgggccgtgagacgtggtgagagcagccgtctccagtgcgaggccaatcggcgccgcgactagggcagccgaaaggcggagtgctggcactaggacagctgtgatggacattgtgactcagagcgaagcaggaaacgcgaagatgagaacaaagtcttccaccttgaagtccctacggaggtgaaacgattctgtgtcgagtaaactgctcgagaggaatctgttaccacagcagcgaagtaggtgacgcaaatgtgatagtcgtccgcatgtgtcggcttcatgctgtgcgtgcaaagtcgatagtccgctcaggtggtgttgagcccggtcccaaaatccagccggtaacctatttggtgctcttatggggtgaaaatgagtgtatgacagacagctgtgcttgagatttatcatggataagccgttatcagtgaggcagatcgtccctcatttgaagattcctacagcgaagtatccgcttatcgggccggtcccactgatgagctgtgtcgttttcgagagttgctgccagtcataacgcctgcatgcagcgctattcctagaaaagagacgcgaaaaaaagagtctccctgaatcgtgctacgtagactacggaccatcgccaaagcgttatacacaagccctgcaaaacgaacggtaacgtacacgtacaggcaacctggcgctgatgagccgtcaacaccgacgttttccacaagttgctattgggtgccgctagctgctgttgtttgatagcctcaacaaagctgccgccatccgcgcgagaaatcagtaccgtcgcgggcaagctgctcgttcacggtgtcggtccgattttgttaccgaccgtccggtaaggcaggacacaccgtggcggaagtcttgaaatgcggtgttgcccgttttgaagaaccggccccgagcaagtccaatgaggctctctccattccttgggaagaatcgaggtccgggtgctagcaagcgcaacgctcgacacacaataactcattgcacgatttttcctcctttgtcatatcccttgtaaagtgtgtttactttgcagattcagctaagccgacctttgcagaagtattttttccgttgcgtattccgggctttttatttcgtttggacccttgtgcaataggccataaccggacgaatacactcccgtgtcgaaaccggtgtcatccgtggcagtccgctgttcttgcgggtgcgttgtcgaggtgttcttggcccgttgatttgtcattgtcgtgatttccctctcttgtagtgatttccttggcactctgcctttagttgacgtaggaaaattagctgtgtgtcggcaactggccgtcaacagcgcagtttaggaagagatttgtgcacgtgacgagccagccaaagaccgcgttccgtgaacgtgaggcgcgagccgccaacagctaaggaaaactccagaagcatatcaggcgaggtttttgctattcgaaaattccaaacaacccgaaaaaaggtgccagtgttaagcggggacactcgtcgtcgttgtgtgcttttttagaacaccgctaactgctcgaacgtgcgccgatcgcttgctacccgggacaaggcgaaaacaagtagagagatcttacctacattgtcgccgcttgaacacaccctggcggtttcgctccgagtcagtacgaagcagtctctgtgtccccgtggaactacctgaaagcacca

SEQ ID NO: 3877 - DNA, 1497 bp, Toxoplasma gondii
  source 1..1497: mol_type = genomic DNA
gaaactgacgagagaaacgaagtcagaggatttgttccagcgcctcgggaggcagctgagacaacgcgtgaggcatctgcgccgcacgggttcgctgctctcggtggggcaagcagcgcacggaaagccatggcgaattcgggagtcttcgccgaaaaaaagtcgagatagacgtcgtggaaaatggctccacgccagcgagtgcgcaagcggcttccgaagaacggatagaacggataggacggctaaaacggcagagtcgggcctccgtctagctgcgaagtctccctaggcgggcgggagctcgcgacgggtgtgaggatgatagacgaatccgaaccgccttcagagacgcaaacgcatcttacggaccccacatctgtcagaatcggttacgctgctctaggcgctccaccctgcagcgaaatgcagacatcgccgagacgcttttcctgcttcttccgagctccctctccgtttctggccttgggcgactgctctctgtctcgaattgacggcaagaagaggaaaagagagatagaaaaacacagaaacccgctggagaacagcctctaaaagttggagcgaatttgctgagacaggcggagaaagaaccgaaggaaaacagcgaagacgacaacgccggtgaaaagatcggaagcgcgagacaggactccagcgaatgtgctggccgtcgagctttctcaattgcgtggggagcgggaagcgcggacttgaagaaagccgcgggcgagagagaagaattacgaaagaaaagaagactgaactggtggggaatgagaaatgaaacaaagccttgtgagggtgagagagcgaatcccagcggcggtgtcggcagctggaacaacagctgcaggtccgcgtcggaaaacgagaaatgggactaaccggcacaccccagtgaaactcactgggaaaaaagaggcaactctcctccaaaccatgctcagaaagtcaaaagagaaactatgaaaaggaagattgcagtcgccaagcagactcgtggatatctcctcacacgtctggcagaacagagttctctccgccgaccttttccgcgcacactgtaaggagtcacggcaaaagcggcactgttgtgcatgcgagaaacttgttgacctaatgtttgtctgtgaaaaagagaaagaactgcccggaggaaaactgagcttctcaaaacggtgcagagatgccactggatagacgggagagtagaggtggaggaaaagggaaatgttgaaacgcaaaggccagatcaggcactcctttttgccacatttcgccttcagaaaagtgcgttgaacacggttttctgcttgccaaaggcaggagaaaagaagcacgagtgtcgcggtacccgagacgggttgctcctgtcagcggaaaatcgtggtatttttcgcaaagaattcagcggacggggtcaaaaaagagtgaaaagagcgatgcttcatttggaaaaaaactccttgtgaa

SEQ ID NO: 3878 - DNA, 2975 bp, Toxoplasma gondii
  source 1..2975: mol_type = genomic DNA
cgaaagtgtctctgtatcgaacaatccagtcgagcgtggtgttcccgaggtcgcggaagggattgatggcaacgacgagcgggtccgcagtcgtgtagatttgattcttcatgaagcgcaccttgaggaagtcgaggacgcaaggaatgttcgtgtgaggcaacatgccgatgtctccgtacgtcatggggtcgatcaggctgttcacattccacgcattcgcctgcggtacttcgaacggttcgtcgaagcccggtggatcgatctggacgcaggtcaagttccccttgtctgtccccgcctgcacgatgcacttggcaaacatcaggtccggctcctccttcaccgacggcgccaggtccgtccagatttgaaatccctatgcaaatacacaaaagcacgagagacagcgtggtgactcgcgggcgacaccggggtcggaagccaggaaacgacctcggaaccacaagcgcactgcggccgggagaagcacgacggcctttttcggcaagagaaaaaatggtgcacagtcggggtgaacgattcgaaaagcgggcaaaaaccgaaacagagacagagagagagggatgtgcttctcgggccgaggggcgacacacagttcaaggtggtgaagaaacgacgagcgcacacaatccgtgaacaacagagacgacaccgagacctcgaaatattgaacccacagcgagtgcgaccctatgctgcggctggggaactggagaaaatgcgctatttctcaaacttgagtcttcgcagagtcacgcagcccagaccccagacacaagggctgctcgggagtccacggcacacacgccttccgacggcaacgaaacgcggaagcgcgtccacccgaaatatttatcccctctgcaacgttagagctctccggtttcctcgaaaaaacgatgcaggaacgcgttttacacagctcaaagcggcgcgtcctctgcgacctgttaacgcgtcgccgcggtgcgcgtgggaaacgccaaggctgcacctgggcagaggcacagagtggttttccagcggttttcgcgacatccactgtggaacaaaataaacgactttcaggaaagcgagaaagacgcactttgtacacattgccggagtggtcgaccgcgtggacatcggacgacctcttcttcagcgccgtggccgttttcagctcctcagacgtggtcttgctcgccattttgcttcagagagagataacacgaggaaagaggtacaacgaaggagagaaaacttcttttttccccggagagggtcgtcgaagcggccgagaagagctggccagccgccctgaaactgcagcaccgcgcgcgccttcgacggcgtggacggaggaatcaggtcgaaggagacgcggaagagatctccgatgaaaagacgacgtgagtgtgggaacaagtaaggaaaaatttggggaaactccaaaaacaagaaggacgaaaattcgagaaaactggctctgcgacagagctgcccaaacagccctcgggtgtacatacagcccgcgcgcgcgcgctctcgcgactttctggttcgcgcgctctggggattctgtcggcgccgagagagctcgaggattttcgccgttttctcgcaaaaacggtccggatacgcctgagtttcttctcgacaggtgcacgggactgtggacgctcaccgaggaaacaaatcgtggattttcggagcaatcaagcccgtttttcagtcgcactcgcacccaacacgacagcgtgctcgccacgcaaagatcgatcgcaaccgacccgactcgctggcgcgcgcactctccacgcgacaccacagcttttcatcgatacagccaagtcccccgaagcgattctgtgcactggacggtcacagcgacacccatgccgccgctttttcgacgttggccgtctggtttcgacggcattcgcaaggtccactttccacgttgcatctggggtcgtgaggcgcagtcgccgtcgtcttgaaacgtggtgagtgttcgtagacgctgctgccgcaacctctcttcgcctctgctgttgagagatgcgcagagctgccggagtcccgaatgcgacagcatttccaccaacagaaacacgccgcacacagagacacactgtccagaacgcagcgcttagcacttttagtggcgtcaattgtggctcgtcaacggacgccggcgggtttctcgcccagcgccccgcggttcctaactgggtgactcgagtcgaagaacacattttaggcgctcatttaggttcagaggaaatgcgatttctgacagaagcgacactgcggacacggagctgtcgcaggcagagcacatcgagtgttaaaacggtcaggtatgctaggcggcccgtcgttctacgcccgtcagaagtgcagatcactttggaaagatgttaccggcctagcacgacggtctcgtgatcacggcgcctgagggtccccctgcacccgttgctgatacgagacctacgtaggaaccgatgtagaaggtgtctaggccacagccgctgttgagtgtccctagtcgcgtacgagctgtctgcattgatgcgatgcggctggcgttggtcaccgtttctctcgggtgtctttcttccacctacaacgtgcagctttggcagtaacttgcagtgaacacttcttataagagcgtttctctaaggtgggtgcgaaggagcatttgcggtgtaacgaacgcatcgctgtcctctgtttcttcgaagttttccggccttccgctgcaggaaagtgcccggatacgcagaatccaccgctcttgaggagtcgacgactcgctccactttcgggcatgtgtgaaagcagcaggctgccaccagtgattggtcgtgggtttgccgtagcgaactgtccagtgtgctgaggaagtcgttttgtcggaagaaaggacaaagaaggtgcagagagggatgtagacttca

SEQ ID NO: 3879 - DNA, 3369 bp, Toxoplasma gondii
  source 1..3369: mol_type = genomic DNA
agcgaaagactccgatacagctgaacgtatgagagacgtcgttttctctccggtgccagtcactttgtagttgtcttttttagacacgccggctgccgtagttcacggtttccagtttcatttctctctagcttttccctgttaccacacgacgtacgttgctgtggaagcgcgacggcgtcaagccagtagggcggaaggtcatccggaatctcgcgtttttctcgtttctcgcgcttcgtgtctctgcttcttcgggaatctttcgagtgcagttctttatcacttgctttcgctcgatcggccccgggcgaccgttcaacagcgctccgttcccgatgctccctggcacgaaaggcatacgcctcgggggagctgtcaacccctccgttgccgggaaggaaagtctctgaggaaaaaggcagaggagactgccgcgaaggcgagagtctgcaactcgaaatccttaaagcgacggagaggggaaactcgggagctgccgcaccgctgaccgcgctgtttcctcgccattttggctcgaaaagcgggagcggggaggtctcgcatcgggaaagccccgtctgtgtacgccgccagcgtcgaagccgacaggcacgccggaccgcggcggctttccggttctgggcagcatggcgggccaacgtgaccagcagaaaacccgctctggattctagggaacgttttggaaaaaccgagattgacatggatatggagacaccctgagagagcatctgggatagtgtgactcaaaggatcgtcatttgaagagtggaaacgaactgcaagaaacgcacgatgcggagtctcgccgaccaccggtcgacgaaagtaagcagcgacgctcgttggcgaatggggacggcctgaactcgttggttttcgacaatagcggggccagagactccaaaaagcctcgttggaaaagtgtctactcctgaagcaggttaattgtccgtcaaagggatctgttttacgaaactgcatctaagaaattgagatcgaccgttggctgcggtcgacgtagaaacgtgttgaacgttgtcagcgcatgcgcatgcaacgtcgctgagaatggtaaaggactcaaagaaatttggtatttcacaggccagcagcaggattattgtaaccatccattcaaaatgcgatggggaaacccctatttggttagaagaagcgtttctttgagcaggctcttaacaaacacccagtatgtactggcaagaccatgtccaaagcaacccggacagcctctggtcacggaagaacctagtcttgcccgaataagaagaacagactaagaaacgttataaaatttcgcagtaagaaaactgagcaaaagaaaacactaattctacaacttagtgaagtcagaaacgagaacaaaaaggattccgccgccgggacttgaacccgggtcgcgcgggtgagagccgcgtatcctaaccacctagactacagcggatagtgaggaacgggtctcagttcgcatggcactgggcggtctctggcagtatttttctctacggtcttttttagagtggacgcacaaggtgtgaccgctcaaatccgaactagctagttatctagaaaaatgagtgttgttgagtaggttccgtcgtggcaaagactcaataccaacaacggatgctctcgccgcagcccccttcttgccacacacggaatggagacaccagccacagcggaacaatggaaatctatcgcactgatgacctgtacatccggatgtcccatggttcgaaaacgatgatcgcacggagtgtgtggcttggttatttatcaccggcactagctgtcaaataagaaaactgggagaacgcctggagacagcacgaaaacttccatgctgcggctgcttctcgcggatttttgacgaagttccctgagtcagtgttgcgtttaaaagcatgagagtgggttgttgatgctgaaccttcatagttaactccgctctccatctaaggtgcttgcgtgagaacgtttccaacacgagcctgtcctattggcagaccgcggcatcaaaatgactccatttcgaaagcacaaaaccataattcttctcaggtgtgcgaacaaaagtgagttaagtaatcgaatgccgctatctagtgtgttcctggttttgaaaagttatctgtgtaattacaggctccgcaaagtcggaggtggactcgccgcaccgcaaacagaaagacgctcttggatagttgatgcagaacaattctctggtggctctaatgtttcctggtgccagcatcacgggtggaagtggacgtagaaatccctagagcttctgctgactttcaatccacaccgtgacgaatgaagcaaccaacaagtacacgttctgagtatcaagtcaacaccggaggatctcttctctccgacttgcacccatgtgccagaacgcgaattacaggagcctcccaattcgagacgatggaaggccataaatcgggtgattactgtcaggaaactcaaaagagcgaataacagaagtgagctggaagcaactgaccacggggcttaagatgtctgtctccactgtcgtagctctgtagtggctccaggttcacgctgactcccgctgtaacgcttttttcggtcacgcagcagcggggagtaccacctttttgctcttgtttactttgtcagtcgcttagttctagcaacgaaaatcacccttcaggtctgtatctgccgaagagcgaaaccagattcataccagcctcacttggtgctttctcggtattaggtgactttttgtctgcgaagaacgcaggcaggacttgatcgcaaagtgtacggttaatcggctgcccaaaacgtcttttagagtgagtgtggtctgtgtatcgcttgttttcattccgttttccctcgtctctccagttaagtctgtcgccgacaacctttcggttttgcaatcaaaaccctaccacccgatctactccctataccaggtttcttctgtcattctgcaacgaacattgtgattgttaacgtgcctgggaaaaatcacgctgttctgctccctgaccgttcgcgatctaagcgacggcgttactgtcgcgtccaaccccacgccttagaaagattggctcctcgaaccacatcaaacagttcgttttccgcctttgtctgcctgtcggtggccaaaatttggctgatgtggtttagaaaaaaggtaaaaggttacatataggttgtgctttgagacaataacccagagtggtacatgccgtccggagccactttgtccgtgtagagcgaaacatcaacggccggcttttttggcgtcagacaacactgtgaagacttccacga

SEQ ID NO: 3880 - DNA, 3528 bp, Toxoplasma gondii
  source 1..3528: mol_type = genomic DNA
gtctgctggtcttgggcgactgcgttcgcgacagcacgaagaaagagaccctgtaccggttctgagtcttcgccttcgctttcatcggtctcttcgtcgctgctgcacgacgcggacaccgcgccgaactcccttttctcccactcgcgactgagctggaggccgtcttcctcgagttcttcttcgtcgtctgcctcggcttcctgtttgcggcttgtctcgccactctcggactgtgggcagtcaccctccagtgcatgaagacctgcgttctcggcgtgcagcttgtccagttcagcgtccatttcgtccagggccgcctcgaactgacggtgaaaccgctgctcttgttcttcttcttcgtcgccgcgctccagctcctctgccgcgtctctcagagcgcgcgtgaaggcgcgtctccccaagacagctgcgaatctccaagtgacttcgaacgcctcggcgagcgcggatgcctcctcactgctctcttggtccttcttccattcctccttccccaaaagttctcctctctcctgcccgacctgctcaccatttgcctcgtcgacatccgcatgcatcccctccagcggtcccgccgggttcgcgtcgaagtcgccagggtggtctggcgcctcgcgcttcgcaggttcaggtgtacctacacccgggccgctggcggcaggcgagagttcgtggagctgggcctcgcgcaggatcagaaagcacagcgttggaaagcaggaacggagcagacgggcagtgaggcaagcgtcgacttgcgtgaagacttggaggagactgagggcgaactgactgtacgcaggggacgccaggagcacttgtcggataaaggaaggacggatggctctcaacacgacggcgactgcatgcacagacgcggcagggttggatggcaaggacggagaagtcgaggggctcgagaacagagaggcgcagcgaagcaaaccctggaatttctctcgcggcgacgcgctgcggaggagcggcagcaacggacccagcgcaacaggaacatcgcaagcagaaacagcagatgaagaaaatggacaagcggaaggagaagaggaagcagaaggggaagaagaggagcacgagggaggaagagtcgctcgggtcgccatcgtggtagagagcaactggaaagtgaaaccggcaaagccacaccgctgcgatactcgttccgcgatgtttgctcagagtctgaaacgaaggtgaagagaaaaaggctctcctcaggcatttagggaggccgaggacgaggagatggatatcatccgttcctttccctccgtcggcctgccgctgcagacgatgagagcgagagaaaaccgcacggaacgcatgcaggcacgcgctccggtttctggcaacaagaaatccgccaagggaggagagatacagtttttccttgctcattcaacttcaaatttcgtctctcttcttcttcgtgctcgacttaggggaagaactatgccacgccagcgtggggctcgcgccgccggcgaccgacgcctcgatcgcttggggaaggttgtctgccggatgaacacagagaaaaccagctttgaaatgtggaaactttgaactttctccacttcttctgccgctttctgccgtgccattcgtttttttaccaagctggactttttgtgtgccgacctcggaagccttctttccgccgtgtggccgaggaccgcagagaaccgcaactgcacaatactgtacgcgtgcacaccctcttggaaaatgccccagagagactcaacttcgtttccacgaggagatcgtcacacatgcacaaacagacgcctactcatttgcacacagcgcgaaaaaaactagaaagatgtagtgttgcagatgcgaacgacggcggctatgtttaccacgcgaggagcgcgtgcgcagaagatcgacagccgttgcagcatgtgtctggggaggcatcgtaagagaaaccaacgtctctggactaaagccaccaatgtttgcggaaggagattttctactgtcctgttcacccccgtgtcgacaagttcgccgagaaagccccaagaagtcgacgtagggcgcaacactgcggctgtctggcagcgcactcgagggtagcagcgcgcagtaacgccttcaggggaagcccaagcaggtttgagaattcaatgaatggtcgtatgatgtcaaaatctgcgaactatagcgttttcaggcgttcaatcccagactgtttcgttggatatacattagagaggaaaatgttcacagataacctcgacttttactggatagcccttgccattgagactcgacccagctctctatcgtcacacggttatgccatgaaaacagagtttcatttgctgcgcacactctagcaaatatccgacagctcttctgctgcagctctctttcactttaatgactgatttacccgaggaagagtcttcagtcttcaagacagggcgccctcggagcgcgaagccggcgcctgcgtagcctatcgaatgaccaatcgaacgggcttcctgctgcaaggccccgcatggttttccagctttgattctgtcagagttgacgtgcttcgccaaatcttacggggtttcctagaaaagagcgtgattgtatataagtatccctgtgtgtgactcgtgtgaagtcctcaaaagcaagaacacataagcgttccccgcggcaagcgaaacccgcgctttccgagcagacggaagatgcagagaagcaataccagaactctcgatttctctgtcacgttagacctgactagggtggactctcagcgaacgaaccgcctttttttcaatatcggggaatccaaaacgtggcaaagaaaagttgagacgagagtgaagtgcgagaccactgtcgggggtgttgcgtgaggcggtccaagggggactgtgatgtgctggggaggcatcaggaaaggcaagtaagtttcagtgtggaatggagttttctacctttggactcgaacctgacagcagctggcaggaaaggcggttcaggcatgcaccgcaaggggtgtgatacaggggggagttctcgtcaaagaacggtggggtttgtatcgggttatttgatgaaggtttcacggcatctgcgggtcactcggaaaaagttctggtcacgctgaatagagcaaaaagtgagccttctggtacgcgcattcatagaatatgcagtagcgtggagagttttgtgtactcaagggattccaggtcgttcggggcggacctggacgaataagcgtagaagcgcactgtgcgggtcacgcgttcatgcatgttgcgtgcctcgctggattgctccaaaaagcctggttcaaaaggggatagcgccgattgtgaactcctgtgtggcatccccctaggtttggacatttttgcagagaatcggctgcacaaatcactctgattccttgaaacatttgtgtctctcgaaaccgttcttgtggattccctcaaaactttcctgactttcccaacacaa

SEQ ID NO: 3881 - DNA, 1745 bp, Toxoplasma gondii
  source 1..1745: mol_type = genomic DNA
ttcctcacgagtccttgtgaccacaagctgttgtattttctttctgcaagtgcttggagagttcgatcgaaggtagatatgcttttttgttcatctgcatcgccgtagagaacaagtgtctaccagagcgagcatttttaggaaaataacgagcaactttgtgcgctcactcgagtgttgagggcgatttgctgagtcgcgggtcaaaatggtcacctcgatatcaaggagtgtggccgagctctggcaacttttttcaagatttcaggcatctgacgataaagagagccgcgattccgtcgccacacgactattatcagcgtgcgagtggggaagcagacggggctcccgttctttcctcctctttctttacagaggtactcttcatacgcggtcatcgtcttcgcaagggttagaatatgtaataagtagagtcttggcatgcagttccacatctgaagaacgccatgcgctacctacacacgtccgtgccacgaaagatgcttaacttcagattcccgtccgagacgactcgtgtcagacactctgatagtcacgaagaagccacggtaaacataacgtttctctagaaaacacccaccacattaatctgggcagtaagaaaacacctctttgcggcgggggtatgatcccactggcactgcacaaggtctacatgctcctgccgcctctagatgaccgtgaaccccggcaaaagctctagcgtttggatgtgcctcagaaccaccttgtgcatttattagtgttcaacagccaatatcaaaagccgaagactcctgaaaaaggtgttgcatttcaataacccttaaaaaacattccacaaaaatcgtcctacggggtatgtgtgcacaacgtgccccaccaccaaagtgtcattccataaatgccacacgatagcaaaatccaacacttttcgtctggaatgtaaccgttgtgcagtagccgtaacaccgtaaaaagctgaaatccatcactttgacacccgtaacatcgccgttgtttaacacttcaaggaggacacaacgcgtggcagtttggacggaccaaagcaaccatttttccacaataaaagttacacatggattctctaaagaattgggaattgtaaaaccgtactaaaactgttctactgcacaacagctgggtgtggtttgtcttgctggggacaaggcactaacgcaccgaagaccgagctgatccgaatgtgacttagaacatcttttacggtttgtttctccctccccagtggactagatcaataaacaatagttgtggagaggcctcgtgaattcaacgagagcgtcagaataacgataacgctacacagccgttgctcttctgccgtgaaaagaagccctctctgaatccaacagcgtctcccccttcagtgcatgcgctctatgcgtactcggccgaatcgaagttatgtcgactttccccagagggaagagagagcctggctccgagcagaaagaaatccaacgaatggtgactgtacattctttacgacagagcctgcatgtgtgcgctgccaaccacctattgactgcggatctttggcattttcaattcacgcgccggtgtctcctgccagggccatgaagcccgagacgggaatcatctgccgctaggctaagattagggatgacttgcgtgactctgacttcgtgccctctgcctggaaacagctcgtctgcgagaaggttacccgacggtcttctcga

SEQ ID NO: 3882 - DNA, 3100 bp, Toxoplasma gondii
  source 1..3100: mol_type = genomic DNA
gctccaagggcgtcgactgtctctccaccacatggccgatttcgttgcatgcgctcgctgagggagcaaaaactgtcggtgaacggacacagtccgagaggcggactggaaggcgggccagaaggtggctgtgttcgtgggtgcacgaggggaaactcgcaaggaaattgagaccttgcgtgtctgtgtttaccgggtccgagttctgtggcgcttttcaagaccatcgcatcaagtgtactgagtgtggtggtgtcgaagagtgcgcgagttatggagccaacaacttcaggtatggggggaaatgcacgtttgcaacacatcgtgagattgaatagcgagccagatgcgcgtgccgggctctctgtcttttgccgacacgtgcttccacaggtatccttgggcgtacggcacctagaactcggactccactccgtgaggtctcatcgacgaacaactcactggctctgcagctagacaagcacacgtgcatctgtacgtggccgtgaaagccctcgtgtgccttggtcggtatcaagtcagcgcggatcgtgtgcttttatagtttttcactagtcgccgccacacgtaaaaatgggcctcccagaatgaaggcctcagatatctcgaaaatgagggaggcctcgactgtctaaaactggtgtacctgtttctgaatgtcctggtgtccgttcgggtaaatgcacatgcacacacgcatcaggcggtttggtcgaaagctggagcgttctcgaacttgagctgcggcagccgcgcatgcaacgacggaaaaacaactttgtttagaggatggaaagcggccggcgcgaggggcttcgggtgtgtgccacggggtatcgtcgctctaggttgaaaacattccacaaggggttgcatcatcgtttttgtgagattcgcacgcggcaagactgaagcgcgccgttgtcgcccgtccaagccccgagcacctcgcttttctcggaaaagtgtttgcgactatgccgcggaaacagacctgttttcgctggctagtcctgctaaaaaagtgaagagcagccgacgtgttgcctgatggaaaacggaaggaaatgcagaagcacagttggaacgcgaatctaggaagtatccatccacatttttcgcgggctggatccgagtcttttcgcgatgtgtccgaaccaagtccgttaattcaggaacgcggaactggattcttttgttcgaagtggtcggcttctttgagcagctgtccgcagaggacgagtttgcacgtttctccctagatcctgtgcgtcgatgtgcgcggggataatcactttgtcgctcgatgagctgcactgaaaaactcgcgcctgtcagtgatatcatggaagtaaatgtcccgctagtttgtagactccgcccgagaggatggtgaactcgattcgtaaagcaggaggcaagcggttcccgttgagaaaagcgaggtagacgggctggtactatggggggatgtttgctgtcgcgtgcatgaaagtgagagagtatgcgcacgaaatggacagtggaaaagcaaattggaagatgttacagggtattcccgttcctgtagaagtcttctgagcggatgacgttatgtccacccgctgtttttgtgggagatcccggcacgtggctgtgatggcgcgaacatcgccattttagatccgttgggacaaaatatcgaaccgaacactagttcgctaaaacaggaataattctgggttttcaactgggcgtccatatttgcaactgcgaactatcaggagaggaaaagttaggtttaagcgcatcctgtgttccggtgtgtatcatctgaggagcctcagtctcataattgctcgctacgtgggggggtgtcagagtatttggtagcagaggaagaaaactgggaaggcgcaagatgtccttcacaaaaagacaagctcctgcaaacaatgaagttacacgggagacgtctacgcactgcttccgttgcgcactgtcgtgcactgttcatgtcgtcacttttaacaaaagcgaaatctctccctgaaccttcgggaagcggcagaggtattttcctttctgcgagtaaactgaaaggggtcagtcgggttgcattgctacaatttcgagttgttggtgagtcacaccgtgacacggaaatgttgtgtctggggagtttgtagaagtgtgcagaaatacgcgcacccttgaatgaactgcactgtgtgtaagctaaaaaacgctcgacgtcgcgatcggtggtcaacatattcgtctagaagttcctctgcgaggcagagacatggctgccttgcgttacacgttgaaatgcagagaggatgtttgtgcctcatgcaggagtcccggcactctggacggctggtgttcagaaggggagagatctctacgaaagtagacagagaactgtaatagaggtacttcaatatgtgctgtcttttcccgagtgttgaataaggcagcatcaaatggaccagaaggaaaatttgtgttgtgtgcttccaggggaaaatttttgtccctgtgttgcgcataaaactggtcgatatgtctgtcggcttgatacgttaggagaaagaagtcgctaggacttttttcgacattgctttgtagcggcgagagttcccgtctcgcgaattttgcagcagtaccacccgaaaacgtcggcacttgtgcttcgagtacgcttgcaaagtcatgcaattgcgcagccgctacgaacgttcaaaacccccgaacaagggcggcatcttcgaggagttgcggacggctttgcgcagaaacgcggtgccttcggttctggaagcgaattcccgtcagaattcatcttctcgctgaatgatcctgtttaaagtgtttcgttggtcgaacgttgttccaaaggcgcgcgggttgcgctgaacgcaccgcacgcatcagaagtcctgatttcgacgtctcttcgtcaccgacaccttgctttgtcttatttcccttaggggaggtcctgctggtctcccacatcgaagaagggtgtatttttagcctctcgaaacttccgacggagttgctccctttccccagacttccgcgaaca

SEQ ID NO: 3883 - DNA, 1704 bp, Toxoplasma gondii
  source 1..1704: mol_type = genomic DNA
cgctcaaaaaggcaaagaggcgcacacatagatgaagacggaaaacagccgcaaagtgcagttttcgtacgaattgccacatcgttctttgttcacttgtctctatgtgttgaccagtcaggaaggtgatacatatttgcataactttctgttagaaattcatttgtaaagggagtatgtgcagatacatcgcataaaaaggggagtctacagaggttggttggcgcatactgattctcactctgtcgctctgtgcattcatcggcgaactgccaccccacctgactaccgcagtgtgtgaagcatcaattccacctgcgcgcgtggatatgcacgcgaaggtgtggtgtcgctgttggtttttcaggaggcattttggatggtctacttttctttaaattcgacaaaacgatacctgacatgtagttttaccgctttttccagctgtttggaagattcgcaagcacaggctgttcgctacctagacggcggaggcagtaacagagtggacgcgataagctgttgtgagcgaagtttccggcacatgcaaagaacacagaagtcatctgaccgcttcctttagtgcaaacgttccagcgggcccttttctgaggtatgcacgcagggcacagcctcgaaaagaaaaccaaaaagactcgagcttgccttcgtgtcgaaacaatcctaagccacgggtgccgagacagttgcggtgctgttcgacagtggacatactgcaaccaccaaatacaaatgaatacgcctttctgcatccacatcagggcaagggaaatgccggtgacttgttcgagggcggtacttcgtaaggtgatctcaacccacgaggaacgccaccgtacagctgaagccgtcggtgaatctgctttctggggaaatccgctgcctctccaactctatacatcctcactggatcacaagctgctgccaggacagacagctcgaaatgagcgactgtggatcagctgctttctccacatgctgcctgcgttcagcagcgatggaacacgcatcgatataacgaaatgcacacagtcgccgtcaacgcgaccatgagattggagctgtagtaaccgctttcgttctgtctgccctgaatcgagaagaggcatttagaatcgtagaaaaggaagagcgaactgtctcagtccgtttcccgggctctctgcacccgtcactcggccgcgacaacaatcgcaagctgggttcgctgggcgtagcggttaccgaagtcatgaacacagcggctgcgtttctgcgttacgcccccgaatcactcttctctaattggaaccaagaatcgatctggttcctagaaattcgcattttcgcgcgcgagcggatgccgtatcgccagccttgttgtggtgtgatactgtctcggtgtgctgcggcccggccccgctcgagtgttgattctgtgcacttccttttaagcgaatagctgcaggcaagagccgcgccgcctgaaacagggaaacaaatggaagtttactgtcagccgtttagattcaaaacccgcgatttcaaagtggaaatgcgtgcgcgcagtgcgacgtccacgaggctagcgacggtgccacacatcggttgcatgcgcttcgtggctgtgaggcgccgtgacacccagcctgtatgtttggacgcttcttcaccacagttgtttttccttcatttgttgtgcca

SEQ ID NO: 3884 - DNA, 2895 bp, Toxoplasma gondii
  source 1..2895: mol_type = genomic DNA
gggctcaaaattcggtccgagagaaccgagagacgcattggatctggggtgtatgtacagcacactgcgcacctccacgtctgcaccgttaaagacggattcggcagtagagggggggtcggcgccggccgcgagagcgaggctgtgggctgctcgaagcggaggaaaggcaagggtggttcgctgctgtcatctcttctcaaggacgccagcgtggagacgtggacacggaagaaagttcgcgacctggggtcggcgacgttccacgcgaaaggaaggaagaattcatggaagatgctcaaaaagcgtaggtaagactcgcggcgtacgaagccgcgggaggcgcattaggggctcaaacatgcacaggccgctagagagctgcttttcgtctgggagtctgtgttcttccttctgtgccaaaatgcgattgcttacggctagtttcagaacatcaagtgtttttttagcgcggtggaacaagatacacaatgacgagggcacagaaatcaccgctcgactgtaggtggatgcgaaagtccgatgccgtttgctttgtctctgagacatacgacttgagccttgaaacgaattcctttgaaagggtttcctcccctttctgcgacggcgccgttacaccccagagaggcagtgctacgcgaacaaacggggtgatcccttgctgccgttgcgcaagggggtgtattcggtgaaatggcggcgccgcttcttcagagattccgctgcagacaaccaaactttgagatttgaagaagggcactcgaaagaccccttttgctcacggactatctccgagacgccagttcgatgataaaacgagggacaggaaaaagcctagtctcagctgctttagttgcagcatggtctcttgacggtgcgcagttttctccgttgtccaagtgtacgcatcgttagctagttacgcgcacgacactcgactcagcaagaaagtaatctgaacatgagattgcattccaacccacgcagcgtcctttcttgtcgcagcattctgactgtgtagaccactgctttggtcaaaaacagcttcgcggcaaagtcggctcatacacggattgccatgaagacccacgcgttttctgtgctgcatagatcgcatctcgcctggccaccatcctggtaaacggagacacagactgtttatcgaacaagtcccacgcagggttatctgagcccactttcggaggcgtctgtccggacatctgctgcgaacagatcacgttagtgttagagaggggtgctatattgccactgaacgagactcttcgatctgctacgtggccgcagaacgaatataatcttccagtcactgaaaacgaaaggacgtacatgcccgtcgcgtgactttggagctcccgttgactttcgtcatcgcgttagtatgactcgaatcattttaaggaccctccacgaacacagacgattcttagctgtctctggcgttcagagtgaaacacagtcctggtggacagagtgtcgcagaaacatgcgtagaactgacttcgtgcaaaccagcaacaaggtgtgttgttatggatcacgtgcacggtaacagcagataatcgcaacgtgtcctgctccccctacgccggccgctgcgagtgtatcgacgaatgcaagtgacgcgccgagaccgttggcactttttctgtgattaaaaactagtggctaatcgttctcatcgagttctagtcgagatagtcgcactgccgtcaggctgttcgtgtcaggaaatctgaaaccgagaatctgcctctcttgagagcgagacgcaccatccgccgcaactccgaatgtgtgacagccgtagtatagaggtttcgttagggaagatgcggtctactgttctgtctagaattagcgcaaaggacctggtttctcaatattgcctaccaacggaacccctcatttcatcttctgtgttgcctcgaatgcaactgtctcggtcgttcataaccgcttgcaagtcacgcggaagtacagatagaacgcgtctcgaatgcacgcatgctggtggggggaatcccgagttcgctacgtttctttgcgtcgacgctggttggaggtctccaggccgctataaactaaatgaagtatcaaaaagttaagagagaaaagtgcaacgcagtggtcagcctcagttgcaggggcattgcgttacctacaggcaatcactgcggtaatagtgtcgggcttgaccccctgaaattattgccttgtctcattatttatgcagcgtacaggtgattgcacgcgtccgtccacgccatccgtctgctttagctgcatctaggtgatttgctaggttttgtggagacacaccggtgtgggtacttattcggtacttcggtgcccacgcgcatccttgttttgttccttcctcatatcttcgtctgtctccgctgaaggcagttggtgcatcggtccgagcatttggtggtggtggtggtggtgcttctgttttgatagttcagacatcttttcagttctgaagacctcttatggatgtgttgaccttgttgtccgcacagtctaatgcacgctaataaatgcgcagcggcttgcctgcgcaggaacctttgttgttcgcgctgctttctggaaaggcggttgacgcagtcaggccgtattgccgccattggcacatattctaaccagaacgtgagttagttccagatgtggctgtcgatgggaggggagatgctcttgaggatgtcgtgacttaccgccatttgagagtaaagttttttgacagcgtcgaaatgcattggatctgaatgtcaagcatcggtgatggatctgaagtggcagaggaatgtgtcggtgccttttgagtattcgggtcgtcgctcctaa

SEQ ID NO: 3885 - DNA, 1484 bp, Toxoplasma gondii
  source 1..1484: mol_type = genomic DNA
cgaacacctgtacgacaggtgttaaacgttcaccgaagttccactttcgaaaacaggttcctctcgggtccagcggctgctgaaacaccggtctgcaggtgacaaaggaatgtaaaccgtaatcgattagcagagcgttgcggttcgttggcgcaccattttttagcctttccgcaaccaggcaggcttccattcggtgaaacaaacagtgtatggacaggtttcttctggcaagccggctgaatatcgccgcatattcacacgtgatttgtcctggaactccttcgctcagatggattccggttccgaatgtcctgtgcaaagcgaagctcctttgtcgaccggttgactggttttgagttatctggatgtggcagttccattaaaccaaaagccgctttgcaagtgtaacggctgggtacgttcccatatcttatgaagagctggcttgtagggcctgtacgtctcatgatttgatgcccgtgacacaagggcacagattacattggttccagcaggaacgttatttcacacaaaaccacaaggttccatgtttcacaaatgatacgaggaaagccgtgtgctgaaagtgagtggagtgaatcaagagcctctttgttgaatcacgcacttcgagcacgggaaaccaaggtcagcagaaacaaggagcctgctgtttacatccaaaggcattatgtgtccacaagcggtaaacgtcggggcatttgggtgtcttgaaaacgaagcatcaagagatcaagcatccttatttacttatacacagcctggcacacctactgacgtgaagcgcgcctttctgcgctgcggtgttttgaaagtgagacttaagttgctttccacggaaaaacgccgcagaatctacagggagttaaaaaagatatccacctggcacgctttcaagccttcgattgtggtgtcttggattgcgtgattcgtctgttttgaaatttttgccggagcggactttccgtctagagagaaggcccctataggtcccccaaaatacctgtaggcagcgccccgcaaggtcatccgcagctgaatttcgcagatgaatccagaaggaatttggccgtttgcgttcggtttctttatgtattggacctgcgtagttgtttttcttgtggtgtttcccctgtgaaacccctggtgcactgtcagccgctgtgcatgcctgggtcgcctttacccgagaacgctgtcgagctgttcgcctctgagatccacgaatcgggactttttcctcgaagcggttcctttctgcagccactttttgtttcatccgtttttctcgtctctcctgtttgtctttctcgtatttggtcacgttcgcgccacactctccgcgcgttctggcggttttctgcgcccgcctgactggctggtgcgcacgtctgcacgtcgtgagattttcttctggacgcccagaggctctgtgtgttagtttcactgaattgacacga

SEQ ID NO: 3886 - DNA, 507 bp, Toxoplasma gondii
  source 1..507: mol_type = genomic DNA
attgcatcgtcacctgcgtcctgcatccttctcccttcattgctcttccctcttctttctcctctgcgttctcctcccctccttcttcgctctctccctctgcgtcttgttctcctacgattgcttcttcccctttggctcctctttcttcgccttcttcttcttcttggtcgtcttcatctttttcttttctgagcctcccgcttttgtgtttggacgtatcgcctgtgtgccgtcgaaccggttttcgaggtgtatctgcttgtgtctgtcgaggatcgacttcctctcccgcagttgcctgtcgacgcctttccattctgcgtttctctgcctcgcaagagagacagacagagcgccctggattattttccgagtcgtctcttctgtgttccgcctgcggagaagcggagagagtttctggcatcggcgctctgtctttaacgaagcgacgggcagcaggagactgtggagactgccgcgtcctcagggcaaagaaggcacaaa

SEQ ID NO: 3887 - DNA, 1608 bp, Toxoplasma gondii
  source 1..1608: mol_type = genomic DNA
tgccgaacgagaaggaagtggagttaggtatcactatattgacgtatacgcaagtctctatatttatcctcaggtagacctcctcttgctcagccgagtggtgctgccttgcgtcgttcttacctgcaatttactcatgagttccttctgtgcttcattgggttcgaggttcccttgacgcagcaaggcagagaagtattccaagaggggggtaggattgtcggggtcgacttcgaggaaatttttttccagatctttttctttgacatgatacgtaggcagtcctcgaagaatgttggccgcctccgggcctgcaaggccttcctcctccgtcaccattccactgcgtgtcgtcaagaatcgccttctgtctcgtgcgaaacgcagagcctctgcatttgctttcctcgcctctacgagactccaccgtcccgcatatgtgcctgaacctggaaagaagggggaacacaggaaagcggcgacgcagttgagacggtgaatctttctcgcttgttgccacgatcgacggggtggaacgggaaactggaagtgtttgccgatggccgccgcttcgtgaggatcccagtacaccccaaacacagagaaatgaggcacttgtagcaccgggggtgacaagccaagactttcctgacttgagctcgcaaaaaaatgtgttttgtcaacggaagagacacaccgtggcggctctccgagagcccatctgtgaagattcggcgaccatcgcggttactggaacagccgaggagaggcctgaaaccttcgtaaggcgggcggcagcagcgaggagcgccagccccgtcgatgggcaccagccgaagggaacgaaaggaaaaaagtgaagccatggcgcttaacacttgcgcagacgacaggcacaggatgcccgaaaatcattctgggggcggaaagcggcagagaggcgacgccgggggtgctgaggcaagccccgaggtcccacgagcagctggaagaacgaatctctgcttttaagccaggaaaaacgccttttctcttcacaattcccccggtagcggaacagagggagggggttgcgaggcaaccggctagtcaaactgaagagcggctctcgctcgtgacgtagaaaaaggcggtgccagcacaaaatatgcaaccaccatttgcctgaagaaatccgacagcgctcaaggagacaggcaaggaaatgcggcaagactgttcccagatacaacggaaacgaggcggataccagaagaacatagtgtatcacgcctagtcgtgcatgcgctgcggccctgttctcatcgacgcatgcatcccgtcgggacactcaagcaaaaacccgaaaaaaacgccgtgtcggcacagcagcagtggctgatcatctttggctttcttatggcgcgtctgtgtgtaagggtcgtgccgctttacctcagaaacttgtacaactcgctgttgccttgtgcttctggacctaccgctgaacgtcgcggcatgcgaaacgatcgctggcacttgaaagcaacgtttccaggtcacttttgagagacaggatacgtggtcaacagaaggtccgaagtcttcttgttcgtttttcaccggaaa

SEQ ID NO: 3888 - DNA, 3259 bp, Toxoplasma gondii
  source 1..3259: mol_type = genomic DNA
cttgttactcttaccgttcctcttcgtctcctcatttctgtgtgcctgcttctcctgctgcttaccactcgaattcgtttcttggaggcggggaggttttaggagggacagggtggcctgctggttgtgagcgaggagaggagaagaacgaggtggaagaagcgacgctgttgaactgtgactgcttcgttgagatttaccggcgagagcaggagagagaaagcaggcgccagaaagaagcaaacatcagccgggaatccggggagcgaaagcggaaatcggcagagaaagacaagctgaaagcaactgtgtgagttcggactctgtgtcactgggacggaaaacgcggagcacttggagagcgattccgatgtatgtgcaggtctcgaagttcatcagatctgcataaaaaggattcaggttgaagagcaagtttcagtcgttacctctcgtgaacaggaacagttttttccgctggtgatggtggtgcttcctcctctagacacatttcttgtgggggaaacctgccaagcgttattactcggtttaaataaacggcaaaacaacaccactatttgaggtcgaacgctcaagaaacttgggtgtctactctttggcgtctagggttcagcgttttctgttgaggtgtccgaccttcgtgtttcctgccgggtcgtctcggcgcttgatgttttgaaggccacgagaaggcctagacggcaagacaaagatggcggaggaaggcgtcgactttgcaaccgaaaacacgagttactagttctgctgagacctaatgctgccctttagaggtcctcactccccgcaggtgtcgccaataccaagagcttctgtgattcacgcttgactggtctgtcattcgcgtcaggatcacggctccgactgcacacaacttttccacagcgtggcaattgttaacctgacccacatccatagggtcagcgagaagggaagtgtgtttcaaagaaaagggatgtttagccaggaagttagcgtagtcacaggacgtctgagcgggtccaaatccagagaatgcgtatgactgagtgcactgacttttctttgattccgacagaaacctcgagaggagctgacgctttcgcgctgataagctcttctgtgcggacaacaagaacagttcaatattttatgaacacaggcgatctgcccgctgaaccaatctgggaatatgcggctcaaactcgtggcttcctctgccgtttcgttttcatcggatttaacggaaggaacaacatcgaactccgacaattgaactggtgaacgtgcggcagtcccgtgagttgttgcggctgttttacagtggaaaacgtaaactatgtggagccctgcagcggtaaaaacgccggaaaggtttgaacttgttgagaatttcggaatgtttcctttccccaaccgagttgtacctctctagtaatggcatcagggagtaaaatcagcctgaagtgaaggtgagtagtgtctgaagcatatatgtggcgtgtcgccgtgtttaacttttttctccaaaaaggaagacacaggaagagtgtaagtcgccgctctagagcaggtgcatgccccttgctgtcctcttttcttgccgatgcttgctgaatgacagcaacgccgcgatgtgtcccacgacaggtacactcatgccgatctgcgtaacgtagtttcagcatcacgttttctagaggccaaaacagacgcttcctcgcacgccttcgggtgaacctgcctcacgttcctgcctttctgtgtgcgggggtgtggctattgtagcaagttcttggacagccttcgtgcttgccagttttcgtagatggatgcaggaaaacaaggttgcgcaaggagtgggaagcttggcgattggaccacgtaaacgtcttgcaaacgaaccacaacgcgggtgctgtgaccctcgtggcctttttggtcagaggagtgtgaacaggaagttaattatccattttcttcagtttctctctggaccttcgtcttctgccctagcgacccattccgttaacaacagaccacgtactccaaagtgactaactcttgtaccccgctgttatccggtttgtttttttctcgcccacgtccacctccttacttcaccgcgccaaactgccggatgagtagcgtgtgagcggcgccagacatgacctcgctcgacgcctacagaaccccagacttaggtgaacttgttctctaaattctgtttttgtccgggtatgtagggggaaaacggtgaagtaatgaaagctcgacccatcttgagcatgtgcgtgactgccgcgctcgttctattcgggctgtctagacacctggtgatggaacgcaatggaaggtcatcgatggttaaccccgccacttcgtgacttcacggctgaagaaatgtttgtttcccgacaaccagcgcgtctggtagcaggacaagcgcggcagtttcacttgtattgaagttcgagcacgctggatagaaggggtttggcggcgtgaacccgttgtaagttcggtgtgcgcgaggttcgtcacggtgtaccgtattgaaccctactagacctccacctgtggagctgctcagaaaccccgcaagcgcggtgatttcccgtcaaccatgccgctgacgtttgcagctcctctaccacgatctctcccagaacaggccgaatatgttcgaagaggcggtgcagaatctcgtgtttgcctcgggtttccgttttcgccagtcggcacagataactggcacggaagtttgcggctctctccgtcagttccctccgcccgtcttcgagcatgcaacgctcgcacagcgtccgcggcgggtcgatcctacacgttcgggcatcgaggcgcaaggagccacacgcgcgagatgcagatgccgtgagaagcagccatcgtttctggaagtcaggttggcgttgaccgattgttccgcgcctctttccccctttcgaagggactttcacgaactatttttcgaaacacagcttggttcgccgttgtcaaactccttcgtttgtaaaagtctctggcggcgtccgcgcttcagggcggtcatcccgctgagaacagcggggggagaagaggcccccctccatagaccgttggtctgtttcctccgtcgtgtctcttcttccagggttctttaggacggaaacgaggtgggggtttctgccgactcgaaaccccggacccaaccggccttttccccctctttctgtacaaacca

SEQ ID NO: 3889 - DNA, 4289 bp, Toxoplasma gondii
  source 1..4289: mol_type = genomic DNA
cgagataaattcttcagagcgcgttcgccctctccggccttctcttcttggtcccaggtcggcaagctggaccgcgcgtggctcagaccgcaggactcctgggagacgtcggccctgtcccggtcttcagctctctcgcgctccagcgaagacgagagagcagccgctttcctcgaccttccgccgctcctcctctccgaaatcgagaaggaacgagcgcggtcggcgtcgagcgacaatccacgcttccgcgggacggccgctgccgagtgtctagacacctcaggccgtgatcgtcgcacccccggctcctcgtgccgctggcgctcccgctctctctgttgttggcgaaggagcatcttcttctccaccgccagcaggaccggcgtcggtgtcgggaacgacatcgcaacctgaagctggaacaagactcggcagagaagcacgcggggggcaggcggaagaaggaaagcgagaaagatgcaagaggcgaaacgcggacagccgaacaagaaaatgtcgggcttgcgactctgcttgtcaggggcagaaagcagagaaaggcaccacagagaggcagagagttccaggccacaagctccccgcctccaccggagacagcagacagggcgaggagaggacgtgggcagcgaacagcctgtctctttgtcacctggacccgtcagcgtaagcagctcggttccgagagtaggtgcttcgtctccgagaaaatgcaaaaatttggagaaacacggtaaagcgggcaagacaaagtcgcggggcagaatcgcacgacagtcgaaagaagccaagaaacgaaagcagcggctgctctacaccacgacactggaacaggggctaccctctgtgcccgtaggaaaaatcgcagaatgtcgctgcagtgtatgtacacctcgggagacctatcaaaacatgtgagtaggtttggcaccgctaggaggagcggtacgctgaaaaccgagattttccgggtaggccctaaactggcctttcagttacgcaagccgatgacaaaggaaatgcggaaggcaggccgtaccgcggaagcggaggaacagaaattgtttgcggaacggaacacgttgccgccgaagattgagcaagacgagaagacagcggcgttctgcgcatgtccgcctctcgcccgcaaagagtcgaaaacattggtacggatgctgacgaatccaggacaaagctgtgagcgtacgtatagagctatgggataagcactttggtagtgcagtccctgccgccattcattttttctcttcagcaaccgcagtgaatcacgatgaacggcggcggcgaaaagctgcgaaaaaaacggccagtgtggagggcggagtgacgccaggctcaggtcacctccagccgaggcacacggagatgaaagagtcggggaatccaaatcagtttcaaggagaagaacgatagaggacgcgtggaagagaaaacaaaactgcagaccgaaggaagcagctctgcctcggccagctaggggggccgaggggggaagggaaaggaaagcccccagaggtacgcgtccacacttatccaggcgctttcgtcaagtgccgggagaagcaatttaaaaaaagaaccgaaagaaggaacggggaatcctcagagcgagggctgacaggaaactctcgtggaactcgacggaattttctcggtttggtacgcggccggtgcgtgcgagaagacgcaaattcccggccgaccatcctgcgtcccaccaacacaccctgagcttcggcagggtcgccgccggcgtgggtggctggcagaagggaaggagttttcgagccgcccgagtgactgtttttcaccacttcattggcatctttcccgttgtaaaaagaaaagaaacaatttcggtgcacccgcaaagctccccggtccctgccacgtcattctgggcggcatgcggcggtcgcctttgtgtatgcctaacccgctgttcacggtccaaattcagtggaaagattctatccggatcttactgtgtttctgccacgctgtgcggatattccagatatcaagagctcactccagcattagaaaatccagccgtagcaacgccttcaaccgtagccgctgtttcaacacgtaggcggtcaagcagccacccaccacagtgtcttgtctgctgaccatcactccgataggcattccttgcggaggcactctccagaaccgctcgtattccaagatagattgcccccgtcgccacattttaagattgatcccgcaggccggctgcaatgcgtacagtttaattttctgcaaaggtacaaacacatctgcctgtagaggctctcaccggaaccactattactctggaaagtacatgcactgttgtcaccgcacatcaatatatcaggcagacagccgcagcacgcgcattctgagattctttcagccgttcaagcacttctgtctactttgtcttgcagtcctccacgaccaccgatgatcctcatgattgactgtggcaaatggacaaaactggatacactgacttgaagaaggcactactagaattcagacaaacctgcaggcaggtcacgcgatatgcgaagaaaccgctgatcatttcagttcagcattgactccaattcgtcgtgtgtgtcccgtgctgccggattgtacaccgaccaatgtggcacgctgcccagtacactaaggcagctggtttgtgccagaggcggttgcaataccattcggataacacctgaagctagacacccctgacacattataaagtgggaatccaatgatctgtgaagtgtacggtcgtcccaagcaaagcgacgaccagcgttcacagtgtttctgcgttcatctatgtagaatttcgtatatctggaacgacctgtcagctgcccgctggtcgaaaaatggcatcccaggcatctctcgaattatggttcttccacaagaaccagttcagggcagccactgcgggcgcttctacgaccattagcatgcgtgcctcctcttctgtgcacccaaggagtccttcgctacttgcagcttttcagactttagctccagatccaggtaatgcgtttagttccagagtactttgaacgtctgggcgtttggtcaaatacatacatcgcacgggtgtatcccgcgccgtggctagggatactacggtttgtgctttgcactacaaacataacatgttcctgctgtgttaacaagaacagcgggaagcaaaccagcaatgcatggtgaccgccgactcaaatatgcagtcagcaaaccgcgcaatggtgcaagagcccaaaccactccttgcatatttggtccatcatcattacactcttctgctcgtgttgactctatctccatgccaatagcttggctgacggcttctctgagaagcgcgtttgttgtttctactgctcacgcatcaccggagaaaatgcgtctaccgcatcttgatgagccagaaggcggcatccagaaaaagttgcgatgctgctatgtttcagatgttacatgcactacgttgcgcgatggggttttcttcggtgaaatgcccggatgttgcgagcatcgtagtggttttcccagaggcggcaacggccatctggtttctgaaaaatggtctagcgaaacacgtggctactaaagcgagtgtgcatctttattccgtcttgttcacaatgctgactagtgacctcaattgacctgagggagtgctcccgaagccgacgctcttcgctgtgccgagcacggaaaaacagaagtagcgtgccgcctggcgcgggacaggtcagctgattcttttcagatgactcatttgcggttatcttccaggaatgaagacgtttttttcttcaaatctgatttgttccgagagtattcttacgtaaaagttcacatgtgacggactcgccgccgctggactgcgcccctcaaggcatgcgtgcggactcgccacgacaacgcagacaagctactcccgacgagcagcgaagcagcattgtgtcttgccattttcttaaaagaaaaggcgggaaaaggacatttcaccgagacgtatgtattattttcaacccggcgtgaaacagcaacttccaggggtgtccatttctcgtcctccgaagaaactttcttcgcgcactttctcgggcgcctcgaccgccactgccgatcgacaccccggtgtcttcaaaagccgtcgaagctcgtctcgtcgtttcatcgcttccgccaaaaactctcgcgttttccaccatttcacctagaaa

SEQ ID NO: 3890 - DNA, 1659 bp, Toxoplasma gondii
  source 1..1659: mol_type = genomic DNA
cgtacgccttgtttatggcgattctatcgatgtccttcgacttcgtgccggagcgagtctcagagtcgccgtcagactcagacgcgaacagttcatgtgacccgccatttgcctcacaggtgacagcctcgtcaccagtagagtcgtctgcgtccgtcttcctcttccttcccttaactgaagcatgccccgtggtatctcttttcttgtcaccgtcgtcttcatccgactctttctcctcgtggcagccgacattcatttccagcagcctgctcttgttgttcttgtgagggactcctttgaacttcttcgcagcatggcgagacaatttgccagtagttttttcatccacagagacctgtgttgtctctgttttaccattcacagcggacgagcactcatcgccgaaagaatcgccttcctcagctaactttgttctctttttttccttcttccgtggttttccatgtgaagaatcagaagccccttcacttttggaacgtgacttcatagcactggcgcacccttcctcgtgtttgctagtccccatgtcggcgacatcttggtcaaagccatccggatggtgtcgctttttttttttctccattgtcacgcaaaatataactcagactgtttgtgtaccagaaaaaatctaccctttagtttcgtagccgttgcatggtttagtcgttttgacacctgtaaagcgtcttttagccaggactccgagaaaaactccgagtggctgcggctgcgcgtagaagcaggcaaaagcgagaggggggttgggaacagttggccactggctttggagacgagctgtgttcacagaaaagaagcgaaaattggagcgctttgagctggagcgggggcagcaacttctttttcaggggaggcgacccaaaatctatgcatgtcagcgttgtcacgagatagtcaacatttcctcagggcagcgaagagtcgggaacagcgcagcattgacatctccacaggattggtagctaaatttttagccagcagcaacttcatgccaccgacgaggttaacaataaagatatcgatagcgatttcggtacctctccaccggccgaggatgggatgtctccgtttcccctgccccgttctcgtctaaccttccggaaagcatgcaatgaaaacatgtattcatttgaggagggccagacagccccagaacggttagtcacacgcagtctgcacgctctcgtgagaacagaaacggatgaggcaaacagtgtgtaccgggttcgacgagcataacgtatcacgattctcgagtcaatgaagactgttaggacccatgagagtgcagggatatttcgttcttctacatttcgtctttcttatggcaatgctcctgcgctgcgcaactccggtatctggcatgcggaacgattttgcgggagagacgaacgcgaacattgtcaaaagctcgcggcaccgtccgagaagaacttgcgtgcatgcagtcggtccattcgccgtacggaaccgtaacgagacaaagcatgtgacaagttcgtgagcccagaatcgaaggtgtttgcaccacaactttcttctccacttccgcagccgtgcatatccgcacaaacagacatatttctgcactctgtccttgtctcttcttgtccacaa

SEQ ID NO: 3891 - DNA, 4654 bp, Toxoplasma gondii
  source 1..4654: mol_type = genomic DNA
agcctcaaatctctttcgccctcgtttattgcatgagtggttttcgacaattcgtccttcagtcccagcaggtctgaggccgctagacgaagtaaacacagagtttctcaagtcaggaaggcaagcacacgaacaaggtcggcagcgaatgccccccgttactgggtcgatgctgggggtcgactgagactctcgaacgtgaacgttttgggtcaacggggtgcactcggagtatctcggctcgacttcgagccggctgtgtttcgccggcactgtttggatgcagttttctaagatggacaaatctgtcttctcctttccattggaccgtttcccaacttcactgagaagagcgaaaacctttcagagtttccagggaattttctcaccaggtgcccacgaagattttcacgggaattgcggttttatcgcggttgtctttgccgggttcgggccggacgagctcgaagacttctggttcctttttggcggaaaagagggcgtctccctcgaccctgtcgctcctgactgtgtgcggactcttcctttgtcgcgcagactctgcatcctggagcatctggctggcatagcgtccggcggaaatcagttctccgtcgaaggtgccgtaccgcggcgggtactctaccttgcagcagccaaagtagtccaagaacgagaatggctgttcgcagaccactacgccgcatccctcggcagagagacagtccacagagaccgcgacgagaggtgtcacgacgcggcactcccaccgggtgccgtcgagttcagcctgtgtccctctgtctgacaacgccagacacgcgccatgcgggggttcctgcgccactttcgcggtttcaggtcgcgctctttctgccggatcttcatctggaaacaacgcgtcgactacaaggttcgccaggcagcactcgggcaactcggcggaccgccgtgcgcctttcgaaccataaggagtcgtttcgtgggtttctgaaccctcacgagtgctcgactcttcgtactccattgctcgaaacagccaacagggaacaacacgaaaaccgatgtctccacagagtcgcagtgctagaagcggctagcgcagggaccggcgttcctcgaagtccgcggaagacccggttaacgcagaaaaaagcggaaggcgcggggcagtttaccgccgtgttcgtgaaaaagagagcgacgcggaagacgggacggcttggtctcaaagagaagtcctgaaggtcgaaccccagagtctatgccagagccgctggcttctgctggggctgcaggtcgctgttgaaccctcttcgcggtgtaacgcgagcagggctggcacaaaaaagacagaatatgttcatgtttcgaaccgcgcgggacggaactgagatgaagcaccagacggaggaaagaggcgcgtagaacattcaggatacctctccaggatgcacacctgagcacacgctcaggatctcgctggagaaagtggcacgcagtttctccgttgtgccaggacgccgctctcagcagggaagaatgttcaaaacactaaagcactctacgcagcgctaaattccgcggcttcgaaagaacagtgtctcaaatatttactggctgttgagcctggcgtgtgaaggaacgtggctacttgccgcgcaagaaacatgtgggcttgtcgctccggttctccgagccacgtgccagcagactcgcggggccgttcagtccgcccctgtttcgtagagaggaaagttgcaccgccaatttataatggagagacgaaactcgcggaaatctaagtcaggagacaattcaccgcaaaaatctaggcagtccccccatttctgtatcgacaacgcggcgctgcataggcggcttgcgcgactgccaggaaaagcggaatctttcctagacggctcgcccagtcaaaagtggataatttagctcttaccatttgcgatgaaactcattattgcaacagcgcaagcagtcaggaggagattcggtgttatttcacgcgcacaggcaacgtgctaggaagcaaattggtgtcaacggtgcctctcattcgaaagtacgcttgcacgcgtagtcgctgcgcgagtctacgcgaaagggatttttaagctcacacggtgcagtgcctttccacctcgaatcttgaaagcttcgcttggattatctttcttgttcgagagcgtcttcatcagaagcatacacagtcgctgcctcatttaccgcgcaggtcgatgtacagcgtacaagaaactaacgggggttagaaccgatggggacagacagaaagcgcgtcgggtgagctttgcagtttgtcaagttgtaggtggcacagacagtgttgaacgcagatagttttcattccaggggctcgcatggtcgtagcgagggatgtggcggcacagtaaaacggaaaaaacaggggaagttgccacgtcactcaggacagggcaacaaaggtacaagcactgcggtaccacggacagaagaccactggaaccaggcagagtaataccattcgagtgatggtagagaagctcgtgatcagtctcgaccttgtttgagtttccagcttttgcccaagtggaggcggaatcgagtctaaaaagcggttaatgagaaatggttcatgtctgcgaaagcggagtctggtgttgtcagaaggcgaacacatcatagataaaggtcagcgaatattcaaggtaccataatcacataaattatgtatcaggctgtcgtgcggcttgttcaaggatcagaaaccatttcaaacgggcatgcttgtcacggcagcccaagcggagcttacatgaaccagcgtttgggtcagaaagatcgtgttagggaattggatccgggtagccaagatcctgacccaaactagtggtccagctcgcagtatatcctctccagaaattgcttatcggtacgtctgtctcagagaggattcctccctgtacggtgggactagtcacactcgcatatgagtagtaggtttctttcgccgttaatgcgagtggtgagaggaattgatgtgtttggacaccgcagttagcgatggactcagcaggtgccatcttgtctatggtgggtacaccgtttgtgagacctgctaacaagatacaaagatgcatgatttattccccaggtcacgaggaaatcctgacggcagtccgcggcttgtggcgattgttcacgtcgtagaagatgattcgacttattcgattgcattcagttgtgagacagaattccgaagcatccacgatccaccctcatctgcagacgactgacagcgccggacacgaagcggacgatgcggatgcctgttgactggcgacagcatgtgggggttttcaatggtgctggaaatgaacttgaactttcaatactgtgcaacatcctgttcgtgtttttctcccttattgctggccagccgtccctgaagcgctacgacgggctgagatattgttcccgcaacgtgtttgcaggcgtggacaaagcaaacgccactcaggctccgaagacaagtgcacaagtctaaaaactgtgtttccttgtctgccccgcaaagaggagggctttaaagtagaacgtaagcgaggcattgagccaattgcgctgctgcacacgttttatgggtgacaggggtacattagatggcgtgcagtgagcccctttgcgggaagtgtacactaaactattttccaccagagaaacctgtgtctgaacagcgctaatggatgcctgctaagcccttcttagacagccgttagcaaggaccgccttgatttcttcgacaaggagacaggttggccgtcgtctccaacgcagtcgtcacttcggccgacaggaagagttggcatgttcggagtatctacggctctaaccagcggcaacgagtgtttttccagccgtgtacgagtacatgttgttagggtggtcgccatacaacgtggttcgaaaatctgtcaccgaatctgtcaccgagaaattggaacatcgaaaagctaccgccaagaaactgcacaatcgaaaagctgctaccgagaaactgtaacgtctagaagctacaaccgagcatcgcttatcggtagccccggtagacaacagtagagacataagagcgccagattgttcttgtgagcattttcgtttcaccgattggcgtgttttcaaggagcgccacctccagcgttgcttcaccggacgttcgatatgtgtacactatagaaactttctttaggggtcactcttcgtgacaatcatttctaagaagacggggatacagcgtataagcaaggcaggggaacctcacagatgggacagaagagtgatcgcttatggaaagacgacagattatgagcaccgcggtggctgccgttatgcaggaggcgtgttcgtgtgctctctcgctcaatgtgtcccacttcgcccgacaggagatttgcttgcatggactcatgagttcttccacaccgtatcatctgcttaacggaggttttgacagcaaaggggttgaaaaactgatcaactgcgagacggcaaccacaggttgccggtactgacagcaatttgtggtaagtgcgcaaacacgcaagcgtctcccatcccgccggctgtctcaccaacggga

SEQ ID NO: 3892 - DNA, 1779 bp, Toxoplasma gondii
  source 1..1779: mol_type = genomic DNA
ttttgagtctggtgtaaactattgggtttcgccttgtggaagcatcaagcacgggcattctcctgtcaagacatgttttactgcaggttcagtaaacaagaatgttactttagcagtgagttgtagtgatgcaatcaccggtagcgaaaagtgatgtcgcacccctcacagtcaaagggaacgtgtcgtaacgagggcgggtggctcttcgccgagtaccatcactggaaatagaaaaattcgctctacaagtagtaccaatcacagaatcagggaaggacttgcggagatgtagtttcgtagtaccagaacgagggaagattcgatggctgtgacttccgtttttcgcttttgcgtcctgcgtttgtactcggtcagactgtgtagtcagtttgatcctaggagatgttttccgcgtgtctcgtttagcgaacttcgaaaggacttttttggcacgaagcttttcggaaacagagtgaactaacgccgcagctgccatgattgccggacggcaagagaaatgccttagtcgcgtcgtacttgtctcgtacctgcagtggagttacgactgctactggtgcccctgtagctgttgacgaattagagggatgattgataacgggactcgcgctgatgttacacaccagcataaaaggcactgtaggactagcggtttcagcacgagtgtcgggtttgcaggcagcagtttttgtttcctcttccaaagctacttttcccatggattcaagcctattgacatgtagtatgcactggcctcagtcagctagtcatcctttggggcagcaggggctgaatacaattggctgtcggtcaacgacggggcgtatgtctgccttcccgcttcctcgaaagctgtaaaaataagacgaaaacatcccgctgacagcacttgagatacgcccacaagtgtccactggcctttcgacagacaagccaaggtcacctttcacgtacatttcacgcaaggaagaacatctaggcagagaggcacagccacttgcttggcaccaatgactaaacgagaggttcttctgctgttagacagagcccctatggcggtacaaatcatgtgactaaagccctctgctcctttctttctctgcagacaatatgccggtctacatatattcggtaaactccgtgggtcttcccagcaaatatgtcctctctcgaaagacgacgttccagttcacagccgctgttgccatttttccgttcagagccccaggaagtttctcctcaaatagaggtcaccaaagctgaaccgtcttcgttctgcaacgatagaagctaaactttttcctactagagtagccccacattaggccgcctcaataatgtaccactggacagcgtctgcagccgtctttaacagacgggacagcgttgcatgcagttacgcacatgcacacgtgtgccaacaacgtttgcttgtgaattaatcggtttttcactcgcgccgcagaggcgttttcctccccgcattgtcgtttctttttggaaaccctgccttatctttgttcagtgaggcagggacgaaaatagtttgccttcattgtcgtcactgctgctgtgcagtttcttgttgtcaattccactcgtgctactaatcctcgttcaacgtgtgtcccgccaccgagccggtacacccttttccctcccgagtccagaaggagctcaagcttccttcttgcttttgccgccctcgtttcatccttttttcttaatctgtgggtcgttttccgccaaagaaagcca

SEQ ID NO: 3893 - DNA, 1907 bp, Toxoplasma gondii
  source 1..1907: mol_type = genomic DNA
gccaccgagagagaagcgatgggtagagaagcctttcccactgcaatgatagaagctgcatttacaatcagacagtcgctgaagtatgtgcggcggctcgagtgagcatcatctgataccaatgaagctgaaagtctactcgatgtgcgcccgaacttccgaggcctttttcaccatgctttggaacttatcaatgcttgggctgttgcttttacacagggaaaaagcctttccagttaaaaaaagatcatgtcgtatcctcttttatggtgtctgtttcatttttggaggctgcgctcttggaaatgctcacgaaggtggggccttcgatcagtgctttgaccaagtgtcagtgtacaaaacccagcggatggtgccggttcaaatggaggtactagaaaacttctgaccgctaatcgtctggagtttccgctagaatccaatgccacgcagagtacagtattcctgccgtgctgagaaatctcagcattagatgcaaactgggtatgtatgaattctgtcttctcgacaggatatatactgtcaacaccgatgtgtggcacgaggagacaacactcactgctggtcacgtgtgtggtagtcagttaagcgtagcgaggatcccacgaaaacagatgacagctgttatttaatccatcagcgatgtgagctctcccaaaatccatcttgcttcgttattggggacgcatcttctgcagactaccactggcaggtcaatacactctgctgttagagtgtcgttctggaaattgtctccatctatacttgacgcattcggcggtctcggcggcagtgcgatgaagcatcacgttcaagtctcatacgtcacacccgaacaaggggcccctgcaagggtccgtccagttcatgtgtaagcatctgtcgccgtatgctccgacggtcgggtagttctagcgaaaagataagaagcaaggcggacatatacagaccagccatagggtgccgtccctgtcacctggtttagacagttctgtatcgatcggcttgccatgattttctctccaagttatggcatttctcatgtagatcgtttcaagacacgacaagtgagtactgaagtgtaaccgggatacgcagccgttcaacaccatgttgaagggggagagagtcttgtcccttcagggtgacaacgttgtgcagatccgtacatgctatcagccttgtttggtcggtgagtgtaagattttttgtacgtcattgcgtctatcgtcccgcgtcggcgttgctgtctgcagcgcatcgtggcctggcgccgacttcactaagcccaggagtgttccgccgagtcataaattacctcttcacataacaggcacgtgtacccgacagcggtgtacaacaaaacatgcgcctttgtgcttcggcatacttcctggaaggagagagcgtcggcagttccacagtaatacaacgtgcttgtcgacgctggagagttgcaaaagaaatttgtggaagctgcgcggatgtattccacttaaagtgcaactcttccctttgtttaatttttttgtgaaggatgggaaggactgtcgtttcaaaataatgttcatgtctgtcttttgttcaaaatttgttgattgcactgattcacgaatcatcgcctcgtccgatgcctcttgtgactaggtcaccggtgtccgtatactgttccaaccgagcaacgagccacattgggctcagctcgatgctgagtcatcgtatgagtccaccaataggcgcccacgatttcagcggctctttactcagattcctgcctcgttaaagacgtactggtgcccaggaataatagttgtgaatttggtacttctcatgagaaccgcattgcctgattacgaaccccaggctgaagatattactgtagaaca

SEQ ID NO: 3894 - DNA, 2632 bp, Toxoplasma gondii
  source 1..2632: mol_type = genomic DNA
tgtgtctctatgtctgcatgtctccgtgtaaatacattcatgtctgggtgtggtgcgtcgaaatatttgaatgcctggcgagcagccgctgccaaagtacatgcggcatatgtactccttctatgtggatttttcgcaagtgtacgcactgtctatcactccagaaaaggcgaatcgcgtgacggccagtcggggactgcagtccaccgggcgcctgtctctcgtcaactctttgtaaccgaagttttagcgagtcgcttttccgctgtccacttctctggaactcgactcagtcaggaccgcaaaaggtcctgctgcttctctgcctctctgtggggagattgagttctgtctcacagagactgcgacgactcgtcggacctcggcgagcctgtctgctcggtgaagcctcgagtgatgcaaggcagtgaggagctgagcgacctcgcaacggtctgttgctcgtggagcgccgctcctctccctccgagagacgagaacatccgactcgcgagacttccccggccgctttttcgtcgggtgtgtcggaaagagggctaccgcatgctccattcgttttcacctttcgtattcaccccattctccgaagttcgatcgaagacaactggcatccacagagagaggacgaagacaggcgcctccgctttttttcgactggaaaggtgactcggggactctcaactgtgtcgcggcgcggccgctcgtccgttcgtttcctcaaaagctgtggggtgcgcagctcccctgtcggcggagaggcaaaagcttggcagcctcctgctcatgaacttggttcaaagaacgtacaaagacacggcacaagctggcaggcggaaagcgtccggatcgcgctgcggctccttcgtttatctcactcgcaacttgcgcgtttccgcgatcgagtcgaagccctgtgcacttgaacgaccttatgctggagctccggcgatgcggccgcagaaaaacttcaacagagaacggtctgtcgagatggcacacatgctcgagaagaaagagccagcttttgtcttggcagtgaatgtatgggaagcgcgcgcaccgggcgcgctgaaagaggcagaaaaacctgtgcaggagcgctgaaacgaagccactgtaaacgtcgtgatggcgcgcgcgcggcctctagaggacaaagagctccagcaacctgctgctccgagaaccctctgtgaagccgcggaactgacgagtcgctcctcacctctgcaagcgcgattggagagtccacatgcagcagctgcaactgcgtgtgaacagtcgaaccagacgcgcgtgacggccgctggctccgccgagagtctgcaagtttcgcgaaaaaaaggaaccacctcagtgtgcgcgctttggacttgcttcgctgcttttctcgagctccaaaaagaggaaaaaacctgcagtgcgcgaggaaagttgcccctcctgcgccagtgccgcgagccgcgccttttcctgcccgcctatatgctgagagaggcggtcggcgagggaaaaagaacgcgtcttcgagccattcgcttcgactgtcgctcgacgtctttcgcgccaatctccagttcgctcgcttgcgcagttcctcattctccctcgttttttccatccccgcagaaccgcccccgcggcatctcctcacgcggttccgttccctcgtcgcgccttttgagttaaaaggcctctcaaaatcgatcttttccagagttcgaaaagccatcctgtctcggttcttcttccgcgtctgcttgcctgcgctctccccagctcacgcgagctctgcagcacaacgaggcgacgccaaccttctgaggctgcttcctctctgtttctctccgacgctccacggcttcgtcagaacatctctgccgcagtctctcgttagactcgcgaaacatctcagccgtacttcgctctctggcttcgcttctgctcgagtatatatgcaacctccctctgcacaggcgcatgcagctcttcaaatatccaggtacgtggatagacgcacttacatgcagggaacgaaggacgtagaaaggtgagtgcgtttcttgtttgaggcggaggaaagtcgatttgaagagccggagccgcgtttcgatggaggaggacgccctgcggtgtttcttccggtgtgtatgtactcgttctctcgctcgcttctgcttccttcagatttctcccgcggctttccgatttcctcctctggcgcggcggctgtccatcatctttcccctctgtctggggcatgttcttcttcctcgttttttcgtctggctcctcacctttgctctctcggagacaggcgccctggtctctccttttcagggcgcctttcgacttcttttcgacaaagttttcgtcgctctcgcctccctcagagaacagtcttctcctacgaagttccctcctcctcagctttcttctctcgacctccatccctccgttcttctcttctgcctttctctctcgcgtcctcttctctctgttctcttcctcgtctctcttcctctcttaccagaactgaggttcgttgcccggcctccctcacttgtcgtcaccgatttctcctgcacacgagctgcttctttttttcgca

SEQ ID NO: 3895 - DNA, 1870 bp, Toxoplasma gondii
  source 1..1870: mol_type = genomic DNA
cacctccgccgtattcgttcgaggaaaacgggaggcgcgagaattgctcagagcctcaagactgcatgttttctcctgaacgcggtgcatgtctctatccggggagtgggggcgacgcctcacatgtgcagccgggacaagttcaactccacgacgatttccaagtcgtcctcctcgacgagagagacttttttttgtgacagaaaatgtttcttgccactggggctttgcttgcttgtctacgttcggggatgtttttctcttgagttgtttcgcttcgcgtttcgctcttctatctgggtttcggaaggtttctcgtttcgtttcttgcctagagggcgcgtcccgattcggagtctccttctctctatccgcgtttgtgtttttgcctcgacgtcgaggaccgtttctctgctgtgttcgtctttgatttccggcgtctggcgacaaacgcgcgcgagtctgcgaagctagacgcaggtcctcactcgagaaaaaggatggcccgcgctcagcgagtcgttctctgtaggctccgaaccgcacgcagagtcgtcttctcgcgacagacagcactacgtggatatgtataccggaagggatgcaaatgaacatctacgtgaccaatagagacagataatcagatgtcgatagattgacagataggcatagatcgatatatatagatagatataggtagatggatactgatagattgatggatagatgcagagagatgtagatatagatagacagacagacagatagacacaaatatatatatatatatatatgagtttagggtgtccgcagcctcactttcgacgtgtggtggatttcctctttccccagttatttgccaaccagacaaatgccatggattggcaacgcgttgccctgcgttttcttgctggattcatgagagacgttgactggatggactatctccacacaacagagcacaaggtcataaatttttgtggtggcgtgtaaatgaggtgaagtcctaactaatccacctattgcggtccgcaccctcgacaactgaaaaaacggggagaaactccaggaaacactgttgaagacatggccttcctcgtgacgaacatccatgaacgctagcatggatagtgatcaaccgccctgcgacgtattccgtagaaacaaaaaattgggcaggagactaccaacgtgcgtatccttgtacagcttaatatctgagttgtgcttttctctccctgctaatgcgacagactgccgtttatttatttcatttgatccatcacaactgtaaacagacagatgtcggtatgtctcttcgtcgtgtgtgtctcgtaaagatggcctgctggctgcggagacagcacggagtttgagaatgtgaggggtatggcatccgagaacatggacgtcgacgaagagcgcggaagagacgaatcacccgcgaaggatcaacagatcaaacagaagaaactgtctttcgtttgcgtgctatcgtccgtatgtgcgtccatggtataaagactcaagacttgcatgacgccgtcgcccgcgtcgagagaggcggaggagaaacgcgacggcagtcgcttcagctgccggactggactctgcaaaaacacgctttcttctttcgtttttcttcttccgtgaaaactcctctttctcgcttggcgacgcggaatcgtctggtggacgtcgagctgagaggtatccgccgagggctctccgctctggacgttcttcggagctccttctgcggcgaaaaagcatggtttgccgtaagagacgttctctgtctgtccactgttgaaaggtcgaagacaacgaacgaaacagagaccaaaaggaggaaggcgaccgtggacga

SEQ ID NO: 3896 - DNA, 4970 bp, Toxoplasma gondii
  source 1..4970: mol_type = genomic DNA
tctcgtaaggtttccaccctcgtggtgacaattaattcccttcaaaatctctctgtctcaatgctcttcttcgcgcgaacccagaaggccacgggacccgccttaccctctgctgcacttcggccacgggcgatgtcggttcttcttgagacacgcggcgggtcccctcaaatcccacactcgcctcaagcgcggacgtcttcgcaacggcggcagcaagtcccgaagcactgcccctcgcccccggagactcggttacgcccacacccgactctccggcgtcgaggcgcttcgggccccccgtggtagcgagcaacttggcaaggcggccttccgcggttagaggccctgcggcgtgtcgcgacgcagccacgggtgtagcgtcgtcggcagttccggcactgtctcgccgtctcttgacagaggctcgtcttgagcttcggccctcatcccctctgctttgaaccgctccaactgcgatctttgaatcagcagctcgaggagttcggactcgagcaggagcagtctcctgcaaggcccgagtgccccgggggcccgcagtcccgggggtctgccctggcgcagacaaggggagaacaagcgacgtttgagaagcggctacggggttgcattgaggaaggactggtgcgaacgggaaacctgaccagcttgctgccgcggagtcctgggaagacagctgtcctgccacaggcaaggcagcgacatcggagcctccagtgcgatgccgagagactgacacggcgtgttgagccggcttgaatccggaggccccccctgaggatacagagtcggtgtcagcagactgcgccaccgcttgctgctggagtcgctcagctgccagcaaaagcgtttgctgactgggaagtgcgccgtaagtctgagaccacaagggggaaaagatccaatctcaaaggtcaggccactatgcaggcgcatgcagaaactgtgtgctcaaaagacaaatgcatcaccaaaagtccccttgtatgtgttgtaatacgtctgaccagcgtaggagataaccaagctgtctccaaggctcaaatgacgggtgatatctaatgggacgcaaaggaggcacccattaaaaacacagaaaaaaactggacaaccccgctgtgtacgcagaactatgtgcaatgtgtgtgaaagagccgttcacatgacgtaacaaatacaaaggacgccgaagattgtgtctgcaagtatgccgtgttatggatatgtccttttacgaaacacaattttcgggagacgcacacacaattctacaacgtgctagaggactagactatcgtggaagagacacgaacctggacaaagcgaatgaaacactcggcgagacactttgccttctcgtagccgtagtactttgcggaatacgtccgcatgcaccgtcggccgtcttggtagtaccgagttctccactcctgaacagaaaagccaaacaacaaacaagacgaattatcggatcacccaacgacagacctgcccccctcccggatgaaaacaaattaggaactcccaggcagatccatgccacaagcaatccccttgtttctcgcgcgcatctccttaactggttattttacggtctagcaccagcacgccacagtctccctggtgcctttgcccccgcggagcatcacacgagacgtcatccaaaaccccacagccaagcaaaccttccgttccgctacagccggtctccatactaactaaacagacaagaacggtaacgacaaaagtcgcgactcacttgtttgtcagggtggtaagatgccttgttattcccaatgaacactgtcctcggtttctcgccaactcccgcagcctggcccttctcttgagaacccacagcggctgcagccgcgtcgcttccactccttgccaggctgcggcctgttccccctcctcgcttcacttgaccagcgtgagctcctcgccccgtggaagtgcaagcgctgagaccggcggctgtctgtggagtgagcggtgcgtctgtccgcacgcgtgactccatctgggtgcgctctgcgggcagaggctgggtgaacggcagcacgccaaggggctgggtagtcgacgcgcgtgagcacgtcgtgatttgagcgtttgcgaaggctgacagattagctgctccagcagtggagactggcatctgccgagccaactgttgtgcctggagttgctggaaaaacagcaacaaagcggtctcgtcccgccgcttgtcctctggtgtggcgggagcgccgtgctgggactgaaggagacaggagagcgccgctagctcggctgccgcattcgccgaacccccgtgggtcggagacatgcctgcaggtactccccggggccgcaacgcagcaaaggcctcacgtgtctcctgactaggggccacagagacccctccgacggagacactgggtttccctgcgtccgatttcaagtcacccagaacagacaaagggtcgacgcggttggtgacggcgacgccctggtttctggtgaggagttggtgccactgctccttctgggagagaaagacagcgagtccgtctcctggagctccagggggcagtactcctgacgccgcgagaaatcctgcagggtcgatgtgagagggagatctggttgacgagtcggaagcggactcgatgcctcccatagatgtggcacagttgatcgcagcagctgagaaggcactgctgccgctggtgcctcccgaggtcgcggcggacggtgaggcgtctggactcgtcgtgcagttcgtcgaacacgaggaaggggtcgcgtcgacggcgttgacaggagtcagcaaaccactgtcgtctttgcaaaccgccaacatgcacggctgcgacggaatgggaggaaacccacggggggcaggggttaacggttggcactccatggcgccagctcctgcacgcttcacactagttcgtaccggagccggggcaccgagaggcccggagatgggcacccgtgcggaaaccttgaacaatgaagatctaaacagtttcccagtcagtgcgctgacgatgtctcaaggtgcgggcctcacgaagcgtcgacctccactgtcccctggccgcaaggcaccggggtcgaggcgagactgaagggtttctcgctgtttaggaaggcgaagaaacgcgaaaacaccgacaatagacaagagaacgcggcaacggaaggttgcagagcaagacggcaaaaaagcagtgcctgcaaacactgcttcctgaccttgtcaggcgttcacatgcaacacggtaaaggattgcaacacgaacaccagaggagctcaaacttctatcaatacacagacgttcctcctatcttttcgtgatggggggacagggtgtgatgtgagtctccgtgtttcacaagagttccaggtaattaaaacagattagccgtaaattcagcggccgggagacgatacctcttcactaacggactgaagaaaacacagtgccggtggtgtggataccgtagggagagacgcgcatgcaacatcccacatacgcgaaaacgtgttgtgagctataagcgatctcgctattcgaaagcggtcagtgctgcggaactgtttttccgtcccgagtgcctccagaagtggaactgcaccagcagccaacaccgacacgccgtgagctggtgtagaccggaaaagtacgccacgctctcgaatgagttttgcaatttttcctcgatgatcaaaaaaacttgcgaattttgatatcaaaactcacgtactggaggccgagagcgacgaaagggtgcaacagcaccagccgacatctacgaacaagcacacctcaagaaccagcggtttatggactgactcctgagtgttggttttctccaacacagaaaactggagggacgtaatacgcgtccacacacataacgaaacgaaacagcacacgtattcggacagcttctgtgatctcgcgtatatggcacgaggaaggactgtccttcggacagcgtgactcaaaaggccgaatcccgaggaggaaacaaacttgacagaattaggaagaatcggcaagtgaggaataacttccggtgagcggaatggaatagtaaaggttctttaagcaacgcgagaattcatcctctccgcaacgcagcggcgggagggagggcggagggagaaacgacagtgtcgtcgaaacgcgctcggacagtgcgtttcagacccgccaaaccgtcgagccgacgcggaaaaagtggagaaatccaaaggagtgggtttttcccaccggaaaagaaaatatgttccgacaggatcggccacagcgaggggcattcggagggcaaaacccccagcgaccgggctgccttgaaaaaaggggtgcgtgcgtccgaatctaatcgacggaagatgagagagggccggcgaacaatggcagaaggtgttgggaacacgtgcacagagtcgtggcattgaaggaaaatgaatcaactcaccccccgaatcctgtgtatcccgtatcgctagtcattctattccgatctttacgctgggaaattcaaaaagactctgacgaagtgagcaacagtatccgtctcacatctctgcttcgctttgccactcagcactctacaacagtggcggagcccctccaccatatcgccctcctcgggttgagaaaccacgcgacctccaatttcgctggcgacggagtgtacagagtacccacacttgttcctccaaaaaaacaacacccatttcatgcgcgacactctgcagccctccttccctccggcctctgctctggtgggcgggacagggagggcgggaagtgtgttagcgcgctaaccccgataccagagcgacgtggccccattgacgaatggctggtatgctgatcctggccctcattccttcggactcccagtcttcaggtggcactgtcagcgcgacccccgcagga

SEQ ID NO: 3897 - DNA, 709 bp, Toxoplasma gondii
  source 1..709: mol_type = genomic DNA
gagaagaagccagaacaagcgttcgcggaagcgaagaagaagaggaagaagaggaagaagaggaagaggaagatgaggaagaagaggaagaagaggaagaaggaagaaggtcaaggcgaagaggaggtagagggggggcagctagaagttgttgaagagaacaagcaggagaagcaatgcgacgagggtggtgacgaaagagccgagacgaagaggacagcggttggcagtttgcttgaaaagcagaagtcttcgaccgcggagagaggggagaggagggagaggggggagatgagggaaggggattacaggaggaggatcttgtgaagccatcgttccgtgaggccactagcgactcacaagctgcgtgaggcactgaagtctgctgggcgtgaggaggcgaagtcacagacaaagaggagggaggaaatagagcggaaggaaaagaggaagacgagacagatgaagggagagagggggatgaagagcgtggtagtttctcttcttctcctgcggcctttggaagaggcgaggccgactcaggtggagtctgggttgtctcgtcagtgccgttggtctccatgtttgccaaagaggcggtgaagaggaaatggaagaggagccggacctcgagaaacggctctcttcaatgaagcgcatgagcaagtgtgtccagttattaagaaggaaacatttaccaaaatccaca

SEQ ID NO: 3898 - DNA, 2334 bp, Toxoplasma gondii
  source 1..2334: mol_type = genomic DNA
tccttttccgacggttgtcagattgtcgacgcgtttctatacgtttctctacctctctgtgtcgacccgttgacgtaaatccttgtcagaatcgcatttacctctctctgtctctctctacacttcgagctccctagggtctctttctgtttctttctgcggcttcgtttctgtatctttatctccaagggagaacgcgatttcctggcgcgctggaagcaaggacagaagattccagttcgcttctcttgctagaccgtttttttcgtcctctcctccaagctcgcgcgtcgtcggtctcctttccagttccaggtgctccaaggttccttcctctcggtgacttccatgcagacccccggtgctcatctcctgtgtttgttctgctttctccggtaaacagaccatctgcatcagcgtgcatgcagtcggaggacgcctaccttgtcttctgacttttgatgtttttttttcccttggtgaaagctctcgattttctcctgcatgcatgcatcctcgctcagatcccagtgcccagtgtgtggccggcgtctccgttttcccctccgcttcctgtttctactctctccttttctctctcctctctttcatcctgcctctttctcaaggaaaaaacagagtagagagatcctcttttcaccacagtctctttgtacgctgtccaaaaggaactcaaggcgacatgagctcgagcgctgcggcgtctctaaggggcacgctctcgtcgacgacagcttcaccctcctctgtagcgaaggagactcttagcccacacaagctttttacgccacaaacgcgaaccccgaatataagccgttcatgcctccgccactgcgcctgtgtagcgggaccgctcgtgtagaggcttttgagctctggaaatctgtggatgcacaagaatggatttggcagtccgaatcctggaacatggtcgagaagtccgtcgcctccacaggtgtcagagaatagaagcctcgcctctgctggagggtggaagagacagaaaccggttgtttgcaattcgaaagtgaaaaaagacaagatttcagcgagagacaacacgggcaaatattcaggactcggaaaatctgagtgaaacgagcagctgctgttgaaacgtagagaggattctgaaaacgaagaaggatgtttcaaaattgaggaagtctgaacagagacaacagcagcggttgcttcttgtgggctctatctttgttgagagtttagggtgctctcgatgcatgcaagtccactgcgtcgaggcgtcagcgcctgcccgtctgtgccatgagaggtttctgtgagacttgcaagctcttctgctttacagggtcgttgtcttctaggaatgcattctgttgacagagaaggatctcgacatcgtttttgcttgtcctcacatcggaccaaaccagcctttcgattctcctcgagggtggcttcaactacttaaatgcagggagaagatacgcggaagtttcgatgcagtaaatatatatatatataagtatatatatatatatatatatataaataatagcccatatattgtatgcgcacgcgcctgcagatagtatatataggtgtacacatgtaaacgtggatttatggaatgccagcgcggacgggagtgtggtgtaaactggccaatggaagatcggagaggaggaagacatttgtgttctttgtacttttgtcttcctttgtggcatgctgtattcgttggtgagcgccagagtctcgcggctttgcggcgcatcgcaaaagttgcatttgaaaggaggcacgtaaccggtcgaagtagaccagctccgcttttttttttcaaattcgctcgaacataaaagagaattacgcttctcggtgattacggctcgacgccgaagtctcgagaagtcacttggttgcatgcgcccactggtccttggctagtcagtcgctctcccgcttttcccagtgaacagctttcgtgtcgatttttttcttcgttctcatgggactttgtttttcctttcgtttcttccaccgggaagccgcagaaacgcttcggtccgccgcctgcaccctccctttctcggcgagactgtcctgtgtgccgcgccgttgcttggaatgccacaggctttgtgtgtctccgttcctccatttttgagcacatccacagacatccacttttccgtctcttttccttggttcttctcgcccgttcccgcgcttgcttttctgtcttcacctttcctcttctcgtcctcggtactggttgtcttcttcctcatgccgtgacgtctcttccttctgcgatctttctcgcga

SEQ ID NO: 3899 - DNA, 3347 bp, Toxoplasma gondii
  source 1..3347: mol_type = genomic DNA
gaagtattctgtccgttcttcggctcaatatcagcgagttctacgcgattacaaccgagaggaagacccaccagaggcggatacataacgcaggccatgacctggagaaaaatgaacatggcaaacaccgttgtatttctcattaagcttgtcttttcaaagtacatctgttcaccattcacgtgacctgactcctgtaactcaaacagcatgacaataactgttttcgcatatgtaaagtcgtgaggagacgaatgatgacatcttacgggttctgccaaaacaatgctccagaaaagtcaagcacacactctaacacgccaacttccccttaacggcgacacctgcgaggtgcacacatgaggacggtgcaatgtagaactcttcttcgaccagaaccatcgccggtgacggtgttctgttctaggctggcgtccaacctcttgagcatacagaggctgcgatgatctctgggtttcaggagcaacaggaagtagacgacaacctatctcttccggaagtgttctgacacgcaaagctcaggtgcttgtaagttctgctatcaaccgattcatccttcattgagaaaacgtggacctctgctttctcaccactccttactgtatccagctcgtgcgatgcaacgcatcggttaccgcggcttccatttggcgctcacctgcctataaaacgaaatgggtcgttgtccgagagcttgcggatccccaatattggcaaatatcaactttttgaagttaagacaattcggggattttgttaattgctcttgcagctccagagcacggcgcacggtcacgccgcgcaccgcatactgcaggtaagaaaagaggaacaaaagcacggcagctgaagcggactgtaaaataacctgtgtcaatatgcgaacatgcctaagtccagttatgtatacctgataacaacaaaaccgaaaatgcgtcagtctaaaacagaggtgaccagccgtcccagtgaagctgcaacgcaccttgcattccacaacacgttctggcagagaacacatcgataacgttggctggcgacttagacgatgtcgattttccatgtcaacatcgtctgccaagtgactgcggtgccgatgcaacaaggttccactgccattctcgcgacagtgtgtctccatggtggcgatcgcagactggggcggtgggttctccgcatttacggggttacttggtgctggtgctactgattgtggaagtgacccgttcgaagtcttcgcaggacaagaactgttaactccctcaagcgtctctggcatcggcgccgccctgccacggacaaacttaggcatcatgctaaaatgctgtttcgtagacacaaactgggaacggccaaaaacgccaatgaaaaatcgtttccggtacgcgcaaacaaatggtgaatttagactgtcaaaaaggtgaaagaactgcatgagtcaaaaggaacaccggggacaccagctctggaaaaccaactgcgaagggatacaaacacggacgccaaagggtcaaaaaaacggttctagacatttatatgtcggagacagagtatacagcgcgatgccgagagcagatgtgcctgcagccaacatttcgcgtattcgtctcgtgacgataaacgcgcgtgagacgcgacagcccctggctggcaccctgctacctgggaagttcgggtgaggttgagcatagcggtgacccgctcctttctgcaggaactcgtgatgctcttttctttggttatacactggaaacactcctttacaatacaatcgtaagtgctgctttctctctcacgaacagtgcctcgctttgtcttgacacgctctgcaacgtgggttgatgaactcgcgaggcacggtagtcgatgtcatctgcccaccaaaggccgcaagtatccttcccggcctgatacccattcgtacgggatgcattacaagccaagagaaagaagtattcgcttgtctctttggggaaaacatatcttctgttacttttaaaatccctgcacgaggtgtgctggaccatctaaacccaatatcgagtctgcaatgttgtattgtagtcgcgtaagtggacagatgtgttgcttaggtaaacatttatagaagtaggctgtacacacatgtttgaatactaaaaaaagagaggaaatgtgtatgtatgtagccatgtccattaggcgtgacattcgtcattaactctggagttataacactcttttcctcgagttgcactaccggtctacgtgtactgaaagatatggaccattttcccctttgcgtcaatattctgcatccccaactggtttaaaaccgcttacttcacactggggttccttctggcatttccattcttttttcaaactggccaccttcctgttagccgcaagctacagcacggagggagtcagaggtagagtgcgcgttccgttgcccagcgtaggctgccgaggaccagcagagtggggattcttcgcatgcacatcatactcagaaggcagagattcgatcttctgaattcgcaatcgtaaactttttcgcgagacccaacaagaaaagtggtggcccttttggcggatgaagtgctcttttcactgcgtacgtgatgaagggacggttcctttctgtggatggacgctctgtttttctgaaccatacacctcacttcccggcggaaactggagcaggacagcgcgtaattcagggcgcgaatgttcgtcgggggaaagtgcggacaatcccttccaaaatttgtcatactttgtttgcaggggaaagagggcgtgatgcggcgtaggatatgaagtatctcgacgacaaccgaagaagtgacacgccggctacctattttccatgacatagctctcatgcgagtttcagaatcaagcttctggcttcatcacattcggagcctcgtaccgtagctcgcatttcagagttttccgagactgcatttgtgtgtttcgagcgttgtttctcaaaacagctgcctcgtctcttctctgcagctcaaccgtcggcaaacaaagtggcttcgcgaggcaaaacggaggcaaataagggatggactctctatttacctaggacagtacgcatttgttagtcaagataaggccctccgcaagagaggcgccggtgacttcatcgttgcttctgtcgttctttttgcgcttgagaccccgctgcatgtgatttcaccaggggtggaggcgttctcacgaccgatactcagagggtttccaccttttctccaccgtatgcagatttacgtctctacacacaactagttgatgttgtgagctgcacgcttgtcgttccgatagaa

SEQ ID NO: 3900 - DNA, 2768 bp, Toxoplasma gondii
  source 1..2768: mol_type = genomic DNA
acacaagtctccatgtcgaaagaaggcgttttaattgcggcatctttccttcttgctctgggtatctctgccccttcctctttgcttccctctcccgttctgcccttttcgttcgcctttttcggatatgttgcagaactgctcttgcctgtcgacgaggagataggcgtagttgtcagagagggtcggaacgagcatcacatctgcaacttgcgccggatcctgcgagaagagaagggagggcaccgacgagagaagatcacagggaatcactgcgtggagatgcagacatgcgcgacgccagaggtcggccctgctgtgacaatgagggaggagcgagcagttgccgggtatcgagcaagtcgatatgttcttgcctcctcaaaaaagggtggtaaacgaatgtaggtgcggcgcacagagaaaggacgaggatccactgcagcgaaaaaagggagaaaacgcagaacaacacaggaacgagaagcgaaaagcgacggctcggagtgagacacacgaaaaaaggcacttctcgagtgtacggacaccgcctgcgcagaacggcctcgcggtggggtgtacgtccaccggagcgagtccgtttcctggacaggcacggagatctcaccaacggatcgaagccgttcatatgcgtcgccatggcgtttctttccgcgtttgcagaacgcgaggagagagccgcggagggaggaactgccgcagagtggagactgcgcgagtagcagaagccgggctgcgcttcgcctccagcgctcgcgggaggtgtagtgacacctgagagcctgagggtgtcggcgaggccggcggaaggcggcaagagcgaaggaagtcgagcagagagcgctctgtctgtgcagcgaagaggcagggaggctgacctgttcaagaagagaagcgaggagcagaagaacgcaaaagctgctcgggacgactgcgaacccggtgcacacacaccggccgcagcggtcgggacggaagagaagcgacttcttgtcgccgacgcagaggacgcgggggcgcacagcagcgaggacgcaaacagagaggaggcaccgcgagagaactggagaggcgacggcgaaaaagaacaactcgagagtgacgcgcgacccatggagctcgacggacatacggacgcgagcgacaagagagcctttggctgcatgcgcgaagaacggctctagtggcacaagacaccacgaatgaacacacaggtgagcacgagacacagtcgctacttttgcaaacagagctctggcgcgttctaccgcagcagcttgcgttcaggtgctctcccgagcttctcaggcagcgaggtaacagatccaagctcagacacacacaaactggcgcatgtctgcgaatatgttgagtcgcatttgctgcatgcagtaagatggacttgagtgcacaacgactcgtcgttttgtgtgtgttttcttgtatctgcgtgtctctcgaacgaatgcagggagagacgttgagagaaagaagggagcctttgtcatgcgcaccgtctgcccgctcaagctgtcggatgtcctggaaatgtctcctctctaaagagaaaaaaacgacgagagagccaagcaagcctgcttttctggactctacgagacacccctcctttgctcaccaaaaaggcaccgttcaaccagcagcctcgagcaccgcgcatgcggcgcgtccgctgccgcaaaaacgtttcgagccaagcggaaacaggcctttcttcgcgtttcgaaagtgaatcgactgctcgcgctcctcaaaagaccaatgcacggtaagacaagttgctgaatccaactggggctacataaatacacataatacatatatacgtttatatatataaatatatataggtgcagacagtgaagttgacgcgcacatcatcgcttctttacacacgtaatctacgtggttgcctgtgcctccaaatatccgtgaaactcgacagccctccctgccgagaatgcaacgggcacacgggagattcagccttccttctttattttcttgtgaaaagtctaaaacttgtctcctcggactctgcgcgaagtacggaactcgcccggtgggacgactgccggacgaggctgcagaccttgtgtccgcggaccgtaatgagaggggctgtttcctcagcaaaagagaggaactcctcggaggaagcgaaatctctggacgacgttggacggttgcttaaatgcacattaaggtgtagagggaaaaatgctttttcactggcattcttccggtgtgcacagagaaatcccccttttccgcgacagcttcgatcgacgcccactcaaaatctctcgctggcgcctccctgtcgacccggctgcccaggcacggttttttctcaccctttttggccagaagatgcgcgtgtttctcacttttgtctttcgaagaacgcaaacttttctcgcgctgcgtgaagaactcgagtttttaccttttttcgctcttcgccctctctctgtctgtctcgctgggtacgcccgacgcgcgagacacacactgcgcgcagtcttccctcctcgtctcgccagctctgttgttcttgtcgggcagctcctttccgccatgcaaggaccgtcggattttctgcaaactgtgttgcggcgtctttgatttgcttgtctcgtttcaaaaccggcgcgagacgaaacaagtcagtccgcgaggaactgcagagcgggactccacctggcgagtctccaaggtgcctggca

SEQ ID NO: 3901 - DNA, 4364 bp, Toxoplasma gondii
  source 1..4364: mol_type = genomic DNA
ctgtctccctggtctgtgtcaggaactcgtggtttttgaagctacggcctctggtgcgtttgcgtcgaagcggcgcaggtccgtcttcccgtcggttcgcaccgcagcagccgaggagacacctgcagagacacgaccccacacgagtggccgacaggtcggggcttgtcccccagactgcgccggcaggaggcgacgagcaggcggcgcggtcgtcaacatgcgttgcggtcacctggaggacgaactggtgctcgactgcagccgcggactgcctccaggtgtgggtcgaggaactcgacgaagacgagaaagacgacgaagacgagaaagacgacgaagacgagaaagacgacgaagacgagaaagaggaagtcgaggcagggggtctccgttcctcagaaagcagatgaagggatccggcctcgagaccgcctccactctctccgtgcggctcgcgatctccgagcctttcacctgttttctgtctcttctccgtctctgccgccgtctcccgactccaggccgcctcctgctcgctgtgaggtcctcccactgcggtttttttctcgcctgcacatgctcctgcgcttttctcgggaagcagccgcggcagcgacaacagagagacctgcacctgccaggcggagccggggccgaaaccttccacgccgaagggaggctcctgatcttgcactcggtagaggacggactcgctctcgaagaagagacaccagggacagcaggaagagcaccggctgtcttggcagctcggagcagaggcgagcgtcccgcctttagtacaggccgacatccttgcgctctccttgggggtgcgcgcgtcgctcggacatcagccaggtcgaggcgaggcagagacagacaggacggacagagaggacggacagagagacgcgaagacacagaaacggcgccttccagtgtgcgttcaagcaagtaccttcagaatctgctggagaaggaacgaatcgcgcctcacggcgtcaacgcttcagccgcccgcgctacgtcttcgggtgtacagacaccccatggtgccggcgggcagagcagaggcgaaggcccgatggctgagcagcaggcaaagagaacagaggctcagcggcgaaagacgagagacctctctcctcccgcttcatggtgtctgaagggagaaacgaacctgcgtcgaagcgaagcttcccccctcacgctgcagctcctgggccgctcccaggaggcagcgaggccaggagaccgaggagacaagagaactcgcgagagtgagggacaacaagagaaaactggagagggcgggagagaacaagagagaagcctggagaagcagagagggaagcggagagaagcacagagagcgactgtgtccgagggagccgtcgagagagctagagacgcagaaagaggcagagagaagcagagaggagacgcgacgcttccgccgccagacgcactcagggtggtcgagcggagagagagagagagaaaacgagagagagaggcgagggagaagaggacaagagagagccgagacgagggaggagggcgcatgccaagccgagcagctagatgggactcggagctcgacggcgcagcgctcttttctccgcggagagagaggagagcggagagtggaaaacgcgtggacgacgaaggaagcagcaagcggaggaacagcgagctttcctctttttctgcctgcctcgctctccgcatttgacccgtctctccgtcagcggtaactctcgagtgttccggaggcggctgaaggcgcgttcgctactcgaggagctcgatctctccgcagaaaagaatttgaaacctggagaaccacgagagaaaaccgcggcccggcaacagaaacgaaacgcgagtgacagctgtctagccttgcatggcgtcggccgcttggggcgccgcaatgagaacgcgagggtgtgcagttttgcgcgcggcgtcctgcctacattgcaggaaagtcgtcatcgaaggcccggaaacgaggcgacagaagccgtgaaagagtctcggatttccttgctcgagttccagttcagtttccgacaccccgtctgcgccctgaagaaagaggaggagagaacaccgtcgagaagaggaagcaacagccaaaaagcgcgcggctctcgcacactcgccagaaacagaggcgcggctcgcacgaagtggaccgctcccggtgccgagtttttgccgagagaaagatttgattttttccgcttttaaatccgcttagttcacgcgactcgacgccgtttgttgccgaatcctcgcgaatcgtcaagtcctgctgccagacccttcggaaaacaaccgagctatcgaaatgtatctttgcacaaatacgcagacataggcttgtattctctctgtatctgtagaaaaaggtacaacatcgaaggacgtttatacgcagatgtctgtgtatagaaatgtgaatgacacgaatcatcacaggttcagaactggccccctaaggtgtgtgagatgagcagagctctgaaagctcgcttcgatacaagcccagttctccgagcatgcatacggatgactacgcgttccgtctacgactccgttaatatgcccgtccaaatctatggattctcaaggaacttgtttctcttaggcgttaagattggtgtctttggggcatgaacatagtccggtaaaggctttgtctgaaaagaagcgctgtcgactttcttcgacgttcaaggagacgcatcaattcagaggtctcatggaaagagttgtctctgctgtttagacacacacaggtctgattctggtcctcaaagagaggaagaagcgaagaacgggggaacggtcgctagtctgcatccagcaaagttggaactcttgctttttctatcaagtaacatagaaacgcctgcttcattgcctacaaaaagaggagttgccgcatttctgccgaccacaagaaaaggatttctcgctgttctctttgctgaggcgttttcactttttgttgttctctctgttaatgtcgagacaaccttgagaggtgaagcgcctcgctctctcgccttgagcatggacgaaaaaaaggtcgagcgttcttgttctgtctgtcagagaagccgctttgtcgactggctttctggggagcagaaaccggacgaaaccgtttcgagaacgcgcctcgtgcggcgtctggcctctctgccgccctcggaggaagccaatgggaaagagctaggttttctgatgcgtaaatatattcgatttgcgtcataccggcaaagaaaacagtatgtgtgtctcccccttttcctgaaaacagaacgacttggaatcctcggcacatctcatctcgacaaaaaacgagtctctttcttctcttgcctctgttctctctcttgctctccctctctctctccctctcttgttctgtgtctctctctttctctctctttctctctggctctctctcttgctctctctctctctcctgcttcctctacctttttccgtggatgcgaaagtgacggttgaagcgcaatttggaaatgcaactctctgttccggaacgagagtcgcgaggaagaaagaagaaggcattgctttgttgaaggatgaaggaatttttccaaaagggctgttccgggaattgaacccgggacctctcgcaccctaagcgagaatcataccactagactaaacagcctgaccgcacttatgttcctgttgggcatttttcgtggcattccccgatgcaccaagaggggacgccaaaacagcagcaaaaaagcgactacgcaaagagaacaaagaaaacctgaaaagcagaaacaaccatgcaggccggagagggcctgcctccttcctgcctcgcggagtgcacagacaccctcaggcgccccagaaaacctctctgcatgcagcagcctttttcgcttcgcggcgaaaagcagtcgtcgtccagctgccgtgtctgttggtctgttcttggctgcgcggttttaacgctctcgttctttgccgccaaagagagggactgagaggcagcagagagagaaaggagcggcaaagctttttatctgcccttgcgtagctaaacgcagtgaagagaactgcttgcgtggaactcaagcatctctgctgcagagctgtatccgagagaggagagacacgtcggtcaatacggttctgctgaaagtcttcaacgcaagttctcccgtcatcaattcaaccctgtccctcctccacactttgatttcttgcatttcttgcgacctatcgctccaccttctctccctcactttcttctttctttcgcgctcgtctgctcagtcgtcgaatcgcaa

SEQ ID NO: 3902 - DNA, 1559 bp, Toxoplasma gondii
  source 1..1559: mol_type = genomic DNA
ggtacatacaggcggaggtcgtttttagagaccagaaatacgagggagagaaaagcagaccaccgacccagggggaaagagagagatggcgacaggaagagagaaaagcacaacccaaagagaaaatgagggagacgtagaagcaggaagacgaaacgtaacgcctccagggaaggggagaacttcgaagaactggcaaggacgctgaagctctgtcaacagaagcaacagaaagagagaacagagcagacagagcctcccgccagctacagaagagacacagtttggaaggaaagaaagagagaactcggcgagaattgagaaggcagcttctaccacactcgaagttggagcattgaggtgaggagaaaaaaaaaagcgatctgtcagagacaccaggaagaagagagagaagaactgcacccgaggttttcctccgagaattctcagagttcggaaagaaaaggcagcgctcaccattttggaggcaggataaggagaggagaaagcagtccgaggagaagagcaactgaggcgcgaaccgatgcctttcaagagcgaatcaagaggccgatggcagacaaacaaagacggctttccccgagagcacaactgccacaaggaacggagaaatcctcaacggagcagtcagcggcggcgactgaagattcgcagaaacgaacgagaagaagcaggtcgcaagccggcacacgcggaaaggcagaagcaagggaaaattcgacggaaaagaagaagagaaaacaagagaagaggggaaaaagataaacgaaaacaagactggaggacaagacagagaaacgagggaagagaacaccgcaggaaaaaaacgagtggacaacaaaagaggagaacaagagaaggaaacaagggaggccaagaagagagaagaaagaggcgatggcctcagcggcacaatcgcgtggaagcgaatttcctatgagaaagccggaggcgcgtgagggtgtcgatcgccaggagtatgtacatcggcaacaacgacagaccccagaccaagctgatgtttctttttcgcgttctcggagttgcagagagaggcgcggccgcgcgtttctttccagttttgcctgcctgctttgccgtggtacagacgcgtcgagaccctacggaaattcactctttcgactgttttgcgcatcagatacgaacgaagagcggctcgaagacgagaggcgtttttctaagcagaaaaactgcggacttgtcctttctcgagtctcctttttgctgtgcttggaaactgtccccagcgcgcgtattcttaactcagggagagggtcgaacgcgttctgggagaccttgttccttcatctcacactcttcttctctgtggaaacttcccgtctaactctttcgggtgtctctgtgtcaaggactggcgggagtcttccttcttctcttcttcaccgccggtgcggtgttcgcgtcgttgtgtctccgaagaaggtcctcctctttaagccgactggaaagaggccgttccggccatggagacagcgctttgaggggaagcttttgca

SEQ ID NO: 3903 - DNA, 1957 bp, Toxoplasma gondii
  source 1..1957: mol_type = genomic DNA
gactcgcgtatggctctctcctcaagttctactgaggagacagcaggtgtgactggggatgaggcaaccgcttcaggcgaggcaactcctcttcttcgtgcgtcgcttctcctcagaggagccaagagactccggggagagtcagcggaagatctgcagaccgatcgcgggagcgggtggagactttctttctcccgaagacagcgtttgtgtctgcgtcggtttttctcgtctcttcccgtttttcctccccggactttctgaatcgatccccccagtctccgacgaagccgagaagcggtgacgacaaaccgcgacagagcagaagaggcaccgagttctcgattctcgtcttcgaaagcagagaaaagagaggaaggagagcagaggggagaggccatccgcgacagaaacacaatgaggacccaagagggggaagacgaggaggggggcagcgcagggatggtcgagagaaaggaagactcagaatcaagcgatgagtgtgaagaaggagcgtctcgagagcaactgggacctgatggagagaaagacagatcctgagaacacaccctcgaggcatgcgtcacgaagagacaagacgtttcgacttctcctcgggtgtctttttctctcccgttttcgtggactcttcgccgtgttcccgagagtttttctcttctttcctctccaaggcactcagcctggctctgtgcaccaccgccggcggtgagaacctggcgacgagctgccctcttccaagggcggtcttcacaggtggaagcgaacattatctccaacgaacaaacgcagcggaagcaagcgagactgcgatttgagcagaggtcccggccgttgtctcctctccgcaggaaacatgttgaagaggaagccagcggcgaagggaagataaaaaaagcgaagaaaccgcggcacagaaacaacgaggaaggagaccgaaggggagacacgacgagcgaattctgctgctctgctgacagcctctctttcgacgtgaggtgatttcctctcgacactaaggcaactgcgagaagggagaaggaaggtgcagcgagtcctgaagagacaaatcgcgcagaagatgaaagggaaacggacgagtgactcgcggactccttttcctgttctttgtttctcagagctcttgcgtcgtgacagcctcgcgactgcagtgaaaaagcgaggcagcgagagcagccgtgacgtctctcgcaaggagagacgacagagagagaggggaagcagagaaaagagacgaaaaaagagaactcgggacaacgcgagtgttgtctcctcgtcgcggctttctctttgacgaaacctctgtgtgaagtgcagtcgaagacatgcgaagcctttccgcgtcatgtgtgtctcctcagcagacgcagagagaaagcaccgcgatctcccatgcagaggccctctgccacaagcctctctgaggaatcaaaaaatgaaggcgccgaccggatccgttcgcctgtcgcacgaggatcgcccaggcgatcgagccgcccaattctctctaggcaggcaaagagaaaagagagacagcgcgagaaaaagagggaaccttttcgcagcgagaggtccagcacgcaacgctagggcagcgagacacggcaagaggctccgagaacagagagaagaggagaaaaaagagcgcagaaggaagcgtgaagagaaaagagaaacagaagagtgacgaagagaaggaatagagtgacgaagagaaggaatagagggcaatgtatgtgcatagaagtctcgacatctgcctccgacacacccaaaaatatccgtatggtcttgtgtttgctcgtatccactcctcagtgttcagattggtttttcttttttatgtgcatgcttcaacagcgacaaacgtaggagccggagggacaatcatggtcaagtcggtcctagagtgaggtca

SEQ ID NO: 3904 - DNA, 4176 bp, Toxoplasma gondii
  source 1..4176: mol_type = genomic DNA
atcgaattcagtatcatacgtatcatgatgtttctgttagaactgagtgatccgcactcttttcggtctacagaacggctcggtataacgcggtggcagagaagactggcctcaaacttaccctccccgtcgatccactcttgagcacgacgggtctgcttcaagcgctggtaatcctcctctgtcacagtttcatagatttcagcgttctcgtccttgacctacacaagataacgtcgcaaacacgcagcacgcgatgatatttgccatcctcttcatccagttgtgtttctgtgtcactatgcagactgaacacactgttaacaggttgtcgatggtcgaattgacgttgatgcatcaaaatgagtcgcgggctcaagcatatttagggggcgataaggaatatgtcacgcagctctgcacgccaaatacacaaattcacgcagacatatcgaacaggtgcaccgacaggcatatacagaggtatattggcgcgaactttcctatgtacatacagatggacatttgtttaacatgtggtgcgccgcgtttcactcacttcatactgttcagaggctttggcctctccgcgccgttgcctcctgattttttctaaggctgacagcgcagtctgcttcgagccggacattttactttcgacgggaaaagatgcaaactgtgttggccatcgacgtcgtacacacttcttgaaaattctgtctcttttaaacacatcgatgacttcacggcaaaccgactcaaagaaacaaggtgtcacgaactagagctgcgaccgggtcgagactgggaactcgccggtaactatacgcgtagagacgcatgtgtttatgttgcgggtttcagataaatgccaatctgctgaggcggaaaaacaagtggcaggactgtattacttgtttacacacatgcacacggagaatcttgtgagtgaggcggtgcatttgcggtgtaccctcttgtcgtcatacagttctccctccgcagaaaagcatcggaacatgagacgcttcggtacaaattatcaaggcaccagaaagaatcaaaacagaagaaaaatgacaggtgtgcatattgtgcttccgagaaagtcgtgaaagcttttcacccgcatgcaagatacgtcattcctccgttcgtcccggcggtgaaaaacgcggagcacggggtttatttccgccagcgaacacgaactttggctcagtgttccttcagagttcagtggagaaacaaagcgacaaaatactaagaaaaagaaccagaggtggggcaattttgtggagatctcgagggtgtctgcgcaagacagaggaccccgaagccgccctccttggagcctgggatatatgggggggcggttggtggagcaaaagaaccaacaagaaagcgcatgctaggcactactgagaaaaacggcaagtgaaaatcgacagcttgagagataaaaatatatacgctgtgaaggaagggtaaaaaacaggagacgagcttcaaccgatactcaagacgaaaccattatgtctgacgctttcctctctgctgcggcacacgccgttttagaggaaacgaggaaggtcgttttcctgtgaagcttgccactctcaatgttctatgaaccacggtttgttagcatgtctcggcgatcatcacggaatagaggtgactttcggcgggcttccctctctctgaagaagaccagcacgaagtgtaataaatgccttcaaaaaggtcgcactcgtttcaacgagttcccggccgtcatttttttctgaaactggggcgtgttgacgagacacatgcatggcgcctagtcggtggtacacatttatgttttggaggctcttacaaaagagtaggaaaaacggggaatggcctcaacaacgatcgaggatagaagtgaccagcatcccagagtgtgttagaaaatctggtttgtctgcgcgggcgtatgagaacacccggtaacgaacggggcattctgtccgttgaggtgtgcggccgtctgatatcggcagtgggtgcgccagcataaccttttccagaatcattgagacatcgcactgatgaatgtgaacaggataaaaacacacaggaacgcttgtcgttcgtgcagccatgatacaactcgctatttcagtgggtttttcttgtggagaagttcgcgtttcccacgtccgcttccccgcagacctgactagacaaatactctgtttcaagtcctggcaagtgaataagtcgttgttcatcagcgtcatgtgtgaggggtgactgcctatctatgtgattcgttttgttccttcctacagtcggataattcacaagtgtcagacaagtgtactccgaggttgttgactcagacaaagtggctgcagttggagtgaaccacaaacactctttgcagcaccatagagctggattcgtctgtgagccgctgtttgttcctcgtgtgcagttgcctcctttactgaaggatggctccataaggagaaaaagtaggagggacaatacgtttattcccgaatgtttcgctcctgttttacgggacactacccaacggcttctcaaagagtctgtggcaataggtattagcacgttccttatcgactctagtcatctgagcaagtatcaggagaactgcatgtgatgcgtttctaactatccgcatggcttgttggctcagggctagtggcagacgcgacttgtagcctgcctcgtctttcttagaggtccactgaactcgcgaacctgcaaatgtcgagtcattcggacaaggcaactcaatgatgtattttcttctggcgcaacaagcttcgattcggtatccaggtgtccctggattaactagggacaagggaaatggacagtcaacatggtttgagcgttagagtagcatagtctgaagcataggctttcttttattcagtgttagacgagcatagcttttcttgacacgcaggccaatcgcgagaggagtgaatacgcagtaggtgtgacccggtagggtatcgagacggcctgttagaaaacaactgacgattattggtcagtggaaatgtagcgaataggtttagctgacacgtgaaaaacttatcgagggtcccttcatgctattgattacgagaagagacgtgaggctctctaatacgtttcgtgggcctttgaggtgactaggcacagatagaaggaccagtttcaccagggacaccatttgttccgtacactgcagagatagtaaatcaacacattgtttctaatctgtcacagagcgtctcgtgtcctacccatgtcaccagtacgtaatcatttggatctgaaaagttcacagttctgtgcttgaggcacgatggcagcttctcgtcgagtcagctacccaaagttttacgcgaacccacacttgcagcgcactttccttaccgcatgcggagacgaaagttgcatttcgccgatcggaagaccggccacatggttaatgttttcgcgatgcatatcggatgtttccagagaagacagctgacaacgggctgcctatttcttctaggcgaacgaatgtcttcgcggtagaaaaacacaaagaactaccaaggcagagtattcctgctgcaagcgtgtagatccggtatgcattcttggctgtgcagtggacaggcggacgcaaccaggcctttcacggttatttgtttcatattgtgtttcctccatcaaatgtgttaaactcaggccccgtaacagcggcttgactatctctgttattccaattttttgtgtatactgtccatcgcacgtgatctgtttgacgcgggaaaggcggatgtaccggtgttgaggatccaacagacggtcgttgaaaagcgaatgtttaactcaggtccacggatatgttgtttatagagctgaaacacgcatgcgatttagcaggtctacgtaggtaagcatttcgatgaaaaccgagcgatccttgtagaccgagtgctgcatgctagaaggaaaacgattcagttctcttggtttctctgaaaaagggcaactgctccgggctgtgatgacttttatgtgatttgttctctgtctaagagggtttccaacgtttgattggcagtcggattttccgggggattcgttggttgagcagatgcctgtggaactgcaacacgtaaaaaa

SEQ ID NO: 3905 - DNA, 1884 bp, Toxoplasma gondii
  source 1..1884: mol_type = genomic DNA
aatacgacaaagttgcaaagcaggcaaacagtacgcggcacaaaacgcacgttttgtagcctcgaccaatctctgttcagccggaagtacagcagcgtgtttagtggttactttcaaaagtgactaataagaagctacggctttagagaaggtcacatactgtgcaccactcactgccacttgaaacctaaaggtggggaaactgtaaagtatcccccaacgagttgtggtcagcagatggcttctgcgtgggggacgcactctcgtggagaggttctcgtttttcttcagtgactgcacaagaggtttaagttcgaagactgattacaacaccacatatatgcgtggctcatgcacggcacgacacgtgaaacctctgcaagaaaggccaactccgacattccacttggaaccgcgtacttagtcgaagagcgagaagcccatgtcgtcttcctcctcctcttcctccttcttttcctcctccttcttcgcagcagcacccgcaccagcatcggcagcgccagcagcaggagcagcagcagcagcgacaccaccagaaggtaccttctggagcttctccatacctgcggcaatcagctgtggaatcaaaggcacaccggaaaaaaaggcgtatttccatattggccgatagggcttagatcctacgcgcgaaatttcagcagttagacgttacaacaccctctagagcgccatccgtttgaccaagccacgcccgcgggactcccagttttttgccgctcccgtcttcagcggtacatatatgtacgttgcaccattcattccacatctcctggagtctacgaaagacaggtgccgaccaaccgcaaaaacaccgcactcgacaagtcggaaccgagtcctactatttggaagttgcctacccccgacagttatcacatgttgcaccccgaacaaaagctacaaacagttcactgggggactttatactttagggtactgctgtagtggtccataaaaaaggaaaaggatgtgtctctgcgtggttgcgaagcgcgaactgaatttgcgggcatccagtcgggaaccgggttctcagcttacctcgtggggggtctttccttcgacagctttgaagaaggcgtccatgatgtcgtcttcaacatcaatacccacagaggagagggttttctcaacctgcttcttggtcggagcgtcggttcccgacagcaccaccatcaggtaagcagcgacgtatttcattgccattttgtccgtggaaacgggacgcgcgaaactggaatattccgggtaagtcaggagacgacaggagagcttccgcagcaagaaatggcgtggagactgacagtgcgcaaggcctgctcaatcactttaaccactgaagaaaatgctaggaagtgcgactccccctcacggccaggttatcctggaagaaatttcgtatcgatcgtcaagagcgcatgcgagctctctgctgtcaaagccccacgagcacattcttccgggtcccccacaaaagcctggcgcatgtaataagcgcttttcggtcccctctattacggttgcatgcgctgcgttggaaagcgttttttttccaggcgcagcagaagactgtctttcctgggattcggctaataaaaggggcttcgcctgctggccctcctgcggggcaacgcgacaggatttcgtcgtggttgacagtgctcgagaggcgaaaagcggggacgttgcaagcgaagacgaaaaagtcgacccccggtgaaaaagtccagcgctgcccgcctgtcacctttttcattgtcatttgtactgaacggtgtaggggcgaaatcctgcacgtggatctgtctctttggttcgcccggtagactaccacaatcaaga

SEQ ID NO: 3906 - DNA, 2675 bp, Toxoplasma gondii
  source 1..2675: mol_type = genomic DNA
gaatttaaacgcagtgactcacggtcgttcgtatggtatggtgtagtaattcagttgagtgcgtcgtcgttggatcttgaaatgtaacacagtgagctgtgttaggcagtccagtggtgtggtggtgtacagcgatcataaaaagattggtcgtctgtggcatacaactggagtcccattcaggatcctagatactaaaatgtctctgtctattcgacgtgaggtatacagtcttcagtttaacgagctctctctcaataatagttttcatttagagtggtttggtggacctgtcacacccaagtatgttcatacccgcccatcggttcggagtaccactccataccatccctgattggcctctgcgagcctaaactgcggttgtagcagtcattcggtcacggtgacgatctctgtcatccatatgttaacaaagttttcagggaggtaagtactacgagtttgacatcttgtgtacatcttgaaggacgtcgtttaccggaaattgcgttctaatgtagtattggagcattgtcgacatttactgtagtaatgcatccaactgaacaccacagtcacttgcttcgtgacaggaagccgttgtggttcgaacgttccacgaatacagcaaacatgacgacatctggataaacattcccttttttgtcgggatgtggcgacacgtagtcccagcactccagaaaacagacgatcgcagaaagcagcaacgcactcctgctttgcgagaaagagaccaggagagttccatgcagatcgagtcccatcacctgcattttgccgctaagagcaagtaagggaaatgtcaactctcgtggttgaagtggaaaagaacacaaacactttcttccagctgcaagctacttgttggcgctgctcagtatgcttgctctatgcggaacgacagtttgttttgtctcgcatctaatggagtttaatcgaatggagtctcttctcatgtttttatgtaacctacggaagcagcgttgtaccaagtgatcggcagctttcctgccagcgtcgcaaggctcaagaactagcagactgttcatcaacaacagcgttacacatgccacacagttcatgcggaatcaagtcacccgtcgaggcataccggtcatacagagactgaagctagactacctgttagtacatattataaaccggaacttctactccagttacgagatacagacaaccacggtctagcggcgtattctcatttttcgacggtgggaaactggggttaaggactctttgccgaaaaaccttaaacggggacaagacggctctgaacaaattgtggaacctaacgggtgccatgtcagtgcaagcctccaacatgtaaccggtgtttccatgcaaaaccaagagccgcgtcgaacgacggacacagccacgtggctctaaacacgtggtcgaaagactccttctgtgatacacaaaccaaagtgcgtaacaattggcagccacgtcaaatagcttgcgatccgaaaggaggggaaaacggcaatgtcgctcattcgtatgctgacctcagcttttttttaaacttcttcaggagaatttttctacacacacacacacgtggtttctatgtgagccacgttcttcctgtggaaacgagataagcactatttgtaatgctccgttcagttattttcttaaatggccatgaggtgaataagcaagacaggtagacaaggttatacaagcacacaaacacttccctgaatacagatagaaatcgctggattatgaatataaagacggtatctcccccaccccggcacgaccgactaacaaaccacagagcgttgatgtcttgtcaactttacgcgtcgctgccgagacgagtcaggagtgtcgcctaaagcatctttttcctgtgacacgaggtttcagatgatttgcagctttgtcttattgtttctcccatttgttcttgagagcaatgtgagccgtctgccttgtggaaccaggacctcggtcgaaccatacgttctatcacaatcttttgttgggcgctgtcaaagcaacactaagcttaaagactattcggagtttgtttctcaaacagcaagcaaagctgctgaatacgttttctccgcgccgtcatcggcacgtgtctcacgcttctccagataagacttccactttcctgatttgcttttcatgcatctgcttcctcacttcggctcttctgcctttcgttttttaatcttacggggtttctgggcggtcgctcccgttgctcgctaggttgcgtctctccgtgactgtgtttttttcccttgtttatccccgattcatggtggcttgccccgagttcctgtttcctttctttgaaatccgtttcattctcatcttgtgttccgtcgtattaccaccagcttccgcctcctttcttgatcggcagcagcccacaggctgagcggcggatttccacacgtcctcgtatctgacttagctagcgtcgtttgccgtcattgtaactgtcatgatcctaactcccgtttgtggcggaacatagagcgagaaacatctttcctatcaagcgaaacgtgccttcgattgtgtgtcactcccgaattgcttcttcgcctcttcatattgtttacatcttcgtttccgtttattcatctaattcggcagca

SEQ ID NO: 3907 - DNA, 1515 bp, Toxoplasma gondii
  source 1..1515: mol_type = genomic DNA
aaatgccaacatgcttaatcatattaacattctacgacgaatctgggccagtgcttcacatagacatgtccttcacgtttgcctccaaaaaattacccgctggaacacgttttgccttaaatttgtgtcagctgcaaaagcgtatcaactgccctgatggcattgttgtgatacggctaccggaggaggagggcatggctgttttttcccactgggattcaccatgttctttttaattcacattcagctgtcgaggttgcggtttgtatgcttttccactgtctcgaattactataaaaatactgctctgatggcagcgctcagatcctaacagccgtagaaaaactcgcacattcctctaatagggaagaaatttatgaacggttcaggatagctaatgggaagcaaaacaagggttcataaacgtgtcaccttcatgtgtctcagcaacgtcatgtatgcttcagatgctcttcttaatacacttggaaatgtatgtggttttctcaaaaccagaaggagcttcaaggcaggtaaaaaagcatgcatttttctaaacgtgcagatacattctaaacggtgtgcaactcgtgtcgtcggcgtgtgagtacgatgccgggctcttgtggtcccccaggtttggagactagcattactccaccaaccatcttcttttgaaaatgtggatactcaatcctagatttccgtcatgttcacggttcatgtgtaaggtaaaactaactagggctcacttaagcaccgaaaccgctgcgggtgtggtggcgcggagaccgtcaccgttaccagcgtaacgttctagtacatgctacacacatagatgtggtctctaatctcaaggtgcttttgaaaggcatctttactggaggaatcacctcacatatagatactgcggagcagccgggcacacacgcagtgactttgcgctgccgtatcgaaaagcggtaagaaagtaatgcttatcatctaaggctatggatgagttcagagaaactgtgtttcattttgccgttcactacagtagtggagaggatttcgaagcacggcgtatggataagcagactccccatggacaccgcatatccatcaactacacacagctactcaagcgcgaaacgctgccaacctcggtgttggcgcatgcatccatcgtgcatgccctgcatgtaaccaatttgacttccatcctgccagctcttcatgacgacaaacaaaactgcgtcagtatcggtctgtgcatccttcgttgacgcattcatttttcctctcttctatctgttctttgtcatatcaggttctgagagttaaacaagtagcctctctcccacctgtcaatgctcacgcgctgagacgcgcccgcgcaagcgaaatatgtgtcgctggagcctcgaatgggtcatcgatgttgacacacacgtgtagtatcctttctagtgcctcaaatcagtgtcttgtgttgcgaggagatccccccctgttcaatcgtctgccggtgta

SEQ ID NO: 3908 - DNA, 2361 bp, Toxoplasma gondii
  source 1..2361: mol_type = genomic DNA
cgtaccagctctggatgactgagagtttgagctattctgatctgatgtttgcgtcttcgtgtgtggaccagatggagcgaaatgaaaaagtgatctggtcacgagtttggtggcttttcgcgaaaaggactcgtcgatgccctttccttgtctaaggatgctgccgggcctcctgtatctgtcagttccctgccagcacattggtctgagcaagggctgtgctctgttgtgtaacagttgtacacacgacaatgtatggctgggtgcgcattctatggagctcacctccatctacaagactcgctggttatatggcgtacaggcacaaacatgcaaagtctttcgatgttaccacgtacagccacatgtcaggcgaatgcgaatactccgtttttggtggcgcagaacttgctagtctcatttgagcaatacagttgtacccgactggtacaactaagcattatgacttcttcggaaacagctgccgccgcatcctgaggagaggcagacaactaatggacccctggtgctgaccgtcacttcagttgagcaaaaaacgaccaggcgttttgcacgtattctgcttcgccgtggcaagcgcatggccttgatgagccccggcaccagagatgataaacgctactggcaaaatgtctactccgccgggtgtttcgcatgccattatggttgagatgctggcggcgctagaaaacgctctagtccatccacctggtaaagaaactcgttgcctgccttccgaacatccacaccggtatgctttcccaggcgtgtcttctagatagctactagggttggagacgaagggagaggctgctctcagtcactgccgaaatcgatgtcaagtcttgaaacccgacatccaaccatgacgtgccataacgtagagaggcattcatttcttcactgaataccatccccagtggataccactggaccgcattcgacttccgtcaccggaaggttcaatcttgtatcactgccttcgtttttgaatcgggcttctaagactagcagaaccagccaccaacagcctcaagaagaatacaagagagaaacgaagggcaatgttgtagggaatggcagggaagataacaatcgagcggaagggagcggcacgcgaggcgcataccagtagtcaatttcttgcacatcacctgcaacgtgcgcccgttaaaagtttttgcctcaaattacggacgataaaaaccgtcgaatgcaggcattttgcttcattgtcctatgatgcactttttcggtgctgaccaatggacaaactcgtatgcttgtttgtcttcgtgtgccataagatgtgtattcaccattgcaatgtagcgcatgcgtctcatcgaagactatttactgttgtaaagaattccctcgtttccgttcatgaccaacttctcctcctgcccatcggctcgtacaaggccacctgctgtaatggcagtgatgtctcctgctccagccgcatcgctacgacagtctttcttcagtccctgctgtcggttggctcgcgtgcaacgagaggcatgcaatccgtgtccatctatcacgggtacatcagcgaaccgatgcttagcgcgaagacagcaagaggaatacgaccgtgttaccccagacttcgtattgttcaaggccagaggcgaatttttcatatggagccgaaagaatcggggggctgtatactgaattcgttttcctcgtcagtcgccctgtgcttcaacggcgcctgcagcatgcaaagaacggcgggtctgattggttgcgcgtgttccccttccctctgaaactgttgactaaaacgtgccggaatttcttttctggaacatcggtcgcgtaaattttagcactatgggaagcctcatccgtttcagtggcatgccagcctctttgtagggcttctgtgatttgcgtgttacaggcaccagcgcatgcacatttttttggtgagagttttgggggctagtctcgctctttcgtcgccttctgaagctcgaattgtgcttacggaccatatgcacatatctgaatttacttcgcttctccaaagctgcattggctttcatttatttatgcccggcctctgtgtgtgtttccagagtataggaagataacgagaagacatacttacatcagcatgcttccctgtttcaatctgaacatgtttatatcaacatgtacgtaccaccgcatatgtgcggacatacatactcgaatttgactggaccccgtttttaaaacgacacatacatagcggaccgatgtaatatatatatgtatatatacatataaaagcgtgcatccggggacccagtttgcttcagagggtagtttactata

SEQ ID NO: 3909 - DNA, 4057 bp, Toxoplasma gondii
  source 1..4057: mol_type = genomic DNA
gttaatagaaggctccgtccaacaactctttgttggcgactgtcggcgtagcctgtgttttttccggatgtgcctcgtactacatcctgtaggtttagtacgggggaaagaagtgaaataagttccttctgctttttcctgcaaagtttttcaaacgcaaaggacggagaccggccacgaaaacgagtttctcgtccgttggagcgttttcaagttcttcagtgcgaacgtacaatctcagcgggggcacccaagcccactcgcatcatttggtgaggatcgagaaaggcctcgtagaggacatgcgctggaacggcgaacagttcttcaacacagatttgggttgccattttgatggcgcgtcctctgtcttcgtggcttgtctacttgcgagcgctgtgcggctccggcattcctctgtctgagcctctcttcgggtcgcgttgcgcggcttccctcctcctagtcggtgcaacggacgaaatgctgacgcgggacaagagagaggaagagagacaaatgtatcttgggtgactgtgtatgagcggccaaatgtcaatcagagccagcaaagacaggcttggggcaggcaagcatacggggtaaaagacgcgaagacagaaacctaggacgaggaacagagtaggaataccacaaagcggacagggagaggaaaggcaagtaaaataggcaagtgtgcaagttctctggaagaaagggtcaccagcagcaaacaagatgagatcccagaaggccgaatgcacaagacaagaaaacgccgaccgtcacaccaagccaggaaactgtgtagggagagcacagcctcgccttttacaacgtatcagccagtgtggctgattcgaataactgaatatataacgacaaccgagaacagagcgacagtaatgcgtcagaaccggtgtgccgcgtggcctagggcagtctcctcaacgacacgaaaaaccaagtgcatgcataccttgcaagttttgaagaaatttccggtgatagtaaatcacggagatccgcatattaaataaccttcggtctgaagttcaagcgaaaaaacagttctctctgcggcttgatttccacttctcaggccggacgctggcagaacgtcaacggcatgcagcagacctaaaaaaagccgcatgcaccgtcgaatcctttctctgggcacactgaatttcccgggttacctcgtcgccatacttggttggttttgtccatccacaaacaaggcctaggcaccggaagggtgagtttagtcaacatgatgcttcacttttcaataaacagaagacacctgaggatagagaatactcgcatagaaaaccctccggtcgttgctgctgtctagatagatctctctcgaagcgactggaaccaaaatgaaagtgactgagactgcatgtgtacagaaacaggagaattaagggaagcacgcttccagcggaacgtgcacctatttactccttgcagtgaatgagaggttcagcattcagagggtggacacaaagtttcgtacggatgtgaatggacgaggaatatcgagttccttgagggttttgatgccgatgttgcaagctactttttttactgtatcttaagaggtccttcagcattacgctctgtcgcgagttcgtgtgtgaaaggggaaccgcggcatcttgtgtgtagtggcactgtcgactacctgagcgaaaaacaagcaggtcacgagctgataatcgttgtatacgtagcaaaggcgaatcacttgatgatggagcatcttcctttcatatggatggaacagttttaagaagaatcttagcgcaaggtagccggacgcggtgaactgtcagagagtagggacaggtgtgaggttgtttgtctgaaggcggctttccgcgttcacactcaagcgccagtgcctaatctgcaagagggaacttgcttaccccgggatgcgggttcctgagtagacatttttttctgcaaaaaggtagacactaacgctcactcccagcgacagactcaggcgggttgtcttagtccgcacattatcagaacgctgtgttggggatgctttgattcagcaaccagatacgaacattcgcgcgggacgggggcacatcctcggcttgctcggcggaaatactggatctctgcattgtttttctgacgtggattcacaagcagcgggtgttttccacgaggcggaaaagagagaggccgaacaagtgtgagatggcggcctcctcgacaggttagtgcgtctggtgtctcaggcgaaaccaccgccacaccgtcaaggaacagagaagacaaataactgagagggaagaaagaatcacactgaaaatcgcggtccagcacatggattaggtcgttgtgtttgtacacggtggacatgcgagaaaccaaacacgcgtcgatagtcttcccccgtcgattgtcaaagagctgatgaggacgtggtagccgcaaagctgacgacggcaacatgacgtcaccagtatgatgcacatataagagaacgggagacagaagagcgcgcctttttatcgctaagcgatttgggacagaaacgacccaattatctgcgtactagtgttactcgctcatgcttgagatccaaccgtttgctttgcgcaaacactgctgttccccgccgagtttcgcagacgcgttgaccaagccttttttggttattcatggcgaatcgccgctgacagacgtgtcaacggtgatgacgatgtgggaaaaactcatcgtcaaaaagaggcactcaggtcgcacctgccttcctcgctcctttacagggaaggcagaccgtttccaaaattgtcattgctgttgcatgtgtggacgtcgcaaaatgtccctcccgcgtgctgcgtcaacaaagaaagtgaactcttctggcagtgtcgtcggctattcggtctgatcaccagcagcctcgtgtcttgttgagtcttcccgcgagtgctgcgacttcagattaggtacacagggtggtactatcaagccttgtcatgtaaaagtcgaactggagaatcagcgtaaatctacaaatacggtaagtgcagaaatataagtagcggtttcaatagcggttaatctgtcctttttcctctgttctcagggcatgaataaggcagggtcaccaggctaggggctttgctgcggtgtaccgacacttcaccgggaaagctgtttcttccctacgtgggcaaatctggactgttggtagacagaaaagttcatctgtcggctgcagaaaatccttggccccaagttttactgttgctcatttcactccgtggccgaagaagaaaccatcgtcagtgtcccggtacggatgcaattgcaacagaacagagaggccggtcaagcgcaaagtcgaggacattcatgtggaaagggagaaacgtgaaaagcaacgggcatcaacgagaagaaggcgcttccagcaagttcggcaccgctgacacgcaaagcaagagctctcgactgagaatgcatgcaactaacgcgcccatcgagtgttgcatgttcaaaggtagttcgaccaattgcaaatctgagtttttccgcttcttccttcccatgtgagtattgactttccctgtcgcagcagacgaattggttttgcttccgttagatttacatgcgaaaccgaaatctatgtctctgcacagtccatccacgtttcaggttttctgcggtcgttgcgccgccagccggccatgcccacggccttgggtcgtcaaaccttcgcatatgcacacggtaaataaattctgatctctcatgagtcgacgctctacacaggtgcgcacatgtatctgcagtatttcctctttgcaaaggtttcccccttttcaagacaagacagaacggtgacccccccgccagtcacaggaaccgtgtctccatcatcgctgtcttcgacttcctttttcgagctgagcatggtcgttttctctcaccgtgcgtctctctgtggaacccttcccatgtgtaaaccttcagtgaggcgcttccctcgtccctcgcttttcca

SEQ ID NO: 3910 - DNA, 1863 bp, Toxoplasma gondii
  source 1..1863: mol_type = genomic DNA
tggccactcacaatggcggtctgagtgtgatctctaagttcccggtgccggttgtgcacggtgactgctttcgatttaccggttgcaactccgaaagtgaagagaagaccaccgtcaaggctggccctgatatctggcactgtgtgcgtttctgcgcatgttccagaggttcttctgtgtcgagtttgtcctgtcaaaggcgtacctgcggtttgggtctgaatccccttggttgcgtccacaacgaggagaacgaggtcgatgatctgggcgcctccaatgatggttttgatcaaagacgcgtggccggggcagtcaacgagacaaatctggacgttggcttttctacccatttcccccgacccgctcgctgtctcacactcaagtgtacatacacccgagtggcgcgcgtccaccgggcgtggaagtcgcgtcgggtccgcagagggttccgagcccggcgtgtctaggtctgttgcctctctcttttcgtttttctcgaactcggctcggctcgggacagttgcctccggagaagaggctggggaagccccctcgcccgggcgcgagtcgatgtccagggccagcgtgaaggccgaaaagccgaggtcgatggtgatgccgcgttcctgactctgcgggtgtttgtccagcgaggcggtgctccgcacagccgtcagaactcgagccagcgacgtttttccgctatcgacatgcccaaggacgcccacatttgcgtaaatcgggttgccgcagcaacatttgacgcgttccatgattcaggggaaggagcacgagagaaacaccgtgctcgcaagacagctcgcgtgtagacaaacacggaagagtgagagaatagggccagtcagccgggacaccagagacagaaacgaggcagtggaggactacggagaagtgtcacgtgaatttggggagtcggcgtcgctttacaggcgtgcttcactttgaatatacatgtttcgcgaaaaagggtgtctttgcagctgtcgagagtggcgcatgcaacgccggacccacacgataaagctgttcagtcagatctgcatgcgtttctttcttgaatttgaattcactttctcaactccactctgattctcaaggaaattctggaaagaaaagactcctttttctgatccaaggcggagaaaaactcgttcctgcctggggggaatcgagctacccgagtgcctccggcttgcggagaacgttttgagtctctcaacatttgcatgcgcgcgcattcattttctcttcttcgtttctttcgccattgttccttacagttaaagccatctggtttgtccttgtgccgtcttttccaatttcctctgaagaactcgagattactttctccgatgtccctcccagaagaatgcgcccggcaaagcggcctcaatgtcgctagatgagagcttttttcgctttttcctcgtttctccgtctttgcagttccctccagtttttaccttgacgagcttcctcagagagacggagacgcagcggagagagaaccggaaccctgtcgctcgaccactgctcaacgagcacagtgttaacttcacacagcgttctgtcgttgttgaatcaacgttacggtcaaccttcaaagtgaaaagaacgaggaggcctcctcgccggacgccattccacgaagaagtcgatcgacagcaacccgtttctcagggagcacttctcaaacatccggatcttgaaaaggggaacacacttttgcaagctcgcgaacgttttccggatcaagcagaaacggccctctgcatgcgtcggcatgcatgcgctaggacggaggctttatccgtttgccttcttgccgttccttcacca

SEQ ID NO: 3911 - DNA, 4045 bp, Toxoplasma gondii
  source 1..4045: mol_type = genomic DNA
gcccagacagcgccgtgtctgacgtttctcgttcttcaaatcgtctctggactgcccgcggggaacggcgaaggccgcatgtgaggcgtggagatccctggtagcacgcagagtccggagtctgtgcgctcgagaggggtctccgaaaagagtttctcggaagcggcgacgccgtttggagacctcgacgctgcgcgtctgaaggctgtgcgctctcgcgcatgtgcgggggaggtcgcgatttctccacacctccgcggcgcgcgtgaagaggacctcgcttgtcaggccagcgcgattctggcgtttgagaggggggggtgtcgcctctgtgtgtgcagctcttgcgtgggtatgcgtttctgtttcgaaacaaagaggaagagaggcgagaaggtcagactctgaaggagagaagtgaggagacgaattccggaaaggcgcgtccgcgaacgcctcttctccagcaactctcctcctcgagtttacacgctctttccactgcacatccttctcaacaacctcgcgggtctgtccaagactttcactttttgatgtcatggctttgcggccactgtgcgtttgacaggcgtctggagtcgcggttgcgtttttgcgcaggtcctcgatctagaagatgaacttcgcacgctcgatccccggcaccacacagtctccgccgtcggctcctccagtcgaccaggagaagcagcttctgaggcgacgaactgcatgcagccttcgcatgttgtggttgaaagcttcgagggagtgggggagactcttcagggcgccaccgtcgagtcggcagagagcgtaaaaagcgagagtggtgagggagacaacccgttcatcatcgacaccccctgctcggtcagcaccgtgtgtacagacaccccacgcaggcagcgagggagatcacgcgagtgatctgccggcccgcgtgcagcggacagcgagctttgaagggagtggaggagagaagcaaagaagtcttgctggcaggagaagcaaatctacagggtcgacgctgagcagtgggagcgacgagaaacgcatctggttgaccgcctgagcgtacaccaggagacgataagggcagagagccgctccgcgagcctgtttgtgtgtgaaggcagtgtgctgcagagatatttgcatgcggcgagaagacggggaggaagctgcaggtggaattcgagcgcaggcgagaaacgctacacaaaagagaaacagcatgttgcctgaggagcacaacccgaggtcgacgcgagagccgaaccagcgtttcgactgcgtagacttttctcgcgcgttgacgagcgctcaggagagcgacaaacaccaccaggagagtcttacgtacaaacgcgcatatgttgttatgcacgtaaacgtctttgtatgtctgtgcatgtgtgtggaaaatgcatgccggtgtattatacttagatagttcagggtgcttcgtggcgcgaggcctttgaacgcatgcgagcgcgacaaccggagaactggaaaacaaatgaattgcatgcagagtgccgtccaagtggcagactgcatggggagggcagggaggagcatcgacgctccaagcggattttgagattcgtttttcttgtcactcggctctatgggaacggtggtagggcaagaatgagagtcgcaaattatcgacgatcagcgctttttagtccatatatatatatgtatatatatcggtcaactgtttcaccgataactcatcagaagttcaggaaaaacgaactatggatcagaccctcagagttcacgcacggtactgggaagtaggcggtcgcgttatgccgttgaagaacgagttccgaatcctatttttagctcacaagtagcgagatgttcagagcaaacacggggaaacagttcgatttcaaggacgcacgggtgagtgaactgcaccgacaaggtcgctcacgagcgtgtacacaaatttgtcgaagagtggggagtgggacgcaggcgctaagttcctcgctgaagaacgtctcttgtgcatgtgcaagcgggtgtctagcccaaacaaataagcggatgcaggtgggagaaactcgttggcagctgaaaaccgtgcgcgtccatatctacggacataagcgtcctcctttgacacgtgctggcagtggcagcagcaacgtccccaacatgccgcctgctgtgcgtaacaaaacgtgagatagcagagccgattctcggttcttttcgatgttactagaaaagatcgagcgttctaattggcctccgattcaggtgaacccaataattgcagggggttgggtttccagctggctcctggcggtacatgtgtgtagcttcgccgaccacgtgcgtctccttcgtagacagcgtgggaactaacggtctccctccacaagaaaaggatgaatctcaactgctgaaacattcagagtcggcaacggagaaacgaaggtgttcaggaattctggtcacagccggtggtggagagttccccttccctgtttccgtgtcaccccttgacgaggcaacacacacgttacctcccaaaaacctacctctccactgtccgcagcgttgctcggaaaagtggcaaatctgtgcgcgtttttagttttcgtgctacagaaggtgacccacacgcgatgagggtcttgtgaagtgggcttttgagtggtcgaaagcatacagctctgcaactgcaaaacggtttcacatgctcggggttgacgaacaaagccggacctggcagaaggatctatacaagaactctcgggcggcatccccttcagtgtctgacagtgaaaacagggtttcttttccagcactcccgaaaaaagctttcagtcgcactttcgatcagcgctcgcagagcacgcacaagtccctcacaacggcctttgaggcgccgcgcacttgccagcgtgagagcagctccacgcgcctgacaagtaccgatttccacctctgaatagtcttcgagtctctcgaaagcggatctacatttttcataaggaaacgggaaatcacaaaagtggaatacggaggagggccgtgggatatccgagggctggggttggcaatgtggaagaggagttcacacctcatgctacgtttttagaaagactgttttttacagctcaccaaacggcgtcgaaactctggtttgtttcattttttctcatcttgactgttcctgtgcggtgggaggaacagtgggtcggagaagcttagtgtcgaaatgcgaactttgtgctggggaaaagatgccagcctcgaccggcgctgttcgcgtctcctctcgcgggggctagccggtcatcgacgcgctcgcgcgctctgtggtcttgcttgacatagtcaatgtaactcgtggggaagacggcttcaaaagccggtgagagccgagtttttattttccaaggtgacttcctcgcacattctgacttccattagtccgttctttctccgagcctgagagaaggcggaggctctgccgcctttttccccgcggtgactcagaaatagcgcgataccacgatcctcgccaccgtaagcttcgtcgtagaccagaacgtgcatgtcagacagctggaacgtctgcgcttataaaagcgtgaagaggaataagtgtgtcgatggaaatactgttcgggtcgtccgttatcctgctttttctcggggtgtcgaaatcgttgtcgactcaacttctcaggagagccgggttctctggccggtatccgagcgcgcgtcaagtgcagtgccctggcagcgcctgtgtgcatagaccactcgtcgcagaagctcagttatgttattcaaacagatgaggatcgcgggttcgtgtattcactttttacaagaggcacaggggcttttggcaccgaggcgatatctgcgtgtgtgtgtgtgtgtgtgcagttcgagcgaactccggcgcaggtgttcaaacaaagaagcgtggcgcgctagacttttcgttttagtcagttttggagacactacttcgaaaccgagagtttagaaacaa

SEQ ID NO: 3912 - DNA, 2627 bp, Toxoplasma gondii
  source 1..2627: mol_type = genomic DNA
tgtgtttacctcgtcggcctggtcgagaattttcttcactgtctcctcatcgatttcgtcggggagcagagcaaggtcgagctctggctttttctctgccaacgctacgggggcgctcggcagctcctgcgagacgccgggcggcgcggggggcatgtccttcgccagcgaaggcggcacgatgccggccttgatcgactccatcgcaaaagcgaaaaaagtggaaaaatgagaaaaaaagagaaaaaaagggggaaaggcaggaaaaaacaggcgaaaaaaaggacggaactggatatacagagagaaaacgagagaacgaggtggcggaacgacgagaaaggaaagcgaagaagaaaggagacggggaaggaagagagacagagaaaaagacgaaatggcaagcgacagaagcacagaaacaggaaaatgggttcgagaaagagaagggaaaacgctcaagactgggagagagaatgaactctacaaggaagggagaggagaggaggcgatggaccgaaagtcgagagaaaaacgaatgacaagagaggcgacacagattggtcaagagcctctgattcccggcagcgtttgcggttaaacgaaaaggaagaaacgaaaaagtgagtgtcggaagagaagcagaaaagcagacgcgagatgatactaaaaggtctcagagagagcagcagaagtcgagagactccagagaagagaaacaagcgtccagagtgcagagaagcaggaaaaaaagacgacgccgccactctgtcggagccgcgtcggcttccctcccgtcgatctcttctctcttttcgttctctcttctgtctcttctgtctcttctctcttttctcttccggtctcggccgcagcaggagagactctgttccatccgcatgcacggcggctagcaaaggggagagaagggtggacagagaaagagaggttgacgccagatattccccggcagaaaagaggagcaaaagaccagacagaaaggggatggaaaaatgaagcttgaaacgccagcttcagggcaacctccacccagaaaagcaaagttgagtgcccacatgcacggacggagagtccgggagagggagaaggaactctggcgttgctaaggcgcgttaaaaaaaaagagggggaaagtctcctctccaggtgctcccgacggatgagtttccttgccatttccaaagaacgattgaaaagagagacatccggacctgatctcactcggtctccatgctctcagagagcgctcggctgaacgcggaactagaagaactcccagaagagcgggggtctctttcaaaccgaagaggagaaaatgcaggggagagagtgtgcggcagcggcgcgcgagttttgacacagctttcctccgaacgggaagtgaatcgatttcttttttgcggggacgaagaggaaacgcgtacgcgaaaaagaaagccaaaaaggaccggaaatccctctaccgttttgccgcgccgcgtcagcttgacgttctcgtctcgcgcctccgagcctgtgaagcagagcgggcgcggttgtcttgacacagcgcgcgccgcggtggatcgacgctccacgagtctctgccgtcctttgcgcggaaaatgaggcagattcccttcgtttctcgaccagaacgcgaaacaatcttctccggagaagaacgcgaccttttccacctcagatgctgccctcttcagcgtgcatcgaagcgcgcgagtcggccctgcacacatgcgaaaagcgcgggtgtctgtacgctctccaacgctggccgggtgtacgtacacccgagcggagatagagagagaggcgggagaaacgcgacagttgtctctcttgctacggcggaggcacccattttcttgtctttatgtcctctctcgccggtaaggaaggagacttcgagcagagctgctcgcgcgtcctgctctggctcctcctctctctgcagagagcacagcgacagcgagcgaggagcagacagatccatcgccggagagaaaaggacgcgtttcttttcgcctctccctccccctcgctgagcttcagtggtcttctctcgcagatcatcgaacatggagcgcaaccgtaaaccgtaaacgcttcttcaaaagccagaacgcgcatggactcggacgccaggcctcgcaggtgacggcgagaagctccgcggcgccttctgcggtgtatctgcagctcggttcgcggtttagcagaagcaacgcagaagtaccgaacgcactgacgttttcaggtgaagagataacgcgggacaccgggtctccggccctgctccggcgcctctctctcctgatttcctgtttctctccttgtgcgttgttcgctttttctctcactttgtctcttgtgggtcttttgaaaatccagagtcttcgctgtttctgctgtgtgtgcgagctgtcctctcggaacttccgttcgatatgcggtctcgctctaaagaagattcgccgtcgtcttgtctttcttcttccgctcctctcgacgcctcttctctctcgctttcctcctcgtcttttcccccgtcttcttcgtcggcgcgacttcgccgcctcccgggtctcctcgctcgctctgctgca

SEQ ID NO: 3913 - DNA, 2296 bp, Toxoplasma gondii
  source 1..2296: mol_type = genomic DNA
aatcaagatgcctccagctgtgaaaggacgtctgatcgactaaacacagacatgctagtagagtcccgacgctgctcaagtggtgtctccagctgtgagactgactcgggttaaatggacagatcctggagaggagaactgccgtcatgggcgggttcctcctgtggctataggaatatacattttaccgtggagtggtggctgatctgtcggcgcatgcagtttttcgaggcttcaaggtttgaatcgagttcagcaactgtggcttgaaaaggagtggagacgaatgaagtacggaggaggccaaggttgagatgcagaagcggcgacagagtctgctcgcagttcttgtcatgtcgtaaactactgcggtggtctgtgttttcagcttctttcgtcgcatcagtgtcgttgaagtattctgagtcgtttccttactagaatgcctctagaaacctgcgccgattcctcttctctaactattctggatgttcgagagacggatatcgacgttcgtgtccggcagtcattaccgagagacttatctcgtcgtttgtgggtctgatgaagccgcgtaacggaaaagtgcatgctggcgagaactggcgaaaaaaaaagacatagggacgctatccagtgcggtgacgaaacgacaggctgtctccgcctcataactggactgtctctgccattctctttgagtcttgcagacctcaatcagcaacggatcacttcactcacagcagagtgtgcgcagtaagcacggttttgcttgcaaacagccgaactctattctttctattctttgtacagtcaatatacatttctttatttgcagccgaaatacatcattttataggcaatatccacttctatatttgcaggcgaaatatactattttataggcaatatacatttccttatttacaggcgaaatatactattttataggcaatatacatttccttatttacaggcgaaacatcttcttttgcaggtatgctgtcctaagcgcgttttcactgtttgtggccgtgtatttaactttcgtctcttgcaaagagctagaggcactgtttcttctgttacaaacactctacaaggttttctttcctttgcagggagttgcagagatatgcgcttgtaccggacgcttctgtttccttcctggactgctcgccaggacgttagtggccgagcgacttttctcttgcgaaaagtcggggtgtctcgacacctccgacgcacagttagctgtgcggcccaagtcgtgactccaactttttctctgtcaacgtctttcaacgtcgtcagatttgcctccgatttctgttgagacctcatcctgcagccgcgggcactcgccgcttcttctcgccgaattccggggaaaacagacgccggacgcctcgagagcttgcaggccctctccgtcgcagagtgcgcccgagcatgggcgctgtttctgtttggaattgcctctttcttttgaggattccctactaccttttctgcttctttctcggggaaacagttcgctgcgaagaagactctactgtgcctttccttgagacgggctgatgccttcgtctttgactctcgaaatctccacccccgcgtctagcgtttttggggtgtctcgagctcgtggagccgtcgttttttcgccatgtttgatcaaggcggtgtacacgggtgaaaatgtgtttttcgcgtttttcagaaacctttctagaactcccttccgtgtctctctccaggatttgcttggggctggggcgcgggacacagacgtgactgcagatgcaagttttttgcgcgattgtctcggcgcctcgtcaggttgtttttccgctcgttctcccgaatgttcgacgttctccttctcgcacactccaaatttttcctcttcctgtctcggccaaagttacgctcgttcgcctgcgtcttccggccgcgtacacagtagcccgcgagtgctagctttagtctcgggggcaggcggctgcctccgcagcgggactcgaaaaacgacttctcggcttttcctcttgcaagaagagaaatgaaacttattccgttggcgcgcgcttcctccagagaattttccagaaaatcacccgggagcgttcgcgcctgagcccctagcgttccttcccctgccctgcgtgtgcgtatggacgccgtccaccgcgccagtcagagagaagacgaaaggtttttttctcagaaaacgaggcgctcttcctgcgagcagtgtgtcggcttctgcggcctgaccgcgtattcagcaaga

SEQ ID NO: 3914 - DNA, 2027 bp, Toxoplasma gondii
  source 1..2027: mol_type = genomic DNA
gcaaatgtgaagggcgaagaattcgctcttcctgagagatatggccacgaagttgttcgttcttgtttcgcaacgtttttttttcaagggaacccttcacggctttttcccacgtgacggccgattgagaatttcgtccgtgtcgcgaacgaaaattcccgaaccctgtcgctgaggcggatttcctgctttatgttcttgcgtcaatatttgcaggagtgggtacacatttcgatgtggaaatgatcctttactgtccgtgagttcttgctgtgttgcttgtttgttctgctcccttcacgggccgaacggcaggagaagcttcttgttgcaatcgcgtctcgggacacaacagcttctgcctctactccagattgcggcagtagatttaacaccggtttcaccgtcgaatcgccacactcgaaatacagagagccctcccacagtgtctcttctccgtaggcgaacagagcaacagacacttttggatgcacacatgtgaatcccaacacgaaacagagacaaaatcttgaccatggaaaaatattggctaaaagaactacacaaatcatgttgcacacggccgtctctcgagaaccgtcagtatgacgtgtgctattggtgtatttttgtctattttagtcagtggcattcccgcagttaacacgagttttcggcgaaataatctatgcagaggaggcaagtattttagatcttcgcgggtccagcaaaccagtagagcgcatgatggtcaccactgaagagcgcttccttgaagtcttctgaggtacactgcctggttcactaggtgcctaccattgtcaggtattcatcttatctcacacacactgtcgcatgcgggagtgattttctttggcaaggaaagtgtggtgtctatccaagttctttatgcccccgcatgcttttgccacatccagggtttttttcgattcgtgacaaacaaaatgaccctgctgcttgtttgagagtacctgcttcgtaggttgtttctttgagatacacctgttgatgactttgtcagcttgtgtttcagagtccaaaagacttgctgaagaaaaaaacaaattgttttgaagggcgctttcaagctgcgcatggaaaagacggtcagatcgttcacctggcgtcatccgttttctgcgcaccatcagcctattcctcatcccacatgcggaagttgtggctaatttattcagcagaaaacggagcacaatagtgagcacacgccgctgggaactcttgctgacaacaactcacaggaatcgattaccaaggaccgattgacgcagcaaaatgttgcatgttgcatgcgacctatctagctgtcgaagcatctcgattaggcaagtgcatgccgctggtgtgcacgttttgccgtttcgtgcgcttcggaaggaaatgctgcggagactcgtactccagttttccgtccacacctaagccgtggagaagttccacgctcgcggacgcacagggaatccggccttaacggccttggggctgggcgtgtgcatgcctttcgcgtgattgcctggcacctagaggtggtgcgccctctagcacctcagccaggcttaaagccgttgtggaaccagaccgcgttgtggtcccatttagtaatgaagcttctgttgtcctcttcaacaagccgagggagttaactcgcggcagtcacgtcgttttgctatgtcatgtgttttaccgtccagactctcaagctgcgagtacatgcggattcttagccgacatcttgttgacctgtacaagagtgtaccgcacagacgacgagttagacacgcagtgtgtgtttccagcgcaacgttttcaagttgtgagccttggatgagaaggacagttgatatgcgggagatcgactcgtcatttgccacatctgactgaggaacgccgctctgccatctaccgccgttttgatgtctcaagactgcgacgttaaaaaaaaattcctcgaagtccctcatccgtcctgccaattttgtgacttctca

SEQ ID NO: 3915 - DNA, 4680 bp, Toxoplasma gondii
  source 1..4680: mol_type = genomic DNA
tccacagagtcggagaagaccttttaaaccgcaaacgcgttctctgttttttagactcctatacttgctttctgcacttgcgaaacgtccgacctaaggtcgtcaatttgtctccgaatggcatcttggagaagtttctgttgcttccacggcgcccatggtcctgcggagttcgttctctcgtcgttctcggcgtctgagagaacaccggcaccgtgcgcccctgtgacgagctccgcggctgaggcgctcgccctctccacgtcttcgtagctcgagcacagatgctcgcacacgcagctgctcttgcctgctgcttgtcgaagcatcttcaccagcagacccgcagaggcctttcctgcctcctcctcgcggacggttcctcccctctttgaacacagtgcacactgggatgcagccgcatctacagctgcagccgcggcagccgtttcgttacagagcgcgggtgcatgctgatctctctgtctcgctaaagagaaaggaagaggaggcttctctgtctccatggtgtatggaaggagaccggaaacgagacaggacgtctctgggaatgcggaactcgattcaggaaaatgtgcacttctccgcgttgacagaaacagaggttgtccatgtgcggcatctgcccgtctccacgcttgaaaaaccaattttcagaaaccggcgaccctcacaaactcagaggagagcggcgaccgacgcgcgccagcgtggggaaccgttttcctaacactgcttggagttcgcgctacgaaaaaagaagacaagcccagcaaacacgcagacaaccccgtctctcaagagttctctgtgcgctcggtttggcggctgttccttttccattcgcgagacaagctggaaggactcgaaagtggaagctcgtctctcgcggcgcaagcgcggagtatgatttttgtgtctcctcgattccggggaattcgctcatgaaccgattcggaagcaagcagtctttgttaaacagctacgcacagcattgtgtggacatggcagagacagtcactgcaatttaaagtctttctccgcacaatgtgtgcgatcagatggtctacacgtttcttgacgttgagagccgtgggtcttgatcgaagcgacacaccctagacgagaaagacatcatctggggcgcctcggtgtacatagtttctacttaaagagcagatgatacttgcatgcatacacagagcacggcgacacgcataaagagaaattgaatgcaatttaaaaagagcctccttgtcgaggcattaccacggaatcagcaaggcacacgcgaatgcaacgactgcgcgcgtccgccgcagctgcattgccgcggaaaagttccgcgggaacagaaggaaacttttctccggttttctgtaagtcctcgatgatgacaaagccaatgcctgaaaacggtgagcacccttgcaattgtcggggaatgttgaaacgaagacacaacatcggacttccggttggactccagaagacacgtcctcgggggatggctgcgacggaaaaaggaacttgaaggggagtttggagcgaaactgcggcgaaacacttcgccgcgactggggttttcagtcgagttcgagtttatcgacctttcacacgggacgcgttttgctaaacagaagtgtgatcattcaaaaaaagagctagtgcacacggaacgcgcgcacgcacatgcaaggggggagcggcagcggagcaagcagcagacagtcagaaaagacggggcaggaacagaatcgtttcttcgtcctgcgtctttgatttgtgaaggacctcaaggaacctcaaaggaagagcgttatcgaggctgcagctcctggacggtgttgagaaagcttcgtgacgaaccgtatttaccggaggggtggcatataagttagggaatgtcaaacgatgaaattaacatctaaagcgaggacaaccgggtaccgaattacattcacagatggacatccttcatccttgagcgctttgtgcatcagcaactccagtcgagggtacgggcagacagtttaccgacgaccactctaaggcgactcccacagtggtagttgtacaccttgtacacaaacggcgttttcctcagaagtacgccggatttccctgtttagacatgtacttatgacgggacgagactcatatgcaatccatctcgtaagtcgcctccagtgagagatagagcagcctcgaaaaaatgttctggcgggtatgcactctcatacgaaccttgttccagagaaactgtataaacctcaccttgtggacgtcgtgcttgctacgtgtcaactgcgtaccaaacaagctcgtgtatggtccgcctgctttcgtctaagatagcattggggataaaaaaatacgtgagacacaagaccgagagccgtcgtcggtgccaaggacgtttgttttcatggaagacagtgcggcactgttcagaatttcagggggtcgttttcagcgatgacatcgtgctaatataatcaggttgcatacgaggcagtcacaaacctacgatccactgtacccttcaggaaaagagtagccttgtactatttcagaggggggtatatgggctgttgctgtgcaggaaaggctcttggattcttcagccggcttccagtgaagatgaaactgctttgcttggcctggaccctttggggtttttccttcacacaactgacagaaacgcgttttgcttgtgaaaatccggggctcatggatactcagctatttttacgatctttcaaaccgtccatgagagacgaaacgcggggaaataattatcttgcacacgtggcggcatgccggcaaaacgtacggtgacgttcgtcaccagcccagcccatcgttcgcctggtacagagaaatcgtatatttcacactcgaaaagtgtctgagtggagttatagttgtttctaaatgatcgtatgccgccccaagtacctcactttcttacgtcaggaagaagcatccgcgctggcctccatgaacttcctgtcaatcgaaaatatccagtggctctgaagatgcagcagctctttcagctaaataggtacaaagaacttgagaagcgttactagatttacatagacaaaagacgtcgcagttcctggcggctgcgatagaatatcgaacctaatacgacttaacgtaggtcacccgcggttgaacgcgtggtctgcatgtattcactcagcaattcgctgcatcgccttcagcaaccatcagttccaacggtggaatgtaccgacaggcgcaaccgaagacaaaagttacgatgacctgtgcatatacacagtatctgtacgcttcgcggcaggcgactacaccatgacgtactgcacgaatctgctgttcttcagggtagaaatcgcattgacaatatctgcaactctcactggtgactttcaagtgtacacaaagcctcaatggggtaagtacgtcgataaaccgacttcatgacggttaggccttccggcgctcaaagaaatgttatgcactccatcgtgaaggttcgcgtatggcagagttgctttatcagttcgagaaatgcgtctgtttcaacatcgtcgcaataactttagcagcgctgtgtagttgtggatgagattcaaacctctccgcccgcttcctcgtagttttctgaggatcgatgtgacccaaaggctacagaccctgaccatcctggcatctctgcacaaatccctccttgcctgaatggtatttgtagacatccaaaacactttgtcgttggcacttacgtcatctaaatgtcatcaaagtaccaataaagaggatgaacgaaaggaccagatttttgttgagtgacttgactctgcggagtctgcggcaacccatgaattaggcatcttgtcaagacaagggtcgctggcgttgttgagtagccctccgctgctgctggctagcgagttcgactctcttttttccagtcctcaagaacctagcgcacggagtgttccgcttttcttgtgcctcgttcaaagctcaggggaaaaggcagttctgctgtttttgactctccttggaattcggcgggaggcgcgttttgtctcatccggccgcgtcgtgagtctgccgctagccaaagtctgcgggccgttaaaccagcattccgcaaactcgccccctttaaaatgcattctttgtgtagacagtgtgttgtttctttgtgctgctcccctttttcgtaaacatccgaactgaagaggacctccctggagtcctctttctggtaaccccaatgtcttgttcgcgcctacacacgctggatcgcagagctccccccaaaagatgtcgcgattccgttactctttctccactgaaggcttattccccgtgataagcgttggaagaagtggctttcctctcttcagagtgtgctgttgagtcgagcgctgcagcacgttcaagaagccagagacctgctcgacccccgcgcttcggcgccgcccccccgagagcgggagctgaaaaatgtgtcctggacacacgattgctcccggaaactcgaggcttttgcgaggcaagtctcgctgaattacccctcgagaatgcaccttcgtcccttgtccagagtttgcaagccctctactttttaggcgccttgcccatggacaacga

SEQ ID NO: 3916 - DNA, 4802 bp, Toxoplasma gondii
  source 1..4802: mol_type = genomic DNA
tgtggacctcgtcacgcgaccattttgtgggaaaagagcacagccccgagacgaatccgaaccggcgagaatagaagaaaggcgtagtcgagcagagacgccgaaaaaagaggagaaagtgtgacaggcaagtgaagagacaaagcagaaggacgtttctcgcgttcgtcgcaacattttttcgctctggcgaatctttgcagacacacaatagcacgagggaagcgaagagaacagagatacaccgatcggaggggagttcaacctttttccgaagaggcgcttttagtggaaatctgctctcccttcgacttccagacggcttctgccttcctttctgctccaccgccccagcacaggggactcaccgaaacgctgtcgccctctggactgctgaaaaagttcatcgccatgatggacctgaagaaaagagttgctggaaagacagaaagactacacacacacacacaaaggaacaaacaagaaacaagtccgcatttccttcacatgtatatgcatatgcgtgcatgtgtaggcatgtgtctgtgtgtatccgtttaaatatgtccacatacatacatgtatacacacacacctgcatacgtgcatgtagatgcatgtatgtggggaatctttacagctttgaacaggacgtgtatacaaaaagccatcgagaaatcgataggaaaagaaaggtagaaacgccacgtccgctgttggaatgtcgaaatgtttcacgcggacaccagtgaggctggtgttgcgtttgtgaaaggcgcgctgccctaagccgtagaccctaaacaggttggagaggccgacgatgcaagtaagtcggtgtgcgttttttcctgaagagagactgttcccggaaagtttccctgttctttgtctccgcatttccgacacagcttctctcctgcactttccttgagagtccaataaaaacacgcggcgatttgagaaatgtcgaagacgcaactgggagatgtctttctcggtttgacagctgaagaatgaactctctacttcctctcggacgggagaaaactgaaagggaaggaggtcaggagcagccacagttttccataaaaacgcgaggccaagcgagctgggtttcctgagttaaggtatgccctcttgttttaacgccgggaactgttgggcaatgtcctcacatcagttgcgcgcagagtcgccgctaagaagcgcgggacgtgctcctctcttgaagaaaaaagtgaaacagcaaacagtgtcgagtaggttgaagtggactaaccgacgagttgacgtccaggcagggcgaagcaccgagtgcacccaaaaatccgggaaaccgctcagataacagactgagtcctcaggtcgcttgtgcaaaagacatttggagaaggaaagttccacgtccctctcggtgacttttgatgttcctagggagaagaccatgtcttcttgcatgcgctagatcacggcagagaattgcagaaaaaggaacaaagataaaggctcccagcacttcgcgaggtttcgcgtgccaccttagcttaggggtagagcatcggtcttgtaaaccgaaggtcgtgggttcaattcccacaggtggctctgcgattctacttttcaaatgtggaaaagtgttgtctacggcacaggaaatgtcctttctacagtttccttgtattcgtaactgacacagtttgtagtttatctgttgaacaaagcgttttagggtgtccttgcagacatcagtcagctgcctctccggcagcgatggcttttcttgtcaaagggcacccgcatgatgacggggacatggaaacgactcatgtaacgtcgttcggcataaagtagaaaccggtttcggatctcgggcttacttcggcggatgaaacaaactgaaagtgttataaaaagctgcggtgtcaaacacgctggcagttcttccgtggagtgtacaaggagcagtagactgctggtccttcattcgccttgatctggaactgaccacgaggaattatgtcgactagggctccgaagctacaaaaatctcgctgttcgttacaccagcatctcttgtgttggagacccggcattactcgtggagtgactacacttgactccataacgtcgcacacacacacacatttcgcgctagaattgtatttaaaagaagatcgaacctcgtctcttatatgtacctgcggatggtttttttatgtccttcggaagaatcttccaaagaaacctttgattctcgaagtacacggacggttaaggaatccgaacacctcgtacacattgggaggcagggagctgtgacacggactgttctctgacaccgcggagtgaaacacaagagttccaccatggtcccatgatgtttgtgtgtttaatgttttggcaccctaaactacgaagaagactcttccggtgcctctaatggagtccaccgcctcaaaactgcgacggacaaaccgagggcgagcgtgaaagcatcgtgaaaaaactccatgaatgtcacgagacttgtttgctgcagtcagcgccgcggtctgtcaggttcctcgcgtcgtccagtctccccttctttagacaagcatgaacgtaagtggtcacgtaccacaggggaaaccatttgagtctcactgggtttcaggcgcagtggcagcgtcctggaagggtccctcagccccggcaagccggtcttattggaaaaaatgtgtgttacgtgagtaagatggctccacgaggactgcgttgtccagtgttggaggttttagaggtgaccacgcgatgcctggacgacccctaagtgaagtagaagtggtctgcttgagttgagtcaatcaccataggaacgcaacacgcattttctcagtcgttggattgctttggtatcttcctcaaggaaagacgttcatcaaatggtagatcgtctgttttgctctgtggagcagccgtgctgtaggcaaggagtctgtgtgactccacagcaactggcgtcagaggaataattggtgacggccgacgcgatgtaaaccatctggaacgaaattcagccaccttggctgatacagaacctgcttccagtgactccagttggactctactgcgacacccaaagagggtgttccttaacccactggacttctgtgaactaggtcatgttcctatctggagcagataatcagcgggggattttgcagagtggctccgtagcaactgaagagatctagatgcttttgtcccagatcggtacgcaactgcttcagttcagaaacttccgacagaagcacacatacacccctctctgcgaagcggttaccgttgtggcacgctaagcgcgtttagagtgtctgcgaaacggacggtggcgcctaatccccctttgcagagtcgttttagctactctgagtgctatgaacattcggctgagaaaaaatatagtggatatccaggctgcacgtgtgtgtatacaccaaacgcttggggacagagaccacgaacccaacacaagcacactgtgcgaaggacccaacaatgtagtatagcagacttgtgtgcggccataacgcaacgatgacgcggagtgctctgctgaaaatgtatttgcttcctgacgtagctgcttactcggctaattgacctctgcatggagccgtcgatggtgcgcctttccaaaacttggctggtttggggagcccatttgtggtcgcagaaggttttatcagttgtatctaccttgccgatctcgactgtttccctagaataatttgagaacttgcaggagggccaccgacgaccagcgcctctcgacataccagttaacgagctaagtgaactacaacatggagccagcgtgcggttgccggttctttgttctcggccaattaagcgaccgaaatttacgtagagggcgccctgtctaaccacggaaaaggaacacgcgaggctcctgactaggcgatggcgtagcaagggtcggacctctcgccgctgccacaagtgaccgcagcgttgcaagacaaaccccggttcggcttgcacttggtcacactacgtcgctctttcagtgggcatccaccttgtagagactgaaaatgcagttcataattaggtagtgggccaatatatttcaatcaaaacgctttttttggatgtgcgcatgcgcctagtgaagctgatacccgtgtgctaggcgatcataggagggttccagtgtcgcagttcagcttcggctgagttgacaggtgaattttaatgactaatcgacatgtggtgtcatgtatgaggccaggtgtcggcagtgactggacttccagcgaacaaagcagttggcggcggttcgctttctgaaggcacacctccaggaagacggggtcgaatgcggtgtccggtgtgccgtggaccggaagccacttttttgaggcctcttggcttcggacagagtcgctgggtaaccggagaaagaacagtcttgtgggacttcccggcgcacaccgaaccggaagaccagcatcgagctacgcgccaggccggaagatcctcttcccgcttcactgcctctgctgcccttgcccacctcggttgctagttgcgcagagttggctggtcgcggcagcgtggaaaacttgacgctgcagttcattataaacagtctcgattgttcttctcaagttgcttccttttgcttttcatttctcacctccctttcgctcgttctcgaccgttgtcacacatcaactccattcacgccggcctacacttcctacctggtttgaaacccggtcttgtcaaaa

SEQ ID NO: 3917 - DNA, 4773 bp, Toxoplasma gondii
  source 1..4773: mol_type = genomic DNA
cacaattaagggtgttgcatgttttgactttgcgcgaagcgaacactggtgttcgtcgctcctatcggagaaccctccagaaaggggaagaccttcagaataaatatgagcttggcattttctccagtcccgaaagcgaccgctcagcgcctcgtggcgttgacgcgctctggtcacttgacataggatgctcacgataaaccctgcaaagaaaagtgctatagaaaagccaacaagcctgcccaccctttgctcaaggtacaatttcaaggaattcacaaaggcaagatgtatcgagcatttttctcggtccaaaagagatacactaggcgcctaaacacccatctcagatcctctgctccgcttacgcaaatggctttttcggaccgggctgtcgctaagaagggcgcgacaaaaaacttctgcatgatccgcctaaccttctgaacacttctcacttaccttttcgcccagctttctgactgctgactagtggacgcggagtaccccgtcaaatctgcttggctgtaccctatgtcttcctcgaacggcatagaagtcacactggtcagctcgtcaggagctccagacgctccttcggatccacttgaccacagatgggcgtcctcagactctgaagtagcctgatctgtttcatttttatcggaagacgaacggagtttttcacccagtttccggaaacggtcattctgctccgcgggaccggcagcatcggtgttggccaccgtatccacctcatcagacgttaaacctaacgaagcgccacacaccgcgcaagtcgacagcatgtagaggacggctgagaaccgcatattgataacttcgggcacggaacccggtcaagacttcggtgtcactggatccttctgcccacaagctgctggccgtgatccagtgcatttcggcattcctgatggagagcgattcggttcgttgcttagaacagcgaacactcgcaacgccgtgtcatgcttggtcgctctactctgaatcttctcgagagaggagtggcactgccggcctcagcagcttctgtacagttttcgggagaagtgcctctcaaatcgatgaggagtgcacagaaacactacatggtcacagagaaaactgtgacctacactaacgaaacggcatagaaacggtaacagtgtgcctgcgatgtcaggtagcagcccttctctgtctccgtaggcacacggaaactgtgacccgctgcttcaaaagaaccgaattcgccagcccatcctcgacaaccggtacacggaactgttggtcttgcaacgggaggcgccgtgtaataaacttctaagaagacgcagcatcgccaggttctcaacaattcgatggtcgaacacggcaggagacgggctactactgacgacactgtcccagtctcgagctgcatgcgtgccgcagatggcaaagaaatttctccgcgaactttttccttgttcccgttagccggtcgtttctaatttaaatttggttttccggtctacattatggcagtcaaccgaagtcttcgccggcacagatatttgcccttgttcactgaacacctttctgttcggtaagctgccgcgcatgatcgctgacacgcaaggaagacgcgaacggcgttgaatgttaagagacacaatggaaatcgacacatttttatctccgatattgctacagagcgtatgtcttcgcgataaaacaacggtcagggagctggtagaagaccattccggatcggtagtcactccgtttctttgaaacacacttcctttttcgccgttgagactaaggtaaccgatgctgaccgagagagactttcggacaaaagggttgagaaagcgttgaaacgacatctctgtttacgtgctgctgcccaggtgggacaagaatatgttgtgacagcaactcgctctccagtcaaacagacacttcccggtgcgcggtataaaggtaacactgagacttccccacttttaggtgtttgcttgtttacggtctcatgtatgccctcgccggaggggggatattattttccaccgtcttgatccgctgaaaactcgaagaggcctgagcgaacatcgaatcgcagcaatgctgagcagctgcaaacctcagcaaacaatgctatgagaaatggattggagcacggctcgcaaagcgccactagtttcctgccaaaagtggttcgccgtggaagccggccaagccggagtccgacagtgtaaccggtggagttcgatgtctcgttttagcgtttggcgttgcgtctcgacgatgccgcaaaaaacatacctgccagacgcctccgttttttccactgtcttgactaacctccgatgcgcgtgctggttttagggacagtgagtttggagggcattcgacattgcatatgctcggttgaaagaggcatttttatttggcgccagtctctctgtttcgatgcttccacttagcgggccaccaccaggtgaagtcctggggagagttgtatgtgtagcaaccctgtgacacctcaagttcgaggacatgtcgcaagcgcctgaaagtgtacggggctgaaagaaagagtttcagcttaactacagacgcgccatgatctttctgtacgccatctcgaagcaagcgtaacagaaacgttggcagtgtgcaccgtgtctcaccgtacacggcaagatttacgtcgtcgttttcaaggcaaaatcgtcagacgacaagccgtcaagttgagttcttctcccgttgttgcctccacctcgatgtcttacttgctgtgttcacccgcacatggttttttcccgcactgcagcacggcctttgatatggtctagttcattgtcacaaaaaatgcgagtgtctgtatacccggtgcggatcatcagaagtgaacgatcgcttgtctgtttcattgcaccgtcttttgtatttggagttacgaaagctcactgtaaggaacgaaattcaaggcagcttctcggaagagatatagttttgaattgttttatgtttcttacttacacctctttaacttaacaccgcttcgtgcataagacttctcgctgacgcataccttctcagaatgacgagatccgtttccttaattcagtaatgattgccagtcctctataaatcgtcttccgcgcgtgggaaactctaggaaagccactccgggattgataggaatttcaagggtcttttccgtctttttcactcgttttattgccgtgtctcgatctaagtggttttgtcatcatgtctcgtgccgtcgtcccagcttcacatcccttctacaagggttgtgacggacgcacactcttgtgatacgaactctcgtgtacagttgtacagcaggaagttgtcatccaacaacgctctggaggagccacatgagcctgtctactcaaagtgcatatctgtcgaacccttcgaacagggaagtggcaaatgccaggtgaaaagaaacagagaagcagttggaacgagccaaaaactgtgatacggcaaccgcaacggacgcacataccgggtctgtttcaagcaatatttgtgtttgctagcggccgaatgaacagcatggaaaagcttgtccctccccaacgtctattatgcagacgggcgaagtcagctctcacaaactgtgcaaatgcggcaggcgccagcttcggtaagaagcacaggtggttttgcttgcatgaaaaactgaacacgtgtattgcctgtgcatgcagaatcaaactgtatgttcttctatgaaagaagggcgccgctcctccctacgttgctctcaccatgaaatctagggatcgccggtgccatctactatggccagtgatagcaacagacatatctgcctgacttcatgttgctggcgctggcgaaactccccagtgaaaagactggtaatcacgaaagccattacggattctcaatcttactttccgtacttcctagaaagcgagctggtaagctccgtacccgcgaagacaaatgcaggcgcaccggaggaaggggtattcctcagcgtgttcgtgagaaatccgacgacatggacgaagtacagcgtttctaaacttttcgtgatggctaaaatccgttagtgtgcgactgcttcttttgggatttcgtttgttgctgagggggctgtctgtgaaaaagcggagcttgagtcttctttccgaccgccgacgaacagcgtctggcacagttcttccgctcgcgcatgctgtgctgaacaaagcttttcttcgtacaaagaattgtatttccgcgctggccaggcttaccggccaagctttttgtttgtcttcaaacctcaaaaacggaggttacttttcacgggttctttttccacttcgcctgcccctttgtttgacagagcgtgttttttcttcgcagcctgagacaccgcgcgtgtcctgagttgcccatgtctctagccagcgccgagatcgctcggcattttgtcggagaactgatcacatttgcaccttcacacccgcctgcttgacgtcttccaattgcaagtctgtctgcgcttccgttttatgtgtggtagtggaattttcagccgttgcgtcagaagttttggggtctcgcgttgtcccgaacagaaactctgccctcacactgaatacaaaaccaaatgacggctccttcccagatcggcagctactgaacgccagttttgagtcgtgcacctgtttccagtgctgcagaagtgcgcccctcccagattaccgtcaaatatacacatca

SEQ ID NO: 3918 - DNA, 2376 bp, Toxoplasma gondii
  source 1..2376: mol_type = genomic DNA
ccatattcgcgagcgcgccgcgaatgattccagagagcagagaaacgtggacgagaggctcttgacagagtgccgcgacggcgccggccgcgtccactccctcgactcgctcgcgtccgtcggcgcgtgttgcggggactccggtgtacgtacacccggcgagcagatctttcgcgtccgcggggcgcagacgtcggagccaggggaggtcgtggtcctggatgacgtatccgccgcggcgattggtctgcaggcggtctgcctgtttctggaagagaacttgccacagatctttgcagacgaatttgagacactcccgctgttcccacatgcgcgtggagagccgcagcgaaagccgctcgaggagtcgaacgccgatctggaagcccgctgcctcgaggaccgcgacggtctccgcgcggtcgcctcggctgcggcgcgctgcgtagctcaccacctcctgctggagcagctgcagtccactggcggcgacttccacgaccggaggcgagagaactgcgggagacgcttgagcagacacactcgatccggaaggcatgaagaatcccggtcgtgctccggagctcagcatggtgcagcgagcgatctgagggcaggcgcaaacgcaggagagtcagagaggagacacgcaggcggagaggaagcgagagagaccgggggaagaggaagagcgatcagagggagagaagacgagagatcgcgggggaagctactggaaagagaagagtctcgacagaggggagagagacatcttggtcttgcatgaggcagagaaactgcgcagaaccggaagagagagagaaaagagacgcgcgaaggcggttttgacaggcgcggagggaggggagtcgcagagaggaagagtcgaagcaaggagacaatgcggaaaaacggagaaaagatgccgaaggcttcgcgaagaaatacacgccgtgggatccaaggagcttgtccgatgacgcttatatttgcgagactatcgaaacgaagaagcgatactgttcgcgaggaagggatgtgcctggacggccaccgttggagtcgaattctttttcacgcagacagaaacagtgatgccttctcggattcgctcgaccctctaagttgggatggaaaccagaggaggcaacgacagcgaaaagtcgaacgcagagaggaaacgagacactgacaaagcgcagtctgcttctggcaagcgccttcactcgaatcggcgcaaaacgcgagcacacacgagacgcaaggggcttccttcccggaacaagcggccgacgcgggggctttctcgagatgctcacatcccggctcctggggtgtagtacatggtgtacatacaccgcggacacgacggaaagagggaaaatcaggaagcccacgccaggcagagagctcgacgggaggcaggggacgcagaaaaagttatctaccagcagagagaggtcacgagcaccggcagatctgtctggtgtcgaggagaaaacttcacgaaagcggacagcagccgttgtaaaacgctgtgcatccactcgacgaagcgtaagccagccgagacacaaaacagacgatgatgagagaggctggaagagacggaagaacctgcgacgcgtttctcccaaatccgcgctcgtttctcgcccgacgaaagggtgtgcatgggagagaggcaagtgtacgtacacccgaagtgtgaagctcaccggaaggcgttttctgtgtcgctttcttttttgactgaggcctctcttctctctcccaacagtggcggcaggctcggcgcacacatcggcttatcttcgagtgcagcgatccgaaaattcagggggttgccagacaaaatgtacacactgcgaggctgcaacggcggtctctaatgaggcgtgacgagctcctcaaaatgtttctttcgacgaaattcatgagcgatacacaatgtgaagaaagcaaagacacaacgcttctcggcctcgtctttctccgacgtgaaaagccactttgagaggagtctttttctcctcgccccgtgtcttcttccagaacgccttcctcttgaatggtgctgttccgcgattttctctgtattccttccctcaaagacgctctgcctccttccatctcttccatttcagtccctttctctcgcctaacctcgactgctgctcctctcttctcagttgtctctttcaatccctccctcaattctcttcgtagtccatccttcctcgccagtctctgctgcgatcctgttgcgtcgttccgccgctctccgccgctctccgctactccgtcgctttcttctctctcggaatcccgtacgtctcctgctcacactgcgctccctgacgcgtcgacacacca

SEQ ID NO: 3919 - DNA, 3681 bp, Toxoplasma gondii
  source 1..3681: mol_type = genomic DNA
aaggaacggattttcaccggcgaagaaatcggagtgaaaaagagcactccaccaccctcctccgattccccagtgccatgcgactcgtcgctgacgccactgtcgctcctgcgccgcgccgaattcgctggaagtgaaagcacccaaccctgtggcatgcacgcgcctgcagaaacgggggcttcttcttgagaccgttccagtttccaattttctgcgtcttcatcctgcacggcagtctccctgaagcgcctcgaacggagagcttcggtcacgggtggaggattcaaagtcggagtgccatttggaggcgggttggagtacacatctcgctgggatccagcaggcccggaactcggtgacgaggcatagccattgagagatggagcatctggcggagattctgcgcacttcacagcgtgggcggcaccaagtggagacgagcgcacaagcaccgaaggctgggcatacacccgcggcacgggcgcccgtctgagagcctcctggatggggtgcgaagacgcaagaagcgacgcagcctgagaggcagcctgcagctgcccatttgcgttcgtgttggaagactgaccgcggctgctgatcgtgctgtatggggcggaagaaaccacaaaggacgccggcgaaagggtgtctacccagctggctcccgcccccgtgtcgttgctgctgcagggcattagaaacgcgagaaaaaacggcgggtgcggggttccccttggagcggagacagcagcttcgaatattgagagctagtgacttgtttcgaagtggcggtcaagtcgtgagttgttagaggtgtcgacggttcaggggttcgcgagtggcagtggcgccttggaagacagggcttcgacgcggcctccgtagggacgaacgcaacgattgaggtggagaagaacagacgtaatagaaagagacgtctgagtacagttttcttgaaaagggcatgaagaaacgctgaacgaaacgcgagagtgaaccgcgtggcggatgacctagaattcgacgcgcggtgctgggaactccggaacagccatatcgtggcaggtcggaatacttccacaggaggaagacatttgatttgtgtcaagcgaaaaacatataagaggattgaagtgaagcgaacgaaatggcaagtgactggagcgcttgactcaaacgccacatcttactcggcggaaatcgcaacagtcgctgccacggcaccccaggtgacggactctgttcttttgcagtccgccgagcggactgaggatatctttcgagaaaacgatgaacggagctggtcgcaacaggaaggcaacctggcaaatgcattggaataatagtcacgagcttgacttccgcgaagatcccaggactttgccgacgaatggcaaaaaacgaacacttctggtatggcacatgcagcaccgtggacacgctcgctggccggaaaacgactcaaaaaccaacgcaaactgaacgcacagatctcggaaacagaaaaacagggcactccgtgccagaattcaacacacaatagaaaacagtgatatctgttcctgcacggtttcccttcagacgagagactgtgaagcgggaaaagataagaaaagattcaatttattgtactcaacgttatattcgctcccgaatataagccgcggcattggtactgaccaagaaaacccaactgagaacaacgccgagaattgactcatgcaaattcgcggtttacattgactctcacccttctattccaccgattcctcggctggcctagcgtgttcactctgacgtctagatggtgtgatggccagatttgcgtggacagaacttcaagggagagtgcactcttagatcgctggcgttcatgcgtgaaacatcttctgcagcagacatgaccgttttcatgtcacatgacagggccgtaaatccacatcaaatgaaagcgcgtacaataattgatcttcgttgtgagcttcgtgagtggaatcgacgcgaacagctgcgccatcactagtgcaactcgagaaactctcgtccctgctctgccacaaactgcactcgaatgagttctttttctctctgcatcacatgcatctacacatgtagcaacgcccactcgctaaacatcagtcgcttcgagcccagatagtcgagctttaagtcatgctccggcacctttggtacggagtacgtacatcatttggataacaacaaatgtacaagcacttcctcgctccatgttttagtgctcagctttctcccattcactgtgcatctgcgtggagcatagcgttttcgaaattggtaacttctgttgctgcccaacacgacgcgagcgctcacggtctggtggcaactgcgcgagacaggctgcccaatcacgtatggttttcatcacagcagtacaagcgtcatggtatgcaatcattttaaagaacacgttctttcatgagttttatctcgatcagatataatgtcgctggtggacggcaatagtagagcggattcgatgacgttcaatcgtggcacagtgtgcagagaaacacagacgtattccgacaggtgatgaatgcttgagcagtagtcattgtcgtagcaccgttgacttgcaggaggagcaagtaaggtagtaggccagtgagtttctgcctttttctgtgtcgtgcaaatcccccggctccgagtgctgcgcaagatgggaccccctgtcagcttactacccagtgccgttcaccaaggtttctcgtggagctggagagcgcggggaaagagaagggggaaagattcaattcgctctgtaatttgtcgttcttgttgccttcacgcctccatcgttgtttcttgtctcgtctcgcgtgtcttgtggggacagtgttaagcttctatcaaccacacaggtcgtagtgctgaaaaggcctatttgtgttgcagcaaggagagttcgtctttgaaactgaggcgtctttcaaagcgaacaccagagtaagacgttacacgttctttttctgcgccaaaacagccgaccgacattatgcgtttgttactctgtgagcaactctcggtgcgcaacgtgcgccttcttttctgtgcgcggtttttgacattggcgacagcgtcggctgaaacgtgctccagagacatcccatggaatatagtgttttcagccctctttttctgaatcgttactttgtcctaggaaacagctactgttcctgcttctccctcgtctccccttttcctagatgaatgctcggagctgcggacggagtcagcgtacgcaaagggtccgaaagcacatcttccgatagctatttgcaatatgaggtcttctatctgcttgttccgggcattattcgacgctatttctcttttttcgtgctatcgatgaagatcgctattggtttctggccggattctcaacccttcttccttggggtccacgtttcgttttcgtgcgcagtttcacgcggccgactgtggtgtgaaggctcacttcaggtggccagagctttgcgcccgctttagcgaggcacacacttctgcgatcacttctttctgcggcagatttttcatttctaaactgcattttcaatattgcgcgggtagccatgtctgcgaatgcgagatgagtgttctccctggctgcaattgtactgttctgagtcaaaa

SEQ ID NO: 3920 - DNA, 2763 bp, Toxoplasma gondii
  source 1..2763: mol_type = genomic DNA
acaccggaaagaataaactcagcaacagtaaaaccatctaatgccagcagtatgaaagatgattagagacatccagaaaaaatgaatggttacgcatcccatggttggtcttgttccactgggtttgaacaagggtctgcctagtcaactataaaaggcaagtagtcaaccaggcgtcacacttgctcctgcgacaggcacaaggaacttgggggagtctagctagttttgcgaataatcttaccggtgagaggcggagctggtctccatcgtgtacagcgacggatagatcagatacaaaaggcgggaagttttggtagtactgcgtgactatttcttgtggaaatcgagaaaagtctgaaagaagagacagccgcatcttggagtccttatgggtattgtcggagccccgtcgacggctgtgcgccctcatgggagcaagcgacgaaaaaaggaaagactgagagaaacgcaggtagtgaaacgagatgaagcggttctgtgcgtgcccgtgctgtccaccaagaaaccacggtgtttccctccgcagaagatttttccattcagatcagatgataacagtaaggcaagagcaaggcagaaaaggtaaggtgtttactgaagtgacagagaattgaagtcaaggggccaggagacgcaaaaggatagcaattagaaagtcgtcttcaacgacacgtcatacatgggacgcggatgaaatatcccacgagcggcgacaaactgggattcgacagatgagtacaaaggaaccaaacacaaggcaaggacacgaggtgaattcttggctgctaggcatcgcgcaacacatctccgcaaaagcaatctgcggcagcaggagccatatgggcattacaccacagggaattacgtgagaaagacaacgcatgcccgctcaataccatcaatggttattcaatgatcaactctttcatttttagagagttttgatatgccgggactagagaatatctagagctaccgaggcaggctccatgaaaaaaagcagaaaggggaacttacggtaaacgtataacattattctatcaaacagttgcatacaatgcgcaggagcgaaatggagagtatgagcaaaagaaatggggtatgcttgccaatataacctcgtggttcctgttctacgggccagcggacgagttcgcggagagaagagataaggggtggcgttggtacgctgctgcccctgccaattttacaatacggaatacaagggcctcgatgtgtgtggcgttaatgtttggcaagagagaaaaacggccggcagcataaaggggattgtgacgaaagtgtgggaacttctcaagacacgagcctttcacagtcgcaagaaagaaaaacgcctaggaacaaggatcaatggctgtcgatcgttcatcgcgcagcagttcgtatctttcgccaaaaagaagaccaaggaacaaaaaccgagatgcgaaatggtaagcttgtcaaaaacaggcactttcaaacgtaccctcctgcccattgcatttcgatacccgccatagtggactcttccggccaagagccagagccagcaaagcgatagctccgctttctgttctgggccccaagtgtgccatgaaaagccacggaagatgacgatggaatatgctgagttaaaccagtggaatgagcttaaaagaggaggatcgaatactccccgtcgtcgagtactgtagttgctcggtcatgcaagcaacccaagcagccacgatctgcgatgtgacgagtcagtaaccgcagtgggacgcgggccgacgcgaaggatcgaagagtggatcccggcagggggatagtattcgatcgagtgaactatggtattcagctcatgctatagttcgaacagcaatgctccggtatattgatactgtcgagctttccattactttgtagcatggtcccctgttcctgtccccggctagctctgtgtgactgagtgaggagctttttaagtcattcacaagacaggcgggtgggccgcctcaggtgcgcggcggcatgcaagggcaataaaatagtagtattcgtgaaaaacagtaaaaactggctctatattaaggataccgcacagggcatccaaattcaacagcatttttctctgggtgacaaaaagtcgacggtaaccgatttgcgctgcgcggctgtgcgcagccctgaagcacatgtccgcaacgtcgtatgtcgatgggaacagaagggtaatttcggttcagatacgacagcggtttcttgtggtgttctaaaggatggaacaggacttccgagagaaccaacgatccagaaattccaacggacatcccacctattgcgctgagctcgtatcggcccatcgtcctaccagcacattatcttcacttgtacagcataaacggcgacccatctcagcaatccaaaaaaaacagaatattccgcacaagtacatctatgtgtgtgggtaaatgtgctttgtgaaagggttacagggagaaacttctggtatgttttgtgtttcggtgatcgatcaaactccggccgaaagcagattacacgtactgatgaggcagtaactacttgtagatcataatctgaagatgcatacataaagacactgatgtgaggtgtacagacacatgaaacgaacttcccattttgccgccacattcagcagacatgcatgtgttccttaaacgctctcgagtaactcactctactaacatccgatacttcgtggacgtaacagga

SEQ ID NO: 3921 - DNA, 4205 bp, Toxoplasma gondii
  source 1..4205: mol_type = genomic DNA
atgtatatgttcgtaacgaatgcggacagattacagggattgacgttttgttgtctgctggtgctgcgttgtacaaagaactgtccaattcgttgtgtgcatttgcgctgtggtcttgacaacttcagggtcgtctaaatacctacactgtcgagccacactgttccgtctgtgctgtgcatgcatgtgagcaagaggtgcggttgctttcgaaaggttgtgtacagcgtgtgtctcagtccttcgcctcgtacgtagtctcgcgcgattgagttcacgtgagaagaggagtgcattttcactggaagtaccagcatttgaaagcttccgggaaatgtgtgcgtggcgcgtagactgtgtgttggctacctcggcttctgcacaacgttcagctgaccaggggccaggtagattagaaagcagcatgtggttcccgactgaggcagagccaccttttttctcgactgtcgcgacagcgaagcggggaactgaaaacgcagagaagtgaaagtcggatttgcgcatgcagcggcactagtgagaggctagactttcgtttcggagcactcggttgcctgccaagttgtatgtgcagaggctgtcgcgtctgtgcgagacgccccaagcgaggcacgtagaaagcgcaattccgaccgcgcctggcgttgagaacgacaaaggaatgcctccggcttcctttttcggcgccactgaagtcgccgtgtctgcccggtagcggctaagagcattacgggcgccaagccctcaaactgcgttgggtggagacactgcaccacaaagagacaccgctgcgtgttgcatgcagttaggaaagaagagactttcgtatggagccgcctggaccctcacagagtctcgcagtgcccgcagcagcttctgctcagaaccccctgcaggattgattgcacatgtctcgtctacgaaacacggatttcttgaaaagtaccatctctgttcacattcctcgacgtggagggggacctgccccctcgactttcggattcgcggtcgaagcaatcccgtctagaccacaaaatctcagccttcgcagtccccgagctcgcccgcctactgcgccgcggcgacgtcagtgatctgtccgctgaagaggacgtagtcgtcgctgccgtcttgctttcccgaggccggagtgtagcgaatctgaaaggcgaagggtctgtcgatcgtcacgttcacgatcttcggctcggccatggccatgcgcagcatcatgcccatggccgttgcggcggtcgccacagtcccgttctcgtctacgtcgatgtccgctgcatggaggaaagacgagacgaccaggtcacggtttccagtgatcttggagaagtccgcagaattcacgtcgaacatgcttttgattccgagcacctcgctgaacaccggaatcaggtcttcccggttcgccgcagagctcagcttgaacttgggcatcgtcagacgcacttgctttccccacatagcctcggcagtctcttcgctccgcatctcccgcacaagagactcgatgtacgctacgcctgcgcggaaagagtacacgaaaaaacacgcggcggatatggccgaaaacaactctaagggggaaactccccatgaaaggacgagtttcacgagtcgaccttcccgagaggttgtccggatggacaggaataaaactgcgactccagcaaatgaaattctcccacacaccaaaggatttagagtataaacacactcgaaagtgaacctactgcaaaaaaagcatccaaaccggaaaccgtatgtaatctacgtgtatatttatttatggaaatacatttgaatatacacgcatttctttgtatgatatatatatacatatatatatatatatatggaacagctgcattttgtgtgtttctaggagtggttggaccttctttccctcagtcggcggcgccatcctggcgacctcgtgccctcgtcgttgtttcgtccctgtcgtctcactgtgcttctgcgttgcggtaacttttgatttcttacctagttcggcgctctttttcttgtcgaaaagcgtggcgaggtggtgcgagtctcggggctgaatgatgtacattgcggtgttggggtctgaatagggcagcgcaatggcgacgacgttttcgtccaccttgacagcaagtggcgagtccttcagggttgtgtgcatcatgctgacttgctgctccacgtgcttgccgtttaccagcgcgtggaaagttccagtgtcagttcggtgcttgggaaactgcttagcccaactgcacttgaagtacattgcactgacgaggacgagcttggtgttcgggttgacgtcttgcgccgtcacgagttgtttgatgtgttcgtgcgtctgcttagagacgaagccgttaatttcctcaactgcagccgcggtgtctgcgaaatcgagtgttttggcctcagtttcgcccgcagattcagttttgaggacgctcgcgtacttccggaactgcgggttgccttcgaagtcctggtggacatacacccgagaccccacggcgagctggggagcagcttccggggaaaagccctcttgatcgagcttcgggacggcaggcagggaggaaagtttgaggaagttgtgcatttcgcgcagcgtcggaccacttgcgccgcgcatggccatcgcgaacacaagcaagaccgagaacggcgacatcacaaagttcccgtctctgccttgcgcgcgtttgcgggcagccatcgcgcgctgcagctcggccgcgggagtcgacatggacgccatttcgtcagacttttcgggtttcttgcccgagaaaaaggaagcgagaccctctaagaagtttgacattgttggtgcaatatagagcaaattcacgggcgaacaagcgatgcgtggcgctgggaacgctggagaaaaatgccagggaaaagaccgcgctgcgtcgcgcgtcgctaaaccgaaaaacagggaacgtttttcgcctacctggaaacgatggagctgaacaaaatagtttactaaaggaaaacaagtcgagcaaaactggcgagctcctcaaacgcagctcaaaacataaataaaatggggcgtctcgtcggtctatgcgaaccgtaaaaagctaccctcacgagcgtggagctcaccgcgggagcgactcgtcgcctagccgacatgcacaatagggtctttcagatcccctggtgctccccgtccgccagcgacaccgctgtttagcaagccttttggggcatagtggagccccgtctctgcatttcgcacaaactctaccagggtttccttaaatgaatggtagtgttccctccagtcctccggcgaaggatcggtgtcgtctccgtctcccgacagagaactggcctcccgggctctcctcccaccatttgccactgcccgaaagacgtcaaaagtcaagttgtaccgactgtgtcggcttaaaaacgaacgggtgttccggaaagaaatagaatcgatggccgcgaatgcaaggctctctacatgtcgtttgcttgcgcattaaacctagcgccgcgcccacttgagatgcttcgatgcggctcttgccgttctgtctcgtcctgcacaattgtgccgacaacctttagtaacaccggtcctcctcaattgcacccagttacagaacagtttcacttatctggttcaccccgtcgaattcggttttcattttgtttttccatgcacgcgagaaagaaaagagcttggcagcgaaacagcgcggtggaacgggaccgcgaaaaagactcactgagccatcgagagacagacacaccgcgacagaacagaatgccagcgaggctgtgtagtgccttggaatgaaacccccacctcaatcatgcagagaacgatccgagaccttttcaccatagaaaaagcacctgtagaggtttctgcgtataactttctggtctgctagaagcgccgatgaagggacctcctggggggaagaacttcacggtcgattcgcgtgccaacgcgggatgatgtggcgtaccccccaggttcggaaatctacatgttttttactgtcgcagcacgcggagagagaaattccatttaccgcgtcaaactccgaacggttgtcaaaagaacgcgcctgactaactggtgtcgctgagagtccggacgttcttataccttgactgca

SEQ ID NO: 3922 - DNA, 904 bp, Toxoplasma gondii
  source 1..904: mol_type = genomic DNA
gcctttgttttctagagtgccctggacactgtatgcgctgaaatgagtcggcactctctggagcttcaagggcacgtgtttgtccggtgtttttcccaggttttcctttgatgtccgcccttccgctcttcgttgcctttacggtgatgcagagaaggcatgataagaaaggttttctacaggtttctttctgttttgagagaactggagacgcagtcatgaatccctgtgcgaagagcactggaccaagcgactgcaatttactatactttctgcttttctctttagacgtcaaaaagtcgtttcccctgattgcgtccacgtcggtgccgatttaaggcagcccacatgtgtgggatttcttcagaccttctcgaatttttctactctccttcttccaggcttgggcgggatgatgaacggtgttcacagggaagaggccgcgggagagtgtgcttcgtttccttcacgaattttgaacgacaggctcgctcgttgtctgcactacattcacaaaagtctcccgaagcagagtaaaatacgtttctcgacgaaggcggaagtttcctaaatccctatttgttttcggcggtttccccaggtgaagatgcagtagcgctcctccgtcccctcaattccttatcgataccaaaccctagcagattcgtgggaagttacgagaacaaaagtaaacaaagtcacacatagacacagcaaatgaaccgagcagttttttggctacctgcgaatatgtagatagatagatcgctgtattcgcggtataggtgggtcgtattcgctctaccttcttgccctctctcgcaccccattttgtttctcctgcactttgagaggtcaaacactgggtatcaagcccgtaaaagtgtccgcttccttggcacta

SEQ ID NO: 3923 - DNA, 4818 bp, Toxoplasma gondii
  source 1..4818: mol_type = genomic DNA
gcactctcctgcgaggacgagtgtgtgtctgtgtcctccttttctcccttcctcgcgttggcaacaacgtcaggaaaagcagatcttcaaagaaagcaacccggcactggcggtgggcaggaaacaggcctgccgagttcttgcagacctgaggaaatggccaactctccgtaccaaccggaaggcgcagccaacgtgtgagaaacgcttcttttacccaccgagagaaggaggaaaatgaaatcgctcctgtctcaagaacgcagcggacaccacaagtaggaaaagcagagaatggaggaaaccagtgagttctcgagaggaagaactcccgtcactttagcgtttttttcccctcaaactctctcaaggtccaaaacttcttctttctctgcgacctcgcgcctgtcgttccctccgcgttctcttctgtgtgcacgccgccagaattccctctagttggctactctcctttggtgaatcaaggatgctttccagggtggcccttgacgtgtttctttaggcgagttgtagtctccgcgatggtcatgggagaatcccgcagaggcgaatttacctcttgcggaagttgcagtttgataaaacgaaacccagatccccgtcccgattttttcgcgagttggggtgatctgaaagggaaaaaatctgtctcggttgttggcgggggaagaagtctgcggacgaagctgaggaaaaacaacgggaacggatgcaaactagcgacttgcggaaacgggaaaaggtgacaaaagatgtgacggacgttttcagcgccttcgcgaataatacacggttattaacagcgaccggagaaacaggggcagcgccgccgagagagcagactgtgtgatggagttttacgttacggtggaggaaacagaattgtttggtgaaaaacacggagcaagcgattccgaaacccggtaaaggactgatgcatgtgaacgccggcaatggagagtcattagaaaccttcccttgggaacagcgggacctgcaatcgcgagtcttgaaaaccagcggaaatgaccagcgagtcactagttttgcgtggaaaaaaaagaagtcgtcgacgagacgcagaaaggaaaaagccaccaggggtggtaggatacggacggtcgagcaaccgtgaatttgagagaaaaacgggcatgtgctgcgcgtggcgccccctacaaggcaacgagaggggttccagaaaaaacggaaactcagacacaaagaacacagcaaggctacagacaaatccaccaggcagtgcaggaaaaccagagagctttccaaagctgacgggacgccgtcggggtttttgtcgaaaactccgctgaaaagcctgagaaggaaaccagggggagggggggtaccaactctcgcaatgcgccactggcgagaaaagcagacacgctgattttgcggcgagactcggaatcccacgcagagtgtacatgcccacttgaggaaagaagtccgtttcctgttcaacgagggaagaaaagggaaagtagaaaaagttcagagcgagcaaggaggaaacgatgggacactccccgctgaggggctcaaaaacgcgaggggccctctccgtaaaagcagggttttaaccgtgtgggctgcttgactgcgtagatcttttgacataactccagctcttcctcgcgtgcaaggttgccgaggaagaaagtggaaagtggtatctttgaaagaattttacgagaaagcgtgagaaagccaaacacgcttggggacctgtagtgtcgtataacccgcctgtccgactcgtttagcagtccacgtgccctctgtgtgccacagctgctgcaacattgatacagaagtaggtgtcttgtgtgtttccccaacaacttgagcgtcggttccctcaaagagagttaacggactctttaatcgactcctacgatcatcccatggtcgttaaagctacttgtttctgaggacaacactgtagtaggggctgtcgccgatactcgttatcatcacttcagtccaccactacttgtcggtccgttgcagcttgtccctctgaaccggtctcttgtcatacttgcaggcgccgccatatctgacgttctgtatgtatggtgtactgttagcgctggttttaaccgcgagtaaagcgctgcgcagatgctagtatagtaagcaccatggtccgatgttccgccattctacaaggcggtcgtagaactgccgagaagcccgactctattaaaacggtggctcgtcggagtctgtaaagtatttcctgcgctctctcaactctagtgtttttccccagcagacgacaagttcggtaatccttcccatccacccttctttgatgacccgcagtccagctggagctcgccggttttgttcgcgccagtaaccagagagcgttctttaaggatggttgcctccttaatgcaggatgaggttgcccagtcatcgccgatgtcccttgcagctggacagttttgctgcgagtgagtagaagtccagaatggtccagcaataggaatacgtattgtcattgtcggacagcgaggtcgtcaggagcaccaggctactgagagtccgctgaaacgccttcctcacctttcacagcgtaccacgctccgcggcaaatagcggtgatgggcaactttcctagaacaccggatgtcccacatcgaaaggagttgcaagaatgtcgccagggtgtgagtggccggtaaaaaggattcacgaagcggcaggctgcgaacgactaggcagtgccacccgttagtgtgtcccgggcacattctaactcataccttccccgcagtcgtttggcgactacccaaatctgacggaagcatgtttgctcagcacgtaaagaattcgtctctcgaggaccgttgatatgctgatgacataaacactagcaaaccacgagctttggatgaaattactcccgacgccgcgcaatatgccagaaagaaccattcaggcacaatgtaaatgggtacctgtgatatgaaggagctgacctagccttagctttggattgcacgcattcaccgctgccagaattaccacaggacctcctcaccagaggagatctctctagagggctgtttgaacacgcctttctctgcttcggataggtcaacgtcttctcagatgcagttggcaatccttcaaacatttaaggctttctgacggggggccctctgactaggatttgttcagttgtcctcatatggcacatatcaggaagcaaaaggatgcttatcgagtgtgacagaaattgcaatgaatttcggatagagattttcaagcagttgtttcgtagaagcaagtagaacaggcaaatcgtccagctattgcccctttcatcgctcacacaagcaaggatacaagcacacagtgtggcgtaggatgcccagctaggtttctgccattatgctttgtgccctcgtgttacacgcgtagctgtcaaccatcagagagtcactggcatttggtcgagaggacgcgccacgaaacaaggcgcatcagtcaacgtcggtcacttttcgtccatgcgatggctcaagaggtcgctcaccattatgattgtacgagctgaaggtggtgcgagttgtggcacttagacgagtcgagtgctcaagagtccagaagctattgggcgatccctcctgtttcctgagattgaaatggtgtgcattatatatcagttctacgtgctattgcaacttctttttttttcatcacataactggtgcaccacagggaggagtccatagtggaatgtggaacgttaggaaacactgcaaatatacggtcatacggggcctgggcggcgtcagaactctcagtcgcaccgtctgaacatttctcagaatgaattcgggcacatgccttatctccgtatatatggcgcgatagacacgcactacgcatactgaaaaggatggtgtctttggatatcatgtttagctggaacagggcggtactagggaaggcactaagctttgccaagtcgactagctctggcaggtggctgaaagacattacgccaagctggatgggagcagtatttggttcaaggtggcatcgtacggaagccaatacattaacactgaaacggcatttgagttgacaaatgatcaccacaggttcagttatttcttttgtcaagacgccgtcatcacccgagtacagtagtcattccgctagttggcagggccatagagccattgcgacgcgcgtcaacaccaacggtgtgaaaatgccagaaacgtgcatcaagcccttcttttcttgccgaaaagagatgctgctgatattgcatgaacaacacacgctaccttttccgtctgagcatacctaatttacggatacgggctcacgtcgttttaaacactgcttctgggcgagacgcagtgtgttgttcatcataacctgtagcgctcgtggtgacgatgtcagagtcatcatttcaacgatcgcggaaacagcagcgcgggcgcattcttctttagtttgcgtgacatggattcggagcctcgtcgccgacctccgcattcccccaatcccttgcaagacgtatgttgggcggtgcgtttaagaacgactcgggatttccccgagagttccaagccaactgcagctgtctaatgaatgctaccgagatctcttacccgagtttgttttccatgggttcccttcaacagcatctgctgtcgttgcgctccagtcgtagtatatttatgtcagaaaaaactcgcaagaactaaccacgtgttctaaagctttcaggaggcgcca

SEQ ID NO: 3924 - DNA, 1215 bp, Toxoplasma gondii
  source 1..1215: mol_type = genomic DNA
aaccttgtgtctgtggttgtgtcggcaggcaaacgaggtgatggaggtgacaccgcgcagcatacgactggctgtgcggtctgcaatgcggaggtgaaagctacattgcggaggtggaactcggagcagtagaacattggaaatctttgtgttctcttgtcattgtttttccgctccatgtctgcgactattttgaagctacccgggtcactgacgcacactgtctgtgtccacctcagtgataaggtactgtcgtgatagagtgcagttccttgttgaagacggaccacgtgatattttgtggcctttccgtgggcgcttcctgaaatttgcggtgaggaaacaccatcacgatccaaggcctgcgtgtaacagtgagggaccgcaccacggggtaacagcggttgccggtcccaacacaacgtcgtacgcgatacgtcagttgatttgagcatcccttagaagacagttgcacaacccttctgacgcaaagaaaattggacggtaggtttttggttcgacccatcgtatagcttgagagaccgcagcaggaggtagggtcgtacagatatcaagacatggaattgatgatggtcgttgagtgactgtagcaggaatcggtcgttcatctcacaagcccgctgccaaaaacgactaaccttgtacgcattccgcacatcacgataggaagtttgctgctgtgctacttgctgtagtttaagtaggccataaaggaacagcccaccacagaaagcaaacagtatgtcccaccacaagctgattgacgttaggcgacatgctgaattatataagcgtgggaaggaggggtgaacctccacggcagaaaacgaaatcaacacgaaaccgatgccaaccaaaaattctgtcgacctctacgggtaactaactctagctgcgccaacactgtgcatcctgtcccagtcaccgagtgcggctgacaccggatttgtatcggcgtttccccttccagcgaactgagctgtttttatgtcgaaataggataggtgggcatgtgcttgtaagttgccacagtgcatatgagcatgacaaagcgattcattaaggtgtctgtacacactgacggcgcaacaaagaaactttgagttgctgttcgccgacatcttcgggagatttctaggcatcgcggatatgcctctgttcctgtcctgttactctgttttccagttatcaaaa

SEQ ID NO: 3925 - DNA, 3907 bp, Toxoplasma gondii
  source 1..3907: mol_type = genomic DNA
catgcggtcaatgggaggaactggaaagcaaatccaggcgagaaagcagcagagacaggaaggagcaaaagggtggaacctcgtcggcaacgacaagacgaccgagaggtagtccccgaagaacgtgagggagagaaactatcgaccgagcctcgtgaaaaagcagaagaccaagaagagaattcgaggccagaatcgcgtttttttcctctcattttgtgcgactgtcttatggggttttcgtaagaggcgagggaagtccagggggagaggagacaccaagcaggttcagctttgtttttcggagccttgccagtcttagagagactctgccgatggaagtcggcgcgggagcggcgtctgtccacagaggcacagacagaggcgagaggcgaaaggcgttcggaagaaaagggtgcatgcagtgaggaagaatgtgctggcgcatttgctagagcagacatagaagcccatcgtcgcttgtcagcgtcgagaggaaggccgtgcgaaggtaggtagtagggagtttgaaacataaacaaaaggatcaggaaggcgagaacagcgtgatttcgtctccaagttttgcctttctctgcctcacgacgcggcccaccaagccggaggttgttccgcttgtctccgagtggttttgctcctgttactgatcctgaggaattcggtcgacattgccctggagtgacggatacagtgttgcctactaatgacaacttccgtatcgcagctttctcctgtggaagcgttcttcggaagactcgagatggatctttatcgtttcgctctaacagcattccgtcctccatctctccctcgtctaagccttctgtttccatccttctgtagggacggcgactgccgaatcaacgcggacttgacatgcgggtcgaggagtggaaacaagtctcaggcaatgcgcctaggcagaaagacggggtaaagagaaacgaagaaaaacacctagagacgaatgcaggaaataacgagagaagaagggggaaagatcgtcggaaggaacggagacgagacaggaggcgagacgcagcaagagcaggggtcagcgaaacatcgaaatctgcgtggacgtggagggaaccgcgagaaatcgagggaaacgccggaagaaaaaaggccgccagaacatgcgaaagacgagaaaagataattcttggatcacctcgcgtctccacttccgttcctgcatctgttctcacggaaaacgctgctctatcgaccgttacgtcgccctccctttgactcaccaaggcacatttctgtctcctgtgtctcctgaccgttggaacagactaatttacttggaacagaaccaaggataaagccaagtacaggttagggagttttttccttttagctttgcaattttcgacaagcaacaacgggcaaaacggccatgtcttgaaaagttaaggaaagcctcacaggtgcgtattcggaattccggggctgcatgcgcacgcggcaagtctcgtcgtgtgtctcgggaagaaacgaaacaccagtgaaatgtgggaagacaggcagaacaggaggagttttcagcgttagttttcttcttcatttcacctaccattcgcgatagtgctccttaccacgggagtccctactctccataatgcaaggcaacagctcctcccgcacgaaacataccgcttctctatctgtctacttttttgtccatcttcaaagctgcatcatcagaggctttcagctaaatcgcggccttttatttactttcttatttgttaatgcgttttgaaacacgaagcgtccgaatttttccgaacaaagtggcggcccgagtgtttcagcatccaccggatgttatgtaggtcggtagatgaccgtcgcctgcacgattcacatactttatacggaaggtgtagctaggaactacgtgtataaatgaatagaaatatattaaaatgtgcagctgagcacagggcatgtggcaaatagaatgtcgagcgaggtctgcgggtgtgtaccgtcattttatatatcgttgcgcgtatgcggacctggttaagagtatgaactttacaaacattaaataggtatatggacaaagataatttcgtcactcttcaatttccttgatatgcttacagcatacagagattaaggtatgtttgcactactgcaaaagggtataagccgtgctgctgagaaggctgtaggcgttccgtacccacacggcagttttctatgtttcgcccgtttgtttcttgcaatggacgaaaagtagacacacatagagcaacgacagactctctgtcagtctaactttttcatactctcccatcccgctgtcgaagacaaaggagtcatgtttgtttgaaggctggaagactggttagctgcagcgggagctcaagcaattacgaagtatcaagagtggacccagagtcacttggtcgggaaagtaacttacaacggaaaacgaacgcagcgaaattactaagaagcaaatctctttgccgcaatacttcgttcattgtttccatgtacgcgcattcgtttatttatactgtggttccgtcccaccatacttaagagagaactgtctatcggatcatacacaacacacgtgctccttatcgctacgatatcgatcctaagagacttcgtagctgctttcgttgtaatgcagatgcttctcccattgttctttgaattccattttcagtccgctcttgggcagaagttttcgttctatcgccctgaagaatgtgacgaattcgtacgtggacgaagctgcattttttatggattgagccggacattttcttgcctattttatgcccagcccaaatccattccctttggcttcatgcaggcgacatctacaatatttttagagggccttgacaggctgtgttatgctcgagagtgagccctcacagctttttcctacaccggggacacggctcgcaggctgttgcaaaagaatcgtgtgtttccgatacgtccttaattatcctcgctttttgtgaattcattgtgttgctgtgcgaaaggagaaatgctttgtcttcgcctggcacagaaaccgttcccaatccagcgtattatccgtattaccccccgagttagagacgagacctccagaggaaagcgcacacagccatacacgtgtaagccttttccttcggcgttttgcaatggtgtgaaacataattgttttctggttcctgtctcgaagcttctgtctctccagcacacgtcgcgttactggaaaagcgtttgtcagctatgcgcactgcttgtctagctttttgctcggcgccaaggcgactcatccgaactcgctagtttgcagttttctagcttctctgggcaaagaaacgtcaccatttagagacaccttcacagatatcctttcgtagaagagaactactgctggaatgttttcagtgcttcctttcccctgtagcaaagggtggtctcagacaatgcgtcgactcggttcccgcgttggattttagtagagtgaaaagggtgcctgcgtgttttcacaggaagccatgtagattcacgtttcgtattgttcatggactggagccatttttggcattcgcactagtgctggagttttccgttgttaatagtcccttatctttcgcgagtttttccagactcgaatcactggcgaccgtgctggcggttctatcgcgttgagctaattgtaactgtgctctcagacaaccgccgtacgtgctagtttccattcgttttcgcaaacatcactgcattcctttctggcccgcgatcttcgctcttgctgcggaggaacggcttccgttttgatgcgagacacacgtgccggtatctacagctggacttgagatgtagtttttcactttaagaa

SEQ ID NO: 3926 - DNA, 2015 bp, Toxoplasma gondii
  source 1..2015: mol_type = genomic DNA
attctctacttgtgcctcttcttgtacacataggagtctatgaaggactctcagtaaaccggtctgcacgtagaaaaaaagcgagtctctttcctgcgaggcaggtgcgatggatttcaaatcgagagacacctacgatgcttcgccgccatggtgagttggtgtgggtccggaaggactggttagggagaacgaaggaggaacgaagaagggagagagaggaagaatgtgaagagaggagaggacgggaagaggaaaacttatatctccggcttcttcttagtgacagtggaagagaaagcagctcgtgaagacttccgaactggacacgacgaaagaagacggcagagcgtcagtgggcggaggaaacgaagaatttcaacagaaaactcagatgatcgaaatacagcagacaggcaaagacaaggcaagccgcggaagagagaagcggacgaggggagagccgacaaaactcgtaccgttgaagaccgtgtcgaacagagacgacagaggaacaggacgaggaagggagaaacggaggggaggaataacgaagaggtacgagacacttgcttcgacaacagctgccagtgacagcgccacaggcctttcagaagcagaaagtttgcggtaaggaaagcaaacgggagagaacgaggagagaggcaaaagataacagccggatctgtgtttaacggttcactcagacaacccctgtggcacttgagacatcggtagtccagcagatcgaaactgacggagaaacaaagcaggggagaaatcagagaaagcagagaaaagagataggtaaaggaacgggacacaaacggaagcgatgtcctctctgaaccgaaaatcctgcgttccaccagcaccgaggtacagcggcaaaacctggaaaaaccacaattgtgtgggccaggagctttatctcttcgtccaggccagggataatcgaagggaagaagcagaatgtggtacgtgagcttttcccatgtagtttctgtctcccctcgcgatggcgggacggcattctgcgatttgcatttcccagatgtgtgagtgcatgcgctcttctgtgcttgagcggcttgagcggcagcatcgcgaaacgaagcacgagtcgtcgaagcgcactcgctctcccttacttttttcaagcgtgttctatacagagaagtttctcatgctccattttcctcgtacgtcctctggacccagaacgcgcggaagaaatccgcaaccgcagcagaggcgttcgtaatcccttgctgcaacaaacaggccagccatggttctcggagctgctcgattttctttcctctgacgttgcattctctcaagaagagagtcagatgctcgacgcgcggagactgtctagagagagagcgacgctgtgcgtgtgtctctatagaaagtgtggcttaccgcctgcgtctcttcttccgcgtgaagtaggtctatgctttctccgcatctctccccatttaaattttcaggatgcctaaagatttgcacgtgcgtgtgtatgcagaaagttgagacgtgagtgtctcggaatacaatttcggcctgtgggtacgtgatctgcttgctaacaaaggaaacctgccgacgccagccaccctttttctcgagacccggctggaccggacttcatgacaatttccttttttcccccattattcgtcaacgtgaccaatccacgagggagggacgggcctttccatccttctgctttcgtgctggtgcgtgatcgttgataaaggactctctctagcgttccatatttctcatggttctcttttgcttgaggcggaaacgcctgtttcaggacgagacagatctatagaggggatttcttctcctaccgcgcccgtaccatccgctccgcattttctgtcaattcgtgcctggtttacgtctctcttctggcgcccgggtcggaggccttgaaggacttttcttctgggtggtcgagttctttcttcctctgtttcttctctccgcaacca

SEQ ID NO: 3927 - DNA, 2376 bp, Toxoplasma gondii
  source 1..2376: mol_type = genomic DNA
aggtatctgcaaggatgacactttcgacgactttgcggacacctagagcgacttcatgttcctctgcagctcctccactccgcgtcacatctgcccgccagtcgccgctgaagggggcgatgcctacgcgacagagcagggacgcgcgctccgctgcgcctccagagcctgctgccccgccctggccgagtacgctgtccgcacctgaagcgtcgaagccctcctcgaggacgccacgctcgctccacccgccaccagaggccgacaccagagctcgacttgcgttgcctgcacccgcgggaagcggcctggggccaaagacaaacgcagccactttcgtgctgccgaaggagaccaagctacggccgtccgcatgcgtgccgacgccaccagaggcaaaaggagcaaggttgttctcttcgctctccactgaagagtcagcttttcgcgggtcggaggcggaagcagggcgagcagacggcgaaggaagcagggagggaacgcaagtcgagaaacgcagttccctcagctcgtggggccggcgtccatctgcgcggagaaactccagggagggaaagagcgtggacagggggtccgaaggcagctgttggctggccatggtgtgagatgttaagacgacgaagaaacgcggggacacagacacagacaaacgcgctcagccgcaggcgtacccggctgtcggaatggacgtaaaggtctagtccatcgcgtgagtcagttcaaagggacaggtcgcgcgggaagaaacaagaactcccagattaacagaccgtcgtcatttcatcagactacttgtgaacgggattcacaccaaagcgacctaccctcttcacattctcaattcactaggcatatcctgagctccaacgacaacgaagtggaaggcggaaacatgggaagagaagcaggcaaagcgtaggaagaattgaagaaatcaggcattcgcccttttcgcagttgaagaccattaacaactcggtaacgcaattgctgcagcgagttgtcagccatgctcagaaaaaacgcggcacgaatgtgaagagactggaaaggagtgacaagcagcagagaggctacttttagaccggagcaaggcaacacatacgcaaggttgaccttgatgcaagagaacggcgtgagacaacgaatacgagggctggcggaaacgacagtgtcaggcagctgcgagggacttggacctacaggagactgttgaagacggatatcccagacacatcagaccaagggaaagctgaactaagacgagatttgttgcgcgtgcattctgattctcctctggaaggataacgacatattttcattgcaagagaataacaaaagatgccgttgagtcgtccggtgccaccaaatgcgcacagggtcgtgcgggttccaccgacaaatcacagcctgcgtctcagttgagtcagccagtttaggaaagtcaacagcgggcaccgtattcggtccgtaatacaacttcgacaaaaaatgaagaatccctactcccaccccggtaggtatcgatgcatgcgcgcctccgcggagcctgtcgatgcatgcctaccagccctgcaccttttctacgatcggaaaatccggtgtcctaccagcatgcagacgagaggagctgggcagctgggatgcagcggtgacagagagaaacaaacaaattcaaggatgcccgactgagtttttgtcactttatcaggctcttcacttcctcccttgcgttttaacgccggtggcgggtgtatgtacacttcgcttatgcgcggagtcgcccagtttgtctgccagtgtctggagcgggttgcatgttgtcttcacttgttttctttgcttctggactgcatttaccgtggaaacaggtcttttcagcgttaaagaaggagaatctctcgtttatcccgttttcccctgttcaccttcgaatcaacgctcttccaatgttccgcccgagccttcttttccggcaggtggcacactgtccaagcaacggagatctactcttgtagacggtctgctgttttccccgttttcgcgcccgtgattcgctttgttcatccgcagttcgctttctctcacttcttcgtttttaggccactgggctgcgtttttttccgtagccgccgctgcgatccgccgcccactcagcggcggcaagtcggcggcgtccgggagcaaaaacgcgaacatacggtgttaaatctctccatcgccgttgaagagtcgatattccttccctctctgcctcgagatgctactagaccggagcgctcgggtcccgtccccgttctgccgaatctgtgcccgcctcactcctgcccctgttgcactcccttgcggcaatta

SEQ ID NO: 3928 - DNA, 3025 bp, Toxoplasma gondii
  source 1..3025: mol_type = genomic DNA
ctgtgcatacacgcgctcatttgcttgcatcacagacgtcgtgtctctccgtcgagacagttgatgatcacgcccttcacggctgcctctctgtcggcagcagacaggccggtctccccggaggggcgcgaacacacgagcaagccaggagaaaattggaagcaaacacggaaggcgacgcaaggggcggaagcgcaaccgagacagctgatcaaaggggagaaaccgaggctgcacaccaagaagcggagaggagacgcggccaggcgtgtgaaacagagaacccagacgagaaggaagtctgaacgaaactgcggactgacctgccagatcgagagggtaaatgggagcaacagctctccgccctccactgtgaggcatctcccccgcatcgtcgagcgcatggtggacccccattatccttcgccgtcaaaaaacgctccaaggtatttctctgcggcgtccgcgaacttagccacgtagcgccggactcaacagcacccgctgccccacgcaagagagacacgacgatgcagacaggaagacaagaagagggtagaggagaattcgagagacaagacgggcagaaggttcagccagaggaagatccggtgcagaaggacagcacgggagcggacagcaggcggagaagtcgcgcgggcgtggagaccggaggtcgcacaggcgccgccgatatgggggaaagcagttggggcgtggttcgccgaatgagaggcggaaagaggaactgtaaacgacactcgaagtggggaacgacgaaggtttcagggccgaagcgctgcagagaagaaatgcgaagcgagaaccggcgcgggggagggccagcaaatcacggcttgctcaaagacggagacacagacgcaaccatcgacgagtgtggggggtgccgtgaagcagaaacaaaaaaggagaaaaaggtgggagttttctctgacagatcaacggacaaaccgattagcgctgagcgacggtttccccaaaggtcttcgccgcagaccgcatgactctgtgctgcgggctcgtcgatgcgcgcaaaacgcatgcacggggaggggtacttccgagggacaaccgacgggacctgcggacgtctttgatttgaaacagctctggagacgaaaacaggaaaaaagcagaaaaattcatttcacacggcagatgtcgcgtgcgtggaggctcagtcacacaggggcggcgagactctcgccgcgaagcgagacagcgattcgcgaaacgggcagacacaccgcagcgcgaaacgcggcaagcgcgagaggggggtctctgggaggaacggcgggccaccaatttaaggacctcaattctcaggaaaaacgggagattcactccaaatagagtaaggagcgcctactacctgcgttaaaagcgaatagcgaacaactaaaaacaaggacgtgctggaaccgctccggcctcccgtagacaatcgaggtgtatagacacccgagcaagagagggcagactctcgtctcccaccccccggaaagcgaagcgcttcgcgccggagccttttcgaaaagcgtcaaatgtggcgatagcgttctttcatttggaaataaattgtgtttcgacgccacacccacacctgcgagtttgacggtcgtgtaaagagacaccgcaacgaggcagatacagctctcaggcttgccagctggccatccagccggctagagaggcgggtcaccagtttcccagagaaattatcaccacctcctcacgaggtgacgatagcgtgcatactcagcaaaagtttcctgcagatcttctaccttccacaagatcggtttccctcgctatttcctcagcaggagagacatccgacgagggagaaacgccacgcttgacgcgtcgtatgtgccgcggttgggcgcacagtgtgcagctcggaatcgggggattttttacaacagtgccggagagcccagctttccacagtctgtccgaaagcacatttttggaccctcgcggaggtgacgaagtctttgtgcgaagcgcgcctcgagtcgccgcctaccgcgctcgggcgtgtgaggaagccgacacccctcaacggcagtccgcccgggcgggaagggagagacggcggtttccggatctaagccgagtcttcttttctccacgctgttctcacggcagctgggcaactgcatttttagcgcaagcgactatcttttgaacgagcggattcgacagagtttatcgcgacagagcaggccggaattctacgcaaaaagagttttctcgacgagttctcgatttttctcgagttttcgcgtccacgcatgagtgtccacggcaaaaagaacagctccgccgcgcgggcagacagaccctgtttcttttccagttcgccaacaagaggcgctttcggggcctgtcgcgttgatcgcgatttctcggctccttgacgaatttcaccgggttttctcgtccgtcttcgcctgtgcttcgctggacgtccaacgctttcccgaacagcgaactgcctggcgaaccgccactgcctcctcaggacgacgcggcgaaactggggtttctgcgaattcggggatttcctccctcccgtcgcatccggtgccggtcaagtcacgtatcgagcttttgcagacaggagcttcagctgcatgcagcccttttgcgccttctgttgcttagcagaacgtgttgaattctcgaatgtcgaaggcctctgtcgcatcatcgcgaccttctgtcccccagttttcccgcgtgaccgcgtctctctcggtttctgccgccccgcctgaccttttccttcacgccttccagcgtcagtcaacgccggtctcgccattgttttccttctccccttctcctttccccctgtagccgaaagtcatctctgtgctctccccagccttctctccacccttcccctcccccgccttcgccctgtggtgtacgttccctcgagcgagcttccgcgctttgccgctcctgtcgtcgttctctttcgccgcaa

SEQ ID NO: 3929 - DNA, 2097 bp, Toxoplasma gondii
  source 1..2097: mol_type = genomic DNA
tctgcatgcagccgtcttgcacagattgaaaattttgattgagcgggttctttttgtgtgagggacgagggaacttgttttaatgaaggaaacaagcgaatcaggggaaacggcgggtgagtgcggacacctggcacccagtctatgtggcagcgatgagagtgacaggcttcctagcactgaaggaaacacctttgcgaacagttcgttgtacagaaagaacggaacttttcggtttacaggggcccccagtattatgtaaaattttgcgtttccagtccgtgtgaggtcgcggacacgctcatgcattaccttcgggactcgtcgcgaaaccacattcgtggactgtggggttccgttactgaacatcagaacaaagcgctgaatcgttagttgttccgtgccagcatatgggccgagaagtagctgtaagagcagcaacttctgactgtacagagtctcagctgatggcaaaactgaatctggcctgtaccgcagcataaccagcgcgtgactggtgcactagatgtccacaaattattttcgacagtatatatatatatatatatatacgtataaggagtggtgaagggcagaactacaaaaagaaatcccggtcaaagtgtaagaggaaaaagccggtgacacaacgggtagagtgggtaccagcagtgcagagagtctattgccagtgtaggcgtgtttcaataaaaaagacggctatttcgtgacagaaataatgtcataaatgtcggggtcggtgggccaggatggagacaacacgtgtggtgcttcaaacccatacgccataaccgagagtcaggaggcccttttccccaaataagaataaagcaggcgaaggtctaactagtggaaggggaagagtgtaactaataactgcccctggcatcgaaacaaatttgttctcaggggagccgagacaagaagtacttttgctgttgacctttctgacttctttcggcatctggaatgctctctttagctcaaaggccggaatcattgacgacggtacgattgaagaacgcgaattcgctaacacgtgaaccaactcaagcgggctggtacttgtctctgtcgaggaagtagtgtcacattactccattggtggcatccttgtcgtggtttaagacgcatccaatttcttcgtagaagataaatctggtatgccccagtttggaggctatttgaataagcccaaatggtgtcttccggaagggcaaaatcgtgcacaccatgttcccagcgccgccgcgccctccctcgtccgaacagtgtagacactgaattaatttcggttagcaaaaatgtttgctttccacgtgtccaataagtctgcgttcacgacactgacaagccaccttctggtacgaagtgattcgcctagtttcgggtacgctaacctggaacgggtgggtcactcggacaggacgaggcgtgagtatcgtgcatgcgacgagagccaaaacgttggcatgcaatgcagttagctgactgcctcgcgcttcgtgctgcactctttcgtcgacaaaacctctacaaaatctgtaaaataaaagaatgttcgccattgttcccgaatccgttatttgattccaatcgtgagtacgatgagggtgcactgtgagtacctccgtcgacggaaatcgcatgataccttaaccgagttacttcaagagtgaaacgagacaagtctccaccatcgtgagaaaacttgccttatcgggtgacaggaaatcagctgacgcgacctgtatgaatgcaaattcgtgctgtcccttcttcacaagctaaatttgagccggaggagaaatccttgttcgttgcgacgacaccacaaggagtcagggtgcctcctctctgatatccagcctttttttgatgacaactggtcagcggtccacaccaggatcgccactggaggagaagcgtagggttcctaacgttttcgatggtgccttttcgagtctaatgcgtcctttctgtcgtccagttggagcattgtcttggcccattccggccgttgttgcccgttgctcgctgaatagtggtcaaagcagtttttgccttcaaaaaaga

SEQ ID NO: 3930 - DNA, 964 bp, Toxoplasma gondii
  source 1..964: mol_type = genomic DNA
ttcctctggcccacctggtaggtatgttggataccaatgagagtggaaagctgttcgtctgagagctttccgtctgcttgcttgctgaggtcatctttgaatttgtctgcctcggttttcagcagattttctcggttgaaatgcgcattcagcgtcgcgcggaagctcttttcttctccctcaaacgtcctctcctccaccgggtcgttaatgtctgcggggacgaagacgaaggtgaacttcttgtggacgacgtcgtcgagcgacatggtgaagaagtcgccaggaagcagagcgaaggagagaagaaagagagacggcaaccacccgagacagcgccgcggaagcgaagtcagacaaggagaaaccggccacagagcgcagagagaagtccttcgaagaaagtcgagacagacagagagcgaaatgcagacatatgcggaagaacgaaggtccaggaaggagacacacaagagcagacggtgagtgtgagacgaggagaaaaaagttctcgcgatctctcataaaagaccaactgctgcacaggcagacagatctgttgttctctgcatgcatgcactcaaagttgaaaaaaaacaggatgtggatacacgcgactccgagctgaagagtttctgggcatggagtttgtcgagaggcgagagacgcacaaaatcgagaaagaaacaggcgcttccgcgcctccgaagaagggaggagcctcggcagcgagatcgacggagaccgagagactccagaaagagcttcgccggctgtcctctgtgaggcgcgaagaggaaatcgaggtcgagaggaagagagaagaaaaacgaagacactggatgcaaacgaagaaaatgaacgccgcgtttcctcgaaagaaacatccccgcgcgttgccctttgcgtcttcaggagacggaaaattcgcgggaacatgactaaagacttttttttctacaca

SEQ ID NO: 3931 - DNA, 2551 bp, Toxoplasma gondii
  source 1..2551: mol_type = genomic DNA
cgcgcaggtgctccggagacaactgcttcacaagcaggttctcttcgaactgtctcacgacttcgcgcgagtctccccgagcgttcagcgcttggaagtagcgcatccaacatgcaggatccgagggatgccgcagcgcctgctcctgcaaatgcttcagagtcgaagcggtcgcggacgaggcaggcgagacagacgcagagggggagaagaaggaggcggcgaagcgcggcggagggagagtcgcgaacggacgccgaaggagtgcagcgggcgtctgaggaggacgggagaaggagagagacgaaacgaaaaaggaggagcgaggaggacgtttcagagtcgtgaaaggagacgaagagcagcgcgattgaagaagagagccggatccagaagaagtcgagggggagcagacagaagcaggagagagagagcagacagaagcaggagagagagagcagacagaagcaggagagagagagcagacagaagcaggagagagagaagaaaaggagcgagaagagaaagagaggcggcgatgcaggtggcgcgcggatgcgcacgaggacgcaagtgaaagagagctcgagagaaaagttggcaaccttctgtccccgatttggatccttctcacagccacagtcgacaatgtcccctgcaacgccgcagcctgcgcgggagtcccgcgcggcccgaggggcgcctgagccagcagagaccgcatgctcttgaaaaaaagaaaaaacagacagcttgaaaacgcggagcgaaccgacgagagtcggagacccaacgttctctctctgtcttgcagcaaaaatgggaggaaaaagcaggggagaaagccttccccagatccagaagtccacctctccgtagatagcgaggcgtgacgtcgcaagccgcagaagagatcacagcacgttcagaaacagagggctctctctacatttgtcggctttcgaagacgaagaagaggaggaaattcagacgttcttcctttctgcaggaggcggagtctggaaagtcgagtggagacgcgagagacgagacgccatgaagacactgcttcgtcgcaatctccttcgtctccgtcttcttccacgcgacgcgacgcgtaaaacgagggagagactgtctgtgaattccgagaaagaaaggggtaaacatgcgcgagaaccccagagatacgcgaaaggaggaaagggggaggagacgctgcagagaggcgcggcgtctcgaaacgcattccccaaagcagggcagaaggtacacaggcggcacgatgcaccgggcgaagaggagaagaagaaacaaagaaatgcaggggagagaactgggggcttcggagttacttttctcttttcaaaggaaacaaagagacaccggagaaacgcggcgtttccggcgtaaggaggggcaggagaacattgggagtatttgcgagaacaaacgccagcgaaggagaagaaacgttggtgttgacgccggttgtcgcgtggaaagacaagacgagaaaaaaaaacggaattttctggaaaggaaaacgcaaatgctccgggtgaaaagcgtaccgcgaatgctgcagagacaccgcggcgcggcagatgcggcgcggcagttgtgcagattccttgcgaatggaccagttttctcggcatgaaagaagcgaagacaatcataaaagagaccagaaggaaagactgtcgcgagtttctcgcgagaacgagagcggtgttgtgtccagaaaaaaaaaacttctcgacctggaaactccgctactgccgcgcacgagaaagccgcctctcccgcgactgctgcgaacctgcgcgggggttggaggcgcttttcggtgagaagaagagccgcagaaggctctctaaaaagaggatattgcgttctcgagaaaaaagggggactctgcttctgatgggtacgaaagaatctttaaaaacgcccagaatcgacgcacaaacgaggtccctgcacctggaacgcgcgaggcctcgcgactttgcccccctgtctggcgcagccgcttttcgctgaaacggcagcggctgagaaaagcagatttctacagatgttccctcccagtctcgtcgagagaaggcagcagggagagggaacggacgcaacagaaagcacgcaagggcagcagagaggggagagaaaaccggaagaaagcgaggaaaaagaagagaagaccgagagaagaacgagcgaagaaagagcgaagaacgagagaagaaagagcgaagaaagagcgtgtgcagagacgcggagacagtcgatccgcagacatgcgaaactttgcatgcagcgcgagaacgaaacttggccagaaaacagaaaatgccgcgtttcccgatgcttctcgtctctcgatactctccgcaaatctcgcttttcaagaaactcgtgcgtcttctgccggctttcactattcagaggacgcgacttgcaacaagacgagagagaacatgagagggagaagccgacagaggttacgttcatggagtccagagggagcaggaaagcgcggagtcga

SEQ ID NO: 3932 - DNA, 4895 bp, Toxoplasma gondii
  source 1..4895: mol_type = genomic DNA
gcaagtggtgagagagggaatcagatgcgagtaagcagctctttccaggagagaagcgaaaagtcggaaagcagagtcaaccatgtaccgattctctgtgaagcgagggaaacggtgtttaccacgctcaccgctgtcggggtgcagctgcttggcaagctcagcgaatttcttcttgatttctgcatctgtgcaagtcgggtggagacccagcactttgtagcagtctacgaatcgacgtgcgagcccatgccccgccatttgcctcttaggacacacagcgaggtaagcaaacgcagagaaagaacgacgaccgatccgcgagacagagctgagtcactcgaggcaaataaacagcggcaccacagtaccagagacactgaatatgacttcggcttgagcgagagtctacccaagacataagacagtagagagagacgaaaaacacaaagagaaggcgctagagaacaaaaggaagtgcgtgactatggggagagaaagccggtgggacgaagaaaggcagagaggacgagggcagaagagtttgcacggagaaagaggcggaagacaacgggacattggcagactactctcaaaatctttgtcacacttttttccgaccacctaggtcaacagcggaaaagcgacggggaaaaaaatggaggcgattcaggggcaacagtgaccaaaacggaaagacagcagaagtccgagagccactctgttgcgctggcttcgctcgtctctcttgtcctctttccttcgatccagaaagaatggcgacaaacagcgtggacgaatccataggagtcgagaaaggaagttagaggaggggtttcgtcgttgtttttgacgaagagccttcgacaaagtgttgcgtgtcgaagaggaagaagcaaagaagagaaaggagactgctgcagaaacgactgcggcgagaacagggtctttgacagaaaagaggcccaacgtgatgcagaagacggggtacggaacactcgaagcaagtcagacgagaagttgaaaagcgacgacgcgggaaaaggagacggcggtttcccgcaaaagagcctcctctgtgttacacatcctttcatgaagagatccaggtcacggccagcaggtggttgactgcagttgccagtttcgcctctgttgtccggtacagcgagaaaaacaaacacgtttctggagcattgcttcgggtgtatgtacacctgccacagctgactcgcggaagttgttcccgaacaaccggctcgtgttggctacgcggatcctgtttcagggatgcacgcagtagatggtctttgcttttgctagcactcaagattcaaaggttctgatggtgaacgcgagtgaaggcagtgaactgtatgccagctgcatgccatgggaaaccatttcacgacgtagcgtcgtgcgggtaaaagagctaccgtgcttccagtcttcggtgtcgcttggaggggcttctctggagagtggcatcagaaataaaaccgaacaaacaaaacgacgaggatgtcggaaacgaagacagagatcctggcagctctcgccgcatctagagagcatcgggacgatgcatctgccacgaacaacgcaactatggaaaccgacagcgaaacgccaccataggagggaccgaaatacgccagaaacctgggttacaccgtgaaaaatgacgcagagtcggttcgtccacgtgaaaattggaacggggaaagtatggtagctaggaaactgtccgtgcgactctgcattgcgttcgagagaggccaacacaacgaaggaaaaacaggaatcggtgttcggacacggcggaacgagtcaacaacagatgcgcaacaaaacttcagtgggaaaacgtggccttatcgtcgcaaacatttaattattctccttcctcctcaatatcacgcttgcgccacctttgtctttgctgttgcactgcgtgtcaactggacgagtgctgaaccgtcggtgtctcgtcgcccgacttcagctaaatccttgtttacggtcacttttacaagttcctaccactgtggcactcacactggtgatgtttctgtcttttcaaaagtgaatgccatttatgccaatatttttgacacacgctgcttgggggcccgacactcggtgcaacagtcttctggtcgagtaagtcttatcctgggtcgacgcttcatccccttccagtttgagatctctgttactgtatgtagtacgttaacgctgagaatattggatttacagaaagcacatgcttccgagtcttctacgttaatgaatgttgttctgttgctcaagtccgcttcgtgaagactgatgtttcttgacatgtcggtgacataatcagtagcactcatccatttacacactttcagggaaacagagaccaactcggcagtgtccaggacagagccgttgttttactggctgtcgggaagacacggtggcgaatcgagcaagtgtcagttgattgaggcaacaactacaaaaagcacggacgagtgtggggaggaaccctcgaacgggtcgcgagttccacttgttcagtgaactcgctttccagaaactgggtgcctttgtcggattcatcgacaacgtagaaaaacgggttgatgtgtcactgggggtgaaggcgaacacacgccattgtcccagagctatagcggacgatacgagacgatgagcatggcgaacagccgaggcaatgcgcagtgaggatgtgatccccaattttagaaacatctgaagagatgttcttaaaaaacgctgaatcttcagggaattttcgagtcgactgaggtagatgggacgagatgtcttcgatgtcgactgagatggcggcaaaaagttcccattcttgcggttccgaacaagaaagccagttccagttctagcaaccttaggccacgttatccgagttgcttccgcctttctaaaggaacttgtccgtgtcagcgacgagtctagaaagactcccagtgcaacgaaaaagggttttcgatgaaggtgctgtacacggtcacgcaagcattcacgctcagagatcgaccgtcgcacgtcttccgtgaaagcgataaaaaaactgcaagagaaaaagcaatgaggagaggcgataccgctgcggagaacaacgcgaaccgaatgcgcatcttctctgtttgccacgtttacccttgatgaagaacgtccgtggttttcgagatcctcttggcgtttctgacacttattttagcccacagaaagctcagacaaacgagttcgctgcgtgaagtggtccggcgacgcacgcccttgtccagaattcgggtggcacttggaaatttcagcgcattctgctttacagaaaagtgccttctgtggccctctcgccaagcgcaattagcatatcaaactccgtgagttcgaaatgtgagtggttgttctgtccgtttcccaagtgccaatttccaatggagacagacacacttcaacatctgtacccacttttgacccagcctaagtgaaaggcagaagcatccgaatgagaaggcaagctaccaaagtttatggccaacggattgcggaacaaaagcaacaaaaccaccttcggagcagctcgctatttagtgtgagtgcgtcatttcagtccctgagttctgttcaactcctctacgtgtgcgcttctgccacagatgtgtgaagcgtgcactctgcttgcatcgtggacacagaaaacagcggtcggaatttttcccgagcaactgatgtacacgatccctaaactgtgttgttcgtctggcgtccgtgaaacagttccgttcattctttcgacacacctacggctgtctcaggagagaaactagaattcaacgttttgccaagacaggtcccagattaccttgactctccttgttgtacgaatgcatggcgttcagttgaatctgcttttagagcacatccacaaacaccaattatatgtccgaaaaagactcagaattttccagagtgaccgtgacaccatgctaacaccacaaaacccggggccggcaacccacgaccaccggtaggatactgaaatccatcacttttagccgtcttacgcattccagtggagtggtggtatacagaaaccatatataccttagtattagtcggttctccaacgagggaaaccgtcgtggaaagaaccctcaacagtgcgggtaaaagatgaggcgctgtttccagcttcgggacgaaaggactctgctcacatcgtccctcaggctgtgttgactgtcggctttatgctggaactgcatgttgccaggttgaggccgtcggggaggctgaacgtggaaaagtctaccttttgttgtggagtctggctctacatgcacatgcattcgataaaacggggagatgaactagttaagtagggcagcggaaagaggcagaaaacgcgaacttatgtgaataggctgcatgagacttccagtgtgtgttacgcctgaagccaagcgtgcgaaaaagggagttgcagagttttccacggaagagtgtactgagagtccttccttagaccacaacagtgtcttttatcttcatatgattgcaacgaagagccatcacaatttggagtcggcccagacagaatctcaacactagttcgagtcaccggagttagagaaacccggttgaaaaccgtgggactttagcttcatggacttccaaacagatatgtgtgtgtgtgtgcctccttgagtcagcgcgggaagtcccagtcctcgacgctggcggagaaaacatgaccgcggtagatagcgtgcagacgcgccaaagtggttcctttcccagttgctttctcttgttagcaaaacgactcgaatgccatcggcaaaaccccggaacggtataaa

SEQ ID NO: 3933 - DNA, 2110 bp, Toxoplasma gondii
  source 1..2110: mol_type = genomic DNA
ttttcgacattgaatccaccgtcaatccatttgcacaggcttggcaaggactcgaggccgaaccaggcagcagctgaatctagactcgccgttcccttgtttgaaaggggcttcgttgacaaggctcggtcttggagttttttctttagttcaattgaatcctattcatatcgttgattgcgatgtttagaacaatgttgcaaaacaaatatttataaggatgttataattcataaacaagatcccattttttccgtctccttcgcagttgtctctaaatttgcgtagttccatacgaatactgaagtcgttgttccgagggaacaaacgaggatctcgattcgcgcaagattcactcgagtctattccaagctcttcagtcgaaaggctctgccaaaatgcaagcagcaggtgtgtagaaacggtttgtgtttcccggtctggtgacgtctacctctgcaatattattagcggtatccactgtctatgtgcaccagactggcgcctcgtttccattcaaagaaccatctacagttccacggatagcgcaggcacaccagccttacacacaccattcgtcgcgcctttgttgaggtctggaaactcgttgtcacattgagttttccttctgtgtcctccatctgagaaccgtggcctagggtcgcgagccttcttcaagccgttacgtcgtctagggaagtcgtcttcttccacgaagaagagagagcagagaggcggcgaaggcagacgacgtagaccagaagatttccacgcgaacaaaattaacgtcgtcttcctcgtttgagacgacaaggatttttcgcgccgtcggtactacagaaagcaaagaagccgcgtgaggcgaatttctcgctgttcctggggaggaagctctgcacttttcgcatctctttgcccagatgtctctgcaagttgcctgatcagccttctttgtctcgtttccattcctcgtcaatggtactagcagtatctcgtgttgatgcacaacacacaccacgaatatttttccgtgaaaaaagaacactctctcgatcagacagaagaattcctttaattcccttcaatctcattcacttattaaatctccaaaatatgacagatacgaatatgcacatataaatcatatatatatatatatgcgtatatatgtatatatatgtatatatatgtaggttacagatgtgtatgtttctgtgtagtatctctctgagtattttggcgtcgtcctctctgggtgatacccggaaggctggccgtacctccagagataaatacaggaatggttcttcgctttgccgcttctaaaccacggacgaatctacggagaggcgaaaattcattttgaaccggttctttcctttttttcatctcgccggctcggctctcgcctgtgtgggatctctgtctgagcgtgtttgcgtgccactctggtctgcccctctctggggacttgctcccggaacgtctgcatgcgctgttttacttgccggcgtcgtttcggtcggttttcgcgttcttctctgtcgccttcttttggcagtctccggaacgggcgaagcgcgaggaaaacctttcttttgcttcttcatcatttgtgtggagtctgcaccccggctgcggagtgcctgcctttcttacggtgtgtgtctcgacttttcgacaggtgcgtggtgggggaagcctcccgaaagctcttcgttttctccggtcgctctctgtgtcttgtttttctactttatttcctctctttcgcctcatccccgcgcctcttgtctctggtcgtcgaactcgtgagcaaatctgtcttccccacacaggcctccgtggcgcagcatttcccgtccccgaaattcgtttcctccgtcccgttagttctccctcttttgatttgtttttctcgttttcctgcctctctcattccattcgttttctctacccccgcgctccaaacccagacgccgctcttcgctcgctcttctccgcctcatctgcgccttctctcgccggctccgtccctggcgctcgcctgctcgtcgcttttccccgcgtctctccttagtttactccgtttttttcaatcataagaaaa

SEQ ID NO: 3934 - DNA, 3821 bp, Toxoplasma gondii
  source 1..3821: mol_type = genomic DNA
caacgcgtcatgccatatgcttacgacagacccaaaaatgggaatttgagaggtcagatggacagagtcttcgaaatggttgccgcacgtgcaaccgcataacccaacgcaaaaagtctgctggtctcagaatagagcgacactgtggaaagtgaagcagggaggaaattttttgtcggagtgttttccaggcttcattcatagtatggaggaaacgagggaggcagatctacagtcagatgtaaagtgtcgcttctcttcgtgactgctcctctcagacaaatgtttgcatgcgcgaaatgtggaactcgatttcactgctctcatccgtagaagttgctagaaaaccgaaaaaggcacaagaatgtcgacattcgtggcaatctccactccccaccattatcggctaaggactcatctgttcaacgtaacctagcggtagcattgagcatgtctcatgattggagattcatataaggtggagaggtcggcattgctcgtgtacgattttttcgttagcgtgtcgcaagcgggagcacttcgtttccacttgacgaacacgtgcagcatgacgcgagagttactcacgtgctgctccgactacccacgcagattaggatggtagcgaccagcaaaagagacacaaaatgtgtacggtgtcgaaaggtaacgtagagccatttttcctgtgtacgtgtctctggatttgttcgtatagaggggacaggagtaaggaatgtttaacctcagcgtgctttaaaatagagaaaacaactaagtgagagggctactgttttccttgttcgccgacgggagtaagtcagacggcagtgtatatgcatggatccagcaggaagtctgatagaacgtttcgttccgcaaacccgaattcgggtggtgcgcgctggttcaaaggtgtagtacaaccagatacagcaggttcaacgaaattgtgcgggtgcgtgtaagtttcaaaatatttaaaccgctgaagggttgtgtgtatcagatgcactttacgagggaacgcagtttgctggggctgctcgtggcaatcaccgtgtttacatctaagtgggcctgtgactttgcgagaatggaagccaatcggtgttcttttttctccagtttcgctcctgccacgttttgtacacattttcgtggagggaatcgagggttctccgaaacaggctagtgcgtggtttgctacctgcgaggctgtggaaccgttatattcaaatcgcaagacttacatgtatggtagagttgagtaaacaagaaaattaaagtttggtgctctgctgtttggggggtcacgtgtactccgttcttttttggacaggtcgtgcactgagcatcggactcctttatcagaatagaaatgggcatgggcttctctgtcaccgccatgttttcttgtgtggtccgcctgcagagtagctcccttgatctcttccgtcgctgggtacttcggtatgccgggcagtcaccttgaaaaaagagttaactcgtaggcgcttcgacggacgtgaaaaatgtgatctgtaaagtctggcagttcctggtgtggcagtttttcgactccaaccaggcacaagaactggcatgccatggatgcatagtttgcatgagcaaacgaaaagaacggccgcttgacaaggattcgcatcctttcgagatcagtaggagtatccgctccctgtctatatgaatgtatgtataagcacgttgcataataaataagcaggctcatgtgaaacggaatgtagggggatagctggtggcgtagacactgtgatgttaaggcccgttgacacttgcctcaattggtcctgtcgtgaagttgttatctctagagatacacatgcaacgacaactgatgtttctctccgatgacttttaaagtcgcctataaaaggctacttccgtgtttagctctagaaagatggggcttctaaccgacgagcacattgtgggagttcccggtccaagactatccagtgagcctgaacgaggaacgcgagcgcgatcgaattctgaccctgggactgctgtcagacatcagtacagagatacgtgctcacggacaaggaacgagcagtcgttcgcggaaaatttctttttcgaaaatgaccaccgacaaccgagttctagtgattccaattcgctccttcgccggtgtacggagccgcttcggatgcagagcaagcaacttcaacaactcagtatgaatactttcccttgggtggcaaaacgttcacaccacaactcgttaccccacaagctaccctccggacgcttttcggagtgtccagaaacatcagtcaacaggatcaaacagaagctgccgctgtctgccgtttcgcgtgctcccggcagtgtaccgtggaatgccagcgtcctgatagaaccttgggagcgtaagcgaagagaaagggcttacgaggttccggaagcgcctcccttgtgtaaacggcagtatctgccggcctcgtacgcaagtccacgagtacgcgaaaccacctaggaaaagtcctgcttcaggagttgtactgtgcgcccgtgaccccagcgcgtagatatccactacactattcaaacctaagtatcgattatgactcagaggaccgttccgtcacactcgcgcagccacgaatacttctgtggcgttcccagccgcgtgtttccagcgtgctcagtatgtctgtcttcttctcaacactaaccggacgcctatccacaacattgcttcccctcccgttgaagaactatagaaaactcatcacagcatgtgcatcgatcatagtggtgcaacagaagcctgaagcctttctacaagcccgatcagtgctgatatcgtgcagctttccccgcggcaaaggcggccatgggcgaagcacacgttctggaaaggcaaacgaagcacatgaaaaacaaacagtcctgtgtgcccatggatatgaggatacgtaatatctgtgttggtgtgtctggttgtactgagcacatttttccggtttcatagagaaaatacctgtgtgtaacgcgtgggcttcgagtgtcctgcgttctgtcggttgctcttgtgcgaaggcgcggacagctgcactggatgcagagcttcaggaggaaaggcgaaggtttgcaccggagagacaggctctgtttgagtgcgtaagaaagcaattacccggagccagcaaggagcgctgctgggcagaagtgaggagaatttttgataacgccatgaactacgaaaaacgacgtcctctcgaccctaattacgccgtctttgctaagtgagtccttcttctcacagaactaccaacattctgtattaggaatgtctaccgacagcccgtatctagagcgaaggtaatcggtggtgaatcaaatatcaatgtaattagacagctctgattgcttctaccagcctttgtttctgtgttgccttgccgcaccctgacaacgcgaaagtccccccaacgttggcacacagctgccggattacgcaatgttcgccgcgcccaattcatatcgaaaacacagaattgtttctcatgctggtttcccttcttctgattgtttcttgcatttcgcatgtgcgtaggccgaacttgtcccttacggacagaggaaggaagtacaaagtgtactttcataccgggaaatttgatgtttgtgcgattgatggccgggaggcatggtcgtgctgcctgaacccaagtcgaagctccagaggttgccaagaaaaaactgtcaacccagatgcatggcacttattgagtcccttttgacgccgtcatttgtcgctctgctta

SEQ ID NO: 3935 - DNA, 3971 bp, Toxoplasma gondii
  source 1..3971: mol_type = genomic DNA
tattagttgagaatatcggaagatcttataaggcctatccacaaccaacagagaagtgacggtactcgtacgtggtggagtcgagggcgatgggttggagttgggatccacggggttggtagatttcgtccgccgaggaattttcaccgacgcagctgaagagatgcacgaatgggagaaaatgtgatctcgggcatctcgatgtggtgagagacaccaaccactgtgcgtcgacgaagactttccggagtctggcttgggcaacagatatccagtgtcacccgcgcgtggcggatgatccttggcgttcgcattaggctccgcgactggcgatgtcgatggcgtcgcattctctacgctttggtgggagtgaagatgcagaagcgaaaaaaacgacatattttcgaagtgtgcgatgacattgaaaatacgagaaaatacagtcctcccaaaccttgaggagtcacgcatgcgacaatcgcatcccacacttgcacggcattttatacgtgcgaaaccaaggggaaatctgtggatcgtagtacccacaagggcaactgccacgcggccggtgtaccggaggatgaacttaggtgcacggatggacacaattaaaccttgtaccgtttgcacctactcgattcttcactggaagcagaaatgtagttcatccggactaaagtccgctgccgtgtgaggaggagggaaagcaacactgacactagaagcactgcctgatagatgacgctgttgtaacgctccggacaggtatttgtgacctgatgggattctccggagtcaacactggacaactgtctccccactcaatccctgtcatctgaatcacgagagcaatagcactcgaggaggacccagcctcctaagcctgaaacacgtagtgtgtggaggccgcgacggcgcaggctctgtagctgagttagagggatttatacactggtgcgcaaaaaagactaacgcgagtcgatggacttcacggcggtgtaaggaacggctctgcatttatgagaaaatacgtggtagcatgcaaaacaccctgtggttgcacatcagctggctgtaccaggtgaacacgtgctatccacctcaacgaggggctgttctttaaactcgtgaaactctccacaaaaaggcactttcaggtgcaaatctaccacccgaaaagaagtttcacctttacaccctcgaaattgaagcgaagctacttgagttggacttgttcgctgatccctgtcccgagcgctggagccaccgtgcgctactacgggaacgaagtcgagacgggggcctaatgacgcaaaaaccaacgcacgccacgaatacaggtgctttcccatccatacagagaggtagttctttagatggcaggaatatcacgcgaagtctttgcttcggggggctgtccgtcattgcatgcggcagagctggaaatgtgtgtggcttgcccctcggaggttgcactcctacaggtaatgccccagtccaaagaacagaaagtaaatgcgtgatcgttcgcaggtgaagggccgggaaaatatacgtaaacgatgataaacgacgcagcaaacccgagttgactctcagcactgctcctaacacctactataggaggattggcttcgctcgctgctaccgcgttgcaacccaggcggggggagacacagggggactgcgctattaacgcgaatgccaagtacgcaaccgaattccacggctctctttggaagtcaacatgagaaaatcctccagaagagttttccttgcgtatgtgactacaggtgactacacacccgctttctcgcagcgggctcgctcgtcccgtgagctgcgctgcagaggaccacgctacctgatcgtacgctccgtctctccgcggtaatcgagaggcacaaacactttaccaaccccacacatgacgaacaaaaaaaatgtcatcttctattcggcttgaatgcaggcgtaccatccactcgatgtaaagtgaccatcttcgataaaattgattgattcgtgccagccacaacttcgcacacagattgcgacggagcgtgcggtgactgcagaacaaaaccgtattacaagcaacgatgaccggagcaggtgagaaccgttccatcatctgactgggcaacgacccgtgatgacgataggtcttacaacgcaggatcacgaataacactcgctttgttcttctttttccttcgctggtccagtacacaatagaaggatagtaatccttcgacccaatgcgcacctgccagttggtacctttctacaggctgacgatcgccatcagcaaatggacgaactaacagatctgcagtatgagctaccacaaaatagagggtataactttacagtatgtttgtaacaactcttggacgggctttctgtagcttgttcacatatcgctttcggcttcagaatgtcctgtagtatacagctgccaaaacaagccaccacgtaaagttcaagggggccggttactggagtgcaggcgtgagggtgttaggacggcacttccgctacttgagctaggcagtgacaaagaagaattatataaaagagaaagagcaaggcatatcgtgattgtttccaggagaatgacgctgataagtagcccttctccacagaaaccccagggagcgagccacggtggatgtatttcacctacttcgttgacagcgctcatgctctcctgaggcgaatttgcctacaccgtctgagaaaaagattttattccagacgaagagtttgttgtaccgatggacgtaggctgaaggctactgcagttaaaggcactgtcatgaggaaacagcgtgctgattgtgtgtgcgtacagtgcgaagccaacaagtgtcatctatgatacaggatccgttggtcattgggtcatttcgcttggaaatgtgacctgaggccgcagtttccttgtgaacgtagcagttctggttgatttgtgttgaagtgctggggagaatgcccagaatcttccctgcaacgtggaggaccactcagtgccgatcgcccactaaactgcccgtcacttgtgtgtgtaagcctgaaaccatttgtcctgaaagaaggtcatttcacacataaagtaataggttacttagaaaggaaggtcctacctcttaccctcaaccctctgaagtgcctctgcaaacgtcgtgaacagcaggcgcgcacgctggacgcttgctgcacacggagcggcgtgtgaccgtcaggaaggtatgttttttcgacagtaactgtaacatttcctgtgttttttatattcgtgtctgccgtaatttctccacgaatttggggggatgtacaggcttcttccctcggtccttgcaatcgcagcatgcgctttgcctagacagttgtagactcgaggttcttttggtcggtcatctggccgttttctgtgcaaagcggaagggggaactgtgagcaggcaaatcagtttttcactagtttgtagtaagatgaacgctgttgagactgttggtggcgtgcttcagggtgacaaagcggggtcttcaccgcgagaaaagcgacctgaaggtggggccagcacgaattttgtgtctatgccgtttttcctctatgtgttcatcacattgatcgttatttgccacgctcttgcatttgccgcttggctgttttacttcttgaaagatcttgcagcgaacaaaacagcgtccgtgaaattgccgtccgtgaaatcggccccagttaagaggcagaagctctaccctgacactctttctgggcagtctacgacagcgcttaagggaggggtgtctccacacgcgatatcgccagaatcgttacgacttcggaaaccgcctgtttcgacgtctgcagggtcttccgcgtccctgaaagacgctaatctgcagtcgcagagcggcccctcttcctctagtagctctcgtgaaaaaaccaacaacgaa

SEQ ID NO: 3936 - DNA, 4928 bp, Toxoplasma gondii
  source 1..4928: mol_type = genomic DNA
tctcgtcggacaacggaggtacagctcggcgattgataagcgactcgccgcatttgaggcagtactccggatagacggtgggtctcaatcgccccgccacttcgtcgggctgtgctcgagtgtgcgtcctggcctcctccaggacctctccctgtccccggccttcgtctgcaggagacaggaaactccgcgcatgaggggaaaaggcagagggaggatggggagacgaatgagaagactgcgggggaagaggagcggaggaagaatacggcgaatgaggagaatgcaggggatagtgagaggagtgggaaaggggcgacgaaagagagtgaggggagaaatcgagttcgtcacggagaaaagaagggggacgctcccccgagatcactgcatcctgcgaagtgccaagcggcacagctgagacagatacgaggagcaagacaagaagatggaaacgcctacagaacgtaggaggaaagagaacccacgcttcgcgacgaggtcgggcgaccccatcgctgtcaaaccttctcgccatactcaatccctggagaagacgttttttctgtgcatgtgtttgcgtgcgcctttgaagacctttcaaagcgatacaaaggaggcactctttcaggggcgttgcagacgagcgagcactgaggtgaacatgtcgtcacatagctatcgatcttcacatttccttgtctccctcttgcctccacaaaacgctccatctaagcttgccaggtctcccgttcaatcttcctctgccgacgacgctcagtggacgaacagccagagaggaaaagaccggcggcctgtgtccaggaagaaaagaatggtgtggtgaatggcgaggaacaacaacgcagaggaggacgttctgtgaagatgtgaagtcgagaacaaaggacgcccgctcgacgcggaagtggaaaccgcgaaatcctaccgcagtgaaccagcagctggacttgcagtctttgttgcgctatgattgccccggttgccccctgctttccacccatcctctctctccagttacatccgctggttctgcaccaacacacatcttggcagacacaccgtctctgtcccttgggaatttcgcagcgaatgtagcaagccggagcaggcagccatctttataaaggccactccgggagagctgtacatgcaccggaaaacgacaccagggaagaaagcgtttttttttgctgctctactttaaggcagagaaggtttcccggaaaaagaaggcctctgcggaaagcggaagcgaacactttcgttggataccccgaggaaaaaaaagaggtaaccgatgtgatggaggagacacagcaaaaggcactcacgtctcaattcaggggaacgcacgcagcgcgtgaccggcgagcgagcttgcttctcgagcaggtctctttaacacattctttgaagaaatatctctgttttcttgtctcatatccatcttcctgccttccctcacttctcctcacatggcgttcctcttgatcctgttcgtctcttgtttagcggattcgctccttcccttttgtgtcacctgccttttctcgctgtctcctggggtctcccatcctcccgcctcggtttcttcgccttcccaattgttttctcttccgtctcttgtgtgtttcgcttttccccatgcctggtcctctcttccctctctgtttggtcactaccttcgtcttttccgtgccatcgtcgtgttcttttctctttttctggggcttcgagttccttctaccgtctgctctgacctccacgcttccgttttcgctgttgctcctcagtttcgcgtttacttcgtctctgctgcctctatgctttctcgatgtaaacccgcacggcggttgccactgacaagaatcagagctcaccatcgctgcagagcagaacgggacaacggcatgtgtcagcgaaatggctcatgaatgaggaaggcatatatagaggatgtgcgtggcgtacatactttggaaacgagaacgatgtgtgaggagaatcgggacgtttttcggggggggtaagagggggaagcaggcggcaaggcggagaagtcaaatacaggattaggtggggaactttgaagaaaatgttttacgcttacccttaacttgacagcttgccgttatcccttcaggtgaagaaaaggcatggaggcatgtctttttcgtactaactgggggatgcttcgtccactgcctgagacactgcagagttcagacgtcgcaggataccataaccataaggggcctgaaccgcaaagtgacgcgggaggtcgctgggtcacttgctacgcacgggcacacgcccctgatccacggggcatgacggtccgcgtgcgtttgacacaactgcagcatccaccgttgtccaaattgtctgaagttagacacagaatgccagctccctcccgattcgactggggtgtacagacaccgcagcgcatcgctcgcggccgcagttgctttccgtaagcagcggcgttctgaataagttcccccacgtgtcacagaacgccgctctttggtctggtcggaatctgcccatcagatgctttctttttatttctgtcgagtgagtggacacacgaaccccgcagaaaccgagcagcacgctcgaggtttcaggaatccgtctccgaatcaaaacagcactttaggcatggtcatcatgcacggacccacggcgactttccaaggaactgtggtgcagagttcggacgaccctaaaaatcagcggggcttctcggtgaaattgggatgtgaggtagcggagtgaaggacgcgggagttccagaagaacagttctcgtaagcgacagcatggtctctacagtgactgttaccgcctgtcacgtggggacactttgagtctgtgcaagtgaatctctggagtgacaagggttgtgaaaagcgttcagggtcctccatcacagcagactggccatggatgcagggtgtcagttacacagcacactactcgctcacgaattctgtttagctgtaagtggtcaaccggctacaacggattgttccgaggtacgggtgcttgcgaggccctcagccgtgtgggcgttaggagactttcgttttcagaactcgtctgcggttctagtctttctacgggacaggctgggaaaagggaatacagcagtaaacgagcgaattcgccttgtttgctcctcatgaaatacggagaaagcagccagtcgccagagggacccggtgttcgaaggaaacgctgcacgggagccacgcaaatcagaaactttcaagttcccgtcaccgaagctcgactttctggccccagagttgcagggaaaatccttatgcgcgtggactgttcgcttgtctccttctcttcgcatggaacggactgttctcttgttctgccaccctcagtcgtgtctgagcacttgtctcgcttgagccgtgagcggacgcgatcgttggcaggggatcgccgcgcacacaacactttaggacgataaggatgtggaaaataaagtacgtagcaaggtggagagaggcgtggagaagcaaatagaagaaaacagaggcggaagacagaacgacgaacggttcgtatggaccaacactctacttcattagatcacgcatacggtggtttgagacaacaacacggaaaaaagtgtgatgctggcgcggcagacgggtgtcgctcaggggaagtgtcttgctggtttttgtcagccactttgtagtcgtgatctggttttttattcggagattcgccgtttgttcttttcctagactccacacatttcacgccatgtcgattccgcagcaccatttggtacaggctgcttcatggctgacatcctgttggcttggtggtggccgctggccgccttttggatctttcatgtacaaaaattgaattacgaagaagcagacgagcagcagtacacttgggtgtttcggtcacattgcagttgctcgtgctcgcagggttccagcgttcccctgctggctgatctgtttgttcgtgtggtcccgccaccgcgagcttgggggttgagactcggctttctcattcgccattttcatctttttcagctgctcgtttatatgcaggctctttattgttttttattgcatcttgacagcgtcttgtttccgacgtctatgccagccagcagtcccacgcgagagcagccgccagacactccgcgacttgttctgcacgagatgcacgcagaaagctgtaaggaaaccccaccattcttcgtttttcgtccttgctcgttcttctaacaattcaacaacctcagatgctatcgttcttcctttttctgtctcttgcttgtacatcttcgcgctctttactgcattctactgcacagccgcagaaagctcagatgcacagagtgcatgctcgacgcgcacagactgagacaagaggcggccgacacattggagtgccgaaagctgtcacttatgtttttccttttttttggaagagaagcgactgaacgagcaagagccagctgtcccctttcttttaagggagagattcgcatggagtcggcattcacgcgaacgcggtgcccgccgatcgactcaaaaatcgacgaacggatttggctttttcttgccagacgaggtcgtttttgtgccatttcccgcgctgaagtccgttcaccgttcgtcttttgttcctctttgtctgctgactctgcttttccattgggctatccggcagcacggccaacccctccacgccccaactcgtggttccacgcgcgactgtaggcaggaggttcactggtcttccccctgcattttctctctttccttttttccttcgcgcgctggtttgccgcagttgtttcgtccccctctcgcggagacgctccgaccaccgaacactgaggga

SEQ ID NO: 3937 - DNA, 4829 bp, Toxoplasma gondii
  source 1..4829: mol_type = genomic DNA
ttagaacagacaaaaatgtttccatatcctacccgtatctccttgtcatcacctcaagcatagagatacgtgttaaatgtttatagacattttccatatcacgctcgtgtgcgttgtctctgccgaagacatggatgtgctagcaacattactgcttcgttgaaaacatacgcttatgctccctgctacgaacattggcaggaatctgcctagcctagtattggggacggagtcaagcccaagtctaattttcgagtcgattaaggatgctgtggactccgcgttgaacggctacgacggttgctgcttgttactgggaatgcgaggtaatactgcaacccatatcaacggggaatcatcgagactgttgtgttgtgtcacgatagtcaatcaaggaatgtgtctgtgatcccaccccccaataggcacggttttcgtgctaacaatagaaaacgagatgttctagcctcgcagtctggttgaagcgagaattacataagcgggtgcttaagcttaacgccgcgttttgcccatcattagttacttttcacaggcgcggaggaaactcaccgcttcctaggacaagcttttgctaccatcgtgaaagcgatcaaacagaactcttcaggcgaaaatgatgagtggtgttcggattatgatgccctcacatctgaagatcggggaggcctggttttcgagactgggaagtacgtttgttttaccatcattttgcgcaacctcagtgcaaacttcaagctcacaatactcctcatagaagatgacatgccaacgacatatcagcacaaacctgatcattttgacgctcctcccgaaacattccacgaacaagtggacgatatcaccttcaccatacatcgaatcctgcacttgcgcactgttcttgcacacaaacgtgaagacgtaggcaaacacctctgttgcatacgttcgtatggacactgatgtcaggtttgtgagtgcctttgtaccaagatacgttggtggttcgaaagtcgttttcccaaggcctaacgcgaaatcctatttcctagtacctccagtgaactcttttcgtatgatccagagtgcgcagtgaggtaaatacatataaggaactcgacaagcattactacatgatcctggtctatgcctgcaactcgaattatactctcgccttcctgtgcactgggtgaactgacaggtggctactggaacagctacataataatgcactaacagtacacgaatcctcggaactaggcgttacgtatttggaaatttcccatggagaaatgcgcgacgcgcttggaggtgatgcgctctgtgagctagagcagcctccaggctgcactaacggcccatccaccatacgctttcgcggagcatcagaatggctgattgattctatggattccctcgcgaggattttcatcgccagcgcacgtaagccaatcattgcacgtgaggggaaaaggagaattcgaacgccaaaagagctttgtgccatcgtttgtgtggggaaacatatctctgtttcccaaaacttttatacccgctcttcgaacacatgagacaatcagcataccacatgcggttagggtgcataaattgttctttccgtatgttgttgcagaccgttgtggacaaagcgaatcgcaaccagagctcgatcatcgcgtcgaagagaatatcagacgggcaccgcctcatcgcattgtgatttttaccatcgagcgaaaggaccggggtacaaatgaattgcaacgagggcgcttggtttttctagatctctcttctcacactcgcgatacagagtgaggagaaagaacttgcaaagcatgtcgatcgagtaaacaacatcaccagaacacaccaatcgtgcaaggccagaagcagacactggagcggacgttatattcatgtttcgtacagctctgcgatccatgagttttcagagaacttttacatcacctagggaggtgtaacggaatattttctgacatgcagtgtcgctctgtggaacgatgaaggacacctccggagatgtgcgttgaatcatccaaattcttagttttccacattcgcagcgctgctcgtttactcccaccgcgtaaaacaatgcccccggacacgaccgtcgtggagattatcttgtgttgcagcgcgctttgtgcaagcgacggaagctctccagaagaagcaaacgacataaggctttcaagaaatgcaatattcactttactcgagtctcttctccccggaacgttgagcagcctgcgtggtgacggagcgccaactccactcatggtcagcgattacaacagaacctgtcggtaacacgaaccttgtgtttttctagatcgctctccaaatatgagtatcacttgtgtccagactgtccccacttgattgctcttgcaggctgacggcgactgcggtattctcaggacagttctgaaggcaagtatgccttttaagaagatcgcataacggcttgaaaggcccgacagcaaatactatcggagtaatcgctcagtagagggtttttggatattttaattcttgattgctggttcatgtatcggcagcagaaggcactgtgtggtattgtatgcacaggaaacttttctaaacgaatcttggagaactgctgtgatcggaacagttcctgtgtctgatgtcagcagtccagaagctgaccacctgatcaggtaagtaactgcatgagctcggcgaactagaggctaccctatctgcaacacattgtgtctccttgtatgaatacttcaattgccgtcggagaagctgccagatcttcactagagacagacaagaggatgacgagaaaatcagagaaatttgttgaaggggctcataaatcttggctattcaaaaaacgaaagaaagacgcttttcgttatcgaactgcctcacaggaaataacgacgcaattgatgtgaatcaaattcgctaattatttcctacatcaatgcactgcggaaaccggcttgaatgtccaacgcaggctactgaagacaatggaagccataccaaacaagccttcgtgagtacggccttcacgtggttctctgaaatttgttgcaaccgggcgttgtgtcatcttcaacaaaggaagttttcttgtccagagagtagtgtttacatgaactgtcgaacataccacctcactgcgcgtccaccacaatcgcggccgatctcgatttttcctctcccgggagaaaacgtcgtgagccagcatcagaggtggtggacgatacgttgtgaactgctgtctctgttctcaaacttgattttaagtctcctgtcaccccgtttcatgcttgtccaggtgacttgctatagccccccgaaaagttcattggtgtcatcttggcaggcaatacgacctcgcaacacaactcgacgaggaagtgactgggttgaaaaacagaattgagaggctgcgtctcacgctggaccttcccgccgtggcgagttcacgcattacggagtgccatctggataatctagagagtctgaggagagagctgaagtcagtctaagagaaccatatttagttcgagaagttacaaacgtatttcctttcgcgctcacagacgcttctgtacacgtcttgctgaatcatctgtaaacgctcggcagtttctcctcagtgcctgtgctgaccaatcctctttagaaaaatggctcgctaggcttgatctgccgcatccatctttcctcctggtggagaccatagtaacacactgtggaattatgcgtacagtgcatctctacgtttctttgttattgatcttattctgctacaatggttgcaccggcggcgttatcccaacggcacgcttctcactcatatctcgccagtctggtgacatcagcataagtacatatgcggcacgagataatgtccttgccatatgctatgaccagaatcctccgagtagcacttcagaaacgaggctggcctccgttcgttccgttccctttggttcacgctcgacctcttctccagaatccggtgagcattcacaagctacactacgcctgcaacgttccgtttcaagtgtttcaccagactttccgataattcatctgacaccgtatacctgtatatgttgtaactacaatcacatacaccacatctccacttttgcgcgctggttgattctttcgcaagcagttgtcaaattctcgagtgtattgtagccgggaaacaggatcacttcttctagaacttgcttaagctgagctacggcattccaagcttgttgaccgaaatagataacgagcgttgtttcgctaccaactagaacaggaggcgaccgccggagtagaggcaggcgataccgttcgtacgctgacagctcaccattgtcgattgtaaaacaaccggtgcacagagggcaacagcagctgcgcgtgtcctcaggtgtctctccaagtgttctgcttctgaacgttcaggggaaagatgctttcattaaaatgccgtgcgaggggctcactccgcagctcatcagcctggttcaggtaggccacctgcccttttgatagacatatcctagaggaaaaaggaacatgtgcccggccacactgttcatccgataaaagtggcaatgacgatgatgacgaagggaagtcttttggttatacgttgaaggtgaagcatggccgaacaagtctatcccatgcctcctataagagtctgtgggatttgccggtttactaggattttactggtcattgatgcatcactttaagttcgagtcttgcactgttccttggaactactttacagaggcgtggaa

SEQ ID NO: 3938 - DNA, 2288 bp, Toxoplasma gondii
  source 1..2288: mol_type = genomic DNA
gacagtgaccgaggaatataacttcatctagcgaccgtcaaaattcgggccatgctggcctatgtcacgattcagataatcgtgtgggggacgtggacgctaatatctgcagcaggttgacaaccgtcttccccagggaccagtgatggacgaacacacaggatctacatttaccgattgaacagtaagtggcacttctcatatcctgaccgtcagagtcggaaactgtggcagaatgaatcgtcggatcagggatactcgtaatcatacgacaatcaagctcctcaacatcatccacgacctcacaagagctgggcaacatgggtcggaatcgatcgttgctttgacctggcgtccttctacctaaactgcaaacatccagtaaatcacccagagaatatggttagcagttacactgcaaacgaacgatcataacttttcgctgaggcgtgggggacacttgacagttctgagtttcgtgaccacgcaacggcaacccgactctgtggttcttgcgacagtaaatttgcacccgtttttcaagtgaacttcttacagtgatggactggcttctcaactgacagtggcaacactctgcgacagcacaaaaagagacaaggtccctctacgaacggtgcgtacaaaccgtactccacagagccatgtagtagcatggcaaatgtccagggtgacatacacagttggatggcatttgcctaggtagtaagcgaacgggcagggtcaccaattttacactttctcattcatgcatagacttcacggagatggacaaaactgctgtcgggccaagcgtggggatccggtcccacaggtacaggcgttaacggtttggctcaacaacgcagagccagggccacaacacgaagaaattaaccaggaaggagttattcatcatcaactgactgatgtttccttccggaacaccaaaggttacactcgcacagatcaagctctgcagaaccattcacgctgtggagagaggatggatgtctcgacaataagcggaccgccgggaaatttccgctgttctcactgttgggtaacacagagaggggggttgcttgtagtcagttatcctcctactgtgagcaaggcgaattgacacggagttacgattgctgaaagtaacatggtccctctgtccttttcaagggtttacataaaaacccgtctcatgcaaaacgaggacacacacgcagagagggttggaatgtcgcggtacgccgaagtgtaacgcgcgcatgtctgtttcgcatgcgtttctacgtcttcaacgcagactggaacccccctattcgcaggatgaaagagagagcgcataacattgaagtgcttcggcaacaagcttcattgctcattttccatgataattttcacgaggaaatgtctctaagttgtgcgcatcttttttcttgacagatttggtggaatgacggagacatttatccgacgcgttgctggtcaggtttgcgcctgctgacgacaggagaatttccctctgcggccagctccgtcctggctatttcacatttttcattcctgttgaaggattaccctgtaccttggcttctaatcacttcgtctcacactgtctgtttacctgtcttcattcttttacattcgcggcaggagccacggcgattcaacagcgtaggggagcgatgattttgtgcgcggccgacgccacactcgtctcgcgcttacggggactggattcacttctgtgttgcggtgcacaaaaaatctgccgttcttggccggatgcagctgggctgacggcgtaggtactcgctaagaaacgagtgaacgccatatgagttacggtgtagactgccgaagcgcaacagggtgttacgacgagttttctggatgaaagactgctgacggtgcggactctgttcagaaccacgaagatgcaaattccgccttgaggacttcatacaggtcttcaagttctgatgtggtttggggtctaaggattggcgtgagcatgcggtgtctcgtgcatcaaaacaaagggctgtaggtggacgaccttgtgatttgacggtgtagaaacgcctatgcaacgcagagacgttttcccccaagatttcgtgtagactacggggttatttacttgttttggctgcagttttggagcttcggtgtttcccctgggataaaacggatgaccacactccgcgtagttggtggtaggaaatttccgttcctttccaacacttttcgttgtcagttttctgcttacggttgcgctctttaaaaca

SEQ ID NO: 3939 - DNA, 2051 bp, Toxoplasma gondii
  source 1..2051: mol_type = genomic DNA
tgaagaagatcaaagagccgttgtcttttgggtgccgtgctttgcgccggttcttagaggcacttttgccactcgcatccacgcctcttgtcgcaacctcggtggatatgcttcgatctttgctgtcccgaatgcaaacacagttccgctatttgaaggccgcagcggccggcaagcgggcaagaggccggaaacaacctaggattttctttggattttgtgttttccgagtactaacctatcaccccagtgccgtggtgcgatggcagggaccaccgttgttcgtcatggagaaatgtgacgtcaccacatttcaaatgtaaaagcacagagcgcagtgttccaccgtcagaaaaacacggaatacgtccgggttcgccccgccggtgggtgggtccatcatttctttctgcgttcgtgccttacgtcggcacgtgtgtgtgccagccacttttggtcaagtggcagccaagagctgtttcctgcagcggtagaagacaagaaaatgcagtcgtttattcgacgaatcagcctgtgacattgtatctgttttcgaacgactccccagagtgggtacggattacctacggtagtgtggccgcaagtcctatgtccgtattaagaggagtaacacaaccagaacaagaagtattaatatcccggtggatattgtgggtgcgacggctcacggacatccgccaatgtgtgtgctctgtgccacctgtatcaccacaaccgttgtcggccaggtggcaaacagatcccaatttaatgctggggtgcgaaaaacttagcaggtgctgtgttttccgctagcttaggctccccagcaaaattagagcattactagtaaaagcatctagtcagttcagaagacgcaacagagcattgcccagtgagagtcgacacggtttttagtggactctcgtatcagataacggcgcgagaaaactttttttccccctggtttgtgtgtccgcggcagagaagtgtactgggcgcctgtctacagaaagagaaaggttcgctgtcggaccctgagaagaatggagcagattgcttccgttcatcttcaagtcgactcaaatgagtgtagtccgagcctgctacggattttgaaggagctcattcagttaatagagatggcttctgtgtactgagaccacccgtgatgagcgcagtgtagcagcgagcactgttattggcaggaaaagacgaatctaacagaaatgacagaaataatttgaggtagttgacattcgcggcacatcggaacaccagtgttgccattttctggcgtgcttatgcgggctgaccttgtcgaggagacctttggtgttgctgcgttaactacactggcggaccgaggccagtgaactagcataatcaacacatgggcatgaaatactataaaacagagtcatacatacctagaagcatagacgcgtacggccgctacatcgaatgctgaagttgtgaacgtgtgagggagaaatataagggcgccagctagtgctgcagagtatttcggcaaaacgatgtttgttctgttctaatggtaagccgccggaccttcaggtaccatctttgaggagatacgcatgatatagggatgactgcagttctttcattccacaaggagcaagggagatctcccgctgtccgcgtccttcgaagatgaaaataaccaaaacggattctcgaggctgaaccaccgtgtcggtaaacagagtcgtgttgcgatggtttctggcgagctctacagcagcccaccgtctgctgcatagtaacgccaatcctatatattgcagcgtcaacgaggatgtcctccaggcgaatagctcctctaaagacgtttgtgccaaactatcaagcggggaaaacagtggattcgtgtagattcctttgtgccttgacccaagcacggaacacaggaaagtgagaatctgaaaaatctgtaccgctggaagctgtataggtgaacttgtgaaattacgagaagggaaaaaacgcacctgtggcgtgcgaagaggaaatgaccgacttctgag

SEQ ID NO: 3940 - DNA, 2126 bp, Toxoplasma gondii
  source 1..2126: mol_type = genomic DNA
gcagccttcatgtctgcctcataggctgctacgctgaagacctctgccgcgccgtttcttctgccttctctctcgtcttcttcgtcttcttcctcgccttcttcttctcggacgacgagtccccgagcgcgagctcgctggaggccttgagcctttccacccacaccgcgcggcgcccgcggagcgtctgcggccgagaaggctgcgtcgccgtcgcctccaatgactttcagaaccttccgcatgcgcttgtcttcttcgcgtccgtcctcgcgggatttctgtcccttcttcttcttcccgctggccatgcagcgccgagaaactgcatgcgcgggagaggacggagacgcgcgccacggagaagcgggagcggagaaagaagaagagagaagagaaggagaagaaggcgcggaggaagaagaagagagagaagaaggagaagaaggcgcggaggaagaagaagagagagaagaaggagaagaaggcgcggaggaagaagaagagagaggagaaggagaagaaggcgcggaggaagaagaagagagaggagaaggagaagaaggcgcagaggaagaagaagagagagaagaaggagaagaaggcgcggaggaagaagaaggaagcagcgacggacaggagagacgcacagcaatgggtggacaggagaacgggagaggggaagagaagaaagaagagagcgatctaccagaagaaggtgaggcgaatgaagaggagaggaacgggaggggacgagaaggtagcgtagagagacggcgacgctggacagcgcctggaaaccgagcagaagagaagagagaagacgcagaagagaaaagagaaccggcggaaggggaagagcgacgggaagcgggtgggcctctggccagggagaaggaaggccgcagcgacatcgtggctggagaggccatgcacgaaaagagaaacagaggagacagaattggaaaaagagagaacgtggaaaacgggaaccgaagactcaaaagcctccgacagctgcgttaggagatgagaggaggaagaagaggacggggaggcaagagagggaggaaagaaaatgtaaattgtccgcctcgtttctgcggaacctgagactgcggagagagatgacgcttccaaactcccctcaaacagcagaaggtcgattgccggtctttctctcgatcggcctcctggctggtctccggttacacatggcgtcgaaggtcgcgcggagggagcggagacacagcgagagcggtgaagaagggaagaaggcgaagagagaggcgacgtgagaaaacatgtgaagaaggagaaaaaaggaaaactttggaaagaagagttttccaaaaaagaacgaaataatggccttcagaagcaaagtgggtcgtcgagaagcgtcgcgtgtgtgacttttctcgagaagccgtccagcggattctcctcggtttctcctcgacgatcttggcgctgcgagaacctctccggatttctcctttctctccttttttctgcttgctcgcgtctcgcatttccttcgcacagtttcccccgtcctcagtttgtggactgccttggcgtccagggaagaaccgagaagcccttcgaagcctgccgcttctctcccgtcgattcgccgcgaaaaagagcgcagacgcggaggcagagagacactggggaagacgagcagaaagaaaagagaaagaagagcagaaagaaaagagaaagaagagcagaaagaagagagaaagaaggagaagagcgtgcgtgaaggctgccgatcttcctggacgcttttgggctgctgtcgcgtctccggtctgtcgctgtctgttctttcttcctttttctcttcgcctcccttctctctcgtcctgtctctttccctcgagttcctccctcttcttgacggtccagtctcactctcacgctttccccttctctgtgctgtcgcggaggacgcagaagttctgcttcttatctctccactctctctgccttcttctccacttccccgctcctctctcccttcgttcaacttctctcttcttcacctctgtcctctcctctgttcctccttctctttcctcttcacctctctcgtttcaggtgtacgtacacca

SEQ ID NO: 3941 - DNA, 3387 bp, Toxoplasma gondii
  source 1..3387: mol_type = genomic DNA
ctgcctagacgtatacataccggtgtgaacatgtgtatcgaattgactgtatgaatatgtatatatatgtatatatacgtatgtacacgcgcgtggctaggtatcagtgcgtcagaatatgtttcgaaagatgttggaatgcggtagagacccctgtaaggaagaagcctgttcacagttttgtgtgttggtcggtttctttcgagagctcttgcgcgcaagccgtcctgcacggatgcgtctctgcgctcacgagtccgtccgagtcgttgaggcgttgctcactcctctccctttcagctggctgtttctcgaaacgttttcatttgaaaacactgcaacagacgttcaactcgggacgcccttcgtcgagttcgaccgccgtcgctgtggcggcgtgcactcggtttcttcgtttctgaggttctcgtctggtctcggaggatgtttgcactgcaggaggaaaagacggaagactcgcggttctgtgcaggcgccgttcaacaagcgctgcacaggacccgcagaacatccgcagttttggtgaatctgccgcggacgtggagtgacgcggagttccgtctcttcgacgcgaatgtcaccgtcgagcgagtcgtctgtgtgcgcggagctcctcaaattggtcagtcgacaaaaagaaaaagaaaaggtccagagttccagccgcgctggagctcgaaaaccggagacttggaattcagacggggactgaggcgtagactccgacacaccgaaggcggtgtctaaatgcgctggccgttgtccggcaaaccggcggcttcgtccctccgcctcgctgtgcgtcaccctcttcaaaagcctgcatgctcggatcaaaaccacatgcatgcgtgtattgatgcatgagacttcaccgcgacccaccatccatgtgcgtctccgttcgttgactcttcggggccttgtcaactggacagtcgctctcggtctcgcggtggactagacgcatttgtgcacgcgcagtcatgcatgcacggcagcgagagagtgagggagctctggagagaggagacagaggagaccacctgattgcgtggagctggcaggctcgtggagacagctctggaggacctaacttgtttctgtcacctctttttccatggcttcgcgtcttccccccaccctctcttggacgagtcgagaagctctccgtttgcctccaaaatgacgtcgacgttgaaagaacgcgactgtagacatatcgaatgcataccaaaatcttcgtcgaacacacaagcgcccctgcacaatgcttgcccctgtgctgcgacagtgccccagatcccctcatcaacaactgtacgctacgcaacggtgtttcctcgcacactggaaatgcctttcggtcatgtaacagtggtaaaaaacgagtctccgacttgcaagaatgcatgctcaaacacaggtctacgtacagacatatatatatatatatatatatttatatttgcattcctccacttgtcacagaatagtgtatgtgcctgataaacagtgcatttcagcttcatctttcagaaacaattacgtttttgcgtaaaaacatctgttgaatgatgcgctcgcgcatacaaagacacattttcagccatttgcatctgtgtttgttttctcttgtgtccaatcagatcctctctcccgcacacaggagcctgaactccacgtgagatttgtgaaatccttgacgcaattctacagtcgaaaggtgagaccaagaccgagagtcctggaaatttcgcatgcttgctagctgctggcatccacgttttctcgtttgttgtttgcctctcgctaccgttgacctctgcttttgttcgtctctctgttcctctgacttcatcatccgcgccactgtgtaaaaaaacatcctgaccagctgcatacctcacctctttctctcccaccgctaccgggtcgctgctgcgctccaaatctatattctttcactcccctttttctctttctcgcatctgtgcttctgtcttacgctgtcgatttctgattctgtttacgatttaacggatggaaaggtacattgcgtatgaaacttcagaaccatattattcacctgcattcaaatttttcatttatctaaattttaggattaagtaataaggctactctttcctgctctttttctctcgcatgctttatccatctcgctggaactctaaggagtgttgctgtgttcgtcttttcgggtctctctctacgttccttgtctttgtgttttttcttctgtctcaacgcagctgaaagtgatcgaagtgacagacgagagcgagaggagcgctgaagacctcgcgactgagatcgtcaggtaggcgacgccttctttccacgtcggtttttcactgatctcttcgccttttctttcgtttcctctgaagaccttggaggccttcagccgcggctcggcgatctggggcaccacccgtgaagcgcaacgccctgtctcccgttgcaaaccgggcgttccaggtttaggccaactcttttctggaccggtctgctgcgctgtccaccgctggagccaagcgtttggaacttgtgcgagtcctctagatcacttcgttgctccgaggagcaaagagaccgcagcctacctgtgtgtctgtgggaggccaccggcctggagagaactgaaaggtgcaaggaggggagcagagctccgatggtcaggcggcaggacagaggggaagagccgtctcctcgttttgcggggccatcgcaggcgtcgacgtcctgcaagaggtattcgtgcgtcgatccacccaagagctgccgcgcgcaacgccgcacactcagtgtgagcgacctctggagcgaggcttgcttctggaggcggacgtttgggctggaacactgggcgggagatcgctgctgaatctgcgactggcgctgccgagcctgcctcgcagaaaaaaccgcgacacacacatgctgaccttttgacgtttcctctccaacagagagagtcgccctgccgtcgtcgcgctcgcagcaccgcccacagtcgacatgcgaaacgtcgcgaagagcctctgcgatgcctgccgctacaagcttctgcctgatgtcggtgagtccggtgtctgtttgacgtctttctttctttctgaccgctctcctcgactccaaagctggagggtcgccgtcaggagctctcttgtcgtctcgtcctcgctcggtctccctcgtctctgcattggccgccgtctctggacgggatgtccgtctgtgttgtctgtctttttctattctgtctctccttgagcaagactcgcgggtcgtctccctcgcgtctcggacaactccattcgcgtctcttttctctcggctgga

SEQ ID NO: 3942 - DNA, 4718 bp, Toxoplasma gondii
  source 1..4718: mol_type = genomic DNA
aaaaacgcaatgcttgcaaaaactgaatctgcatgtgtggctatccacgctctccgtaggtccgttttttcttcgcgacaggcagaaccagtggaatccgagaagaggagaattctctcggcggtctaggcgcagagcgcccccaggttcagtgtttcgaccccccaagacctggacgtccggccttcagtgagcgcccaagccgattcgcacaagaagttgccgcatccgccgaacgcagagacagcatcccccaaggctcggggagtcaccctctagagcagactcccaccggcggccggtgcagccgcgctgccagaccgcgagagggcagcgacagagcggcagagagtcctgcgggagggtgtctcgacgccgagacgcagctgtcgctctgcggaagaaaaaacgcgcggggcgctgcgctggaagaagagtccagcactcaccgatgccgtggactctgccgcatgtgagccaggttgcagtggcatggccgaactcgtggaagaagacggtcaacatcttgagcggcagcaagacgctgtacccccagacttcgcagtgccagagaatgacggcggccgcgagccaggcgagaacgatcccgaaggtgatccactgccctctttcgcagcatgttgccagcgtccagtcgagatggacgaagtcgcctgcgttgaacgatgccactgcagaggccattttcgagcggtgtgcgagcggaagaccttgaagagcggacacaaaaccgtacgcgggcgaagcgtagaatgtcacttggggacaacttgcttctctgcgtcgaatcccccgcggagaggccgtccagctgggcgctcgaccttcgaggggcagaaggcgcaacgcaggctggacgtcaacgctttggaagtgaaaaaacgtcacggagcggaagacaaagcgcgctgcgacagtcgacgggcgtcggaggtgactttgttgaagggacgcagcgaggcggggaggcttttgttgactgcagtttaggaatcatgtcctcactgagagttcctttggaaggctacgaagccgacgcgagcgagaaacaagagataaagcgagcgtctcgggaaacgcgtttgcctggccgcgcaacaaacgaaccgttccgaagtgagtttcgcgaaaaagacacatcctccgcggtgaactgcgaggttcatgcgtggaaagaacgaagaaagtagaggagaatccgtgaagaacgaccaaatattggcagacgaagttgcaagccaccccaccagtcgagaaagatcgagacctcttcgaggcactctgttcgcgaggagcgccaggcagaaagcgcctgaggaaacgcaggtcaatgtctcgtcccgaacgttgcttggctcgaaacagaagggccaggagacttttccatgaagcagacgaaacggaactgaccagacgacggcgtctccgagggagagactctcgtcaaccaagcgctggagcgtctgttctcgaagtctcctctgggacgaagagacaggagtccaccaacgtggtgtctctttccaaggaaaaaggtgaaaacgagtgacaaacggaaggaaaggactcagagttcagtccgtccacacttagacgaaaaaattgcgatttccggcctcacacggggttcgctcaaccggatcgaacgcacaactttttcgcttccgcttttccgaagcccgggaccgtccaaaagttttctccgaatttgtgcggcgagagatacctcgacttcggcctgaagacgccgactggcgcgtagccttcctcgtatgttttcaaatggtaaaagtacgccagacgcgaacgcagcgggtcaactctggaaatctcccgacgcggacggggactcggtcccaatcaacgggagtctcgcgaggtgagaaacgtctgtgacaactttgaattttctggaaaaacgtaggcgatttcgtttcgctctccgccttggcaaaccttcagaaaaaacacggctgtgacacagtgtttcctcaagacgcaaacagacggccttcgtctcccgcgcttcttcccgggccgccggcgggtcgaggcgggcgcgacgtgaagacccccgcgaagagacaaaaaaagcgctcgaccctcaagcagaaaagtcatctccagacaagaaccgcgcggttcgcctgcttcgattcttccttcctgactcaaaagcgcctttctgttaacggagctctgccttctattttttcctggctctgcccgtccctgatagagaaacgccttccaaaaatatcgcgcgagctgccggcgccgaggccaaagagagcgagcgagccgtgcggccgcagcagaacgacgggaagaacggccgtcctgcttgtcaaaagaagaagaaaacgggggaaaggaacgtcgactgggggttctccaacttcaaagcgaaatatgcagaagccacaacaacttgaaatgaatgacaaatacgcgtttcgtctgccttcttgggaaacgcgaaaacgtgaaagcaaacgccatcaataatagaaagggaagatcagattcagatttcgtttgcattcccgcgcgatggctggaaagaagagtcgaagaaagcctcagacagacgaccgactctcgtagaatgactaccctcattcgaaacacacatgccgatttcgtacaatctctccaaaagcggaacgtcgaaaagattggccgagaaacttggtcagacacttgcgtcgtcaaacagacatgttctaggcgcgtcaggcagctggaattccgcatacagcccggagatgtcggatctgccccgaaaaaaaggaatttgctttgcctcggaaaagttgtggaatctcagatggtgagaaaccagcccaggctgtctaggactcgaccggagatgtctctgggagcatgacagacagacccccgggaaaagaaccgcttctacgttttgagacttgaccgaattgccttctcgcgcggcaaggcctttcgaaactcgtttatccgggaaatatgccaagaactcgcctcttcttcctgccgtacaccacgaccaaacaagaagttccccgtatcacccatgtcggagtgtcagcgtgggcgaaacgcaacgagagctgttccacttgtctgattggggaaagtccttagcttgcttctcaccgaaatatatgtctgcatttatctgcatgcgccagacgtttatcgatgtgcgcattaaacttgaacaaacaaccacatacacagatacagacatttaggcatagagatcgacatatttacgtcgatagagatggaaatggctcgagactttgggtcggtcgctgtcgtttgctcgagttgcttcattgcagggtgttacttttccagaggttcttttgcatcaagttcatcatcggtatgcatttcttgtgcggaggccaaggagaaagacgcacagtttccctgatttacaggaaaggcgttctccagtgcacaacatccaggtcaagtggtagaagcgaggctgcaaagctgctgcatcatctcttacaggcatcacacttccttgaacaggtatgtatgcatgtttgtattattatttagcgatccgcgaactttcgtttttgtgtgctccttaaatatcgagctatccctatgtgtatatacgcttatccttctctctcgagacagccctctcctctttgcggtgtctctctgcgtctgtcgttttgtctctcttcagttgggagacggacagacactttacagaatcgaaatccctatctgtgcggatgcgtatatgtgcaagcctcttcacatacgcatttacgtaggatttccttgcccgatcttcgactcgttactgctgcgaccggattatacacgaatttcagccgtcccctgtgacactgagacgcagttgcttctgtttttctctgtgtttgagtttgggatttctttgtacacagacaccgtcacacagcggacagtacggtagaggaagacatgagcgagcaatcatctgtggcgcaaagatcactcttaacgcctcaagctgaggagctccgaaactcttcgctgcctcgagcacttcgctgcctcgagtacttcactgccctgcggtgcagcgcctggaagaaaaaagaaatacctcgtggttgcgcgtcaatgatgttttcttgcaggacgccagaggcgcaagagggcaacgcgaagaacatggaggacaaatggaggcgaacaagagtggaactgaagagctccaagtctctcgagaagcaggaaatggagggttggcaaaggcactctttttccactgcaaaaacatgttcgcttacacacccttttttttccctgctctaaaaatgcatgcggcatttttcgcgagcgtctgcttgtcttgtcgcatgcatttcgagtttgatagacggccggcatgtgaacacccgaatcagcttttcttgcatttttcgacgcaaatcctacgcaaaaggttctttcctttcttctgatatcgcgcttcgatggggggacgctgctggcgacggtgtctcgttctgcgtttcccccttttctcggaacgcatgtgaaacgacttttttcctcatttagagaagcgcagccgctcaggctttctcgccttgtctccacgcactgagagggagtggagactccagacctctcttggtttctgcaaagaattacacggaagaacttctcttgtcttccctgctgca

SEQ ID NO: 3943 - DNA, 2387 bp, Toxoplasma gondii
  source 1..2387: mol_type = genomic DNA
ttttccgactcgtttttctccgcgcacactgcgaaagaggaaacgaactgtttcttcgcatgcacaggggccgatgcgcgtttcgcgatcttcgcacccatagtggctccctcgtcgcggcttcttctcttctcccgtagtctgcgtcttctcccccgaagacatttgacagaacggggagaggggaaagaagctgaacgtatagggcggtgcatataagggcaagtcctctcctagagaccgaaaacgacgcagccgcccagtcgttccactgtgtttcacccttctttgggggaaacgccagacaacaaaagacaaagcgagagcgactatcgcccagagtactcaggtgcatctgcgtcttaatcccgcgcgcttcagaaacgctgctgttcactgctgctcgtacacttgcacgcgttttgaaacgccgtcttttgtgtgcctctgcatgcttctcgttagacacacctcctctgtctctgttccacttttccgatgtcgtcccccccctttttgcctcgtcgcatgcagcgaggggcatgcagttttcctctgaaactctgtcacagcgagatggtgccgtggttcgactctcgctgaaaactctggaatgttttttggaagacgaaccagcgttctcgaggagggggtgagctgcagtgacaccggaaactcgcgcagtgcccggtggccaccaacagacacaactgcatgctccactcttctttcttcgagcattgcatgcacttgtcaaaacagagacactctgcacctcagaaacacgttcccagaaatcatgtgattacagagacacaaattaatgagaaatctatctgaacatatatatatatatatatgtatatatatccatgtgtagttacaggtgcagatggcagatgcaccacatgtgcatggatagtatctctatacacgtatacatatgcatatatatatatatttatacacttatattcgggcgccttagattcttcaccgtttgctggatcctctataaaactgtgcacagaagaaaatactgtgtattccgagagcatttactcatctacaatatatatatatatatatacatgctgaatgagttgtgaaagcttctgggaagacgcgtgacgttgagacgagttgttctggcgacatgcagaagtatctgtttcgagcgtttctcgcttttcagttcgtgaggtccctgagagagatttgaaccttttcctaaccagcagggcctttttccagaaggcagagaattttcagaagttcatggcatgaacaacttcaaaacggtttctatgcctctcctcacacttctttccgtccgctgctgtctctctttcagctccgtcctcgccgacgggggctcggggcctctctccggtctcgacacgagcgctctgaaaacgcgactttcagagaccgggctgcggtgcggcgacaaacggagacggaagagacccgattgtttttctcgcggtttctgctgtcgctgtttccctttttcgtggaggaccttagagctgctgctcaatttcgagcacaagaaacgcgacggggaaacgtggagaccgccttttgtgcatgcaatcggatgtgcagagttcaagcgcaaagacacagtgtgcaaccgcgcccaggaagagagaaagagaaagagaaagagagacgagagggtgttttttggagggtgaaattcgttagaatcctggatggaaagcgacttttcgttctcggttgtctccttctggatttcggcttccaggattgaccctggcgcgcgagaggggaagagatgacgagacagagaagaattcctggagggtgaagacgcaagagctcgtgtgctggcggtcgttctttgttctccccaccggtcttttcctatggtttctgtccgttcttcgcctttcttttcgacaggttggcttgcgggcaggccggtcagaggacgaagcttgtggcctctctcaggtgcaaagaaagcgaaaagggtacataagacaagggagagggaagagagacgccaagaggtctcacctttcctctctcgtttctctttcttctttcttcttttgccctcttttatttctagtctctctgtctcctttgcctctctgtgcttgcttcttcagcctcaccagggtggctcctgctctcctctcgcacgcagctgccatgtagtagtgtgccgttgtgcggcttcgagtgtttccgcctttctgttccttctcttctttctcttcttatcttcctcttttctttcctctctttctttgcctctgatgcgcgggccatttctcttccttcatctcttttctccctccgttcgtttccggtggccgcctcctttgccgggctcctctctgtctccaaga

SEQ ID NO: 3944 - DNA, 2471 bp, Toxoplasma gondii
  source 1..2471: mol_type = genomic DNA
cttcctgaagtagtctctttcaagcagtgatttttgaccgaagtctgcgtgcaattgttgactcgctgtatgtcaggacctaatcacggcgcgagaagatcttcaacggcggggctacaagttcgagaactgactgtaacatgttccttgtatgaaacgtggaggcgtttacgtggtgtcctatgaatgtagacatcttccgaatgtcgtcgtacacatatggactcatatagaaccgttcgtgtgtacactgtgtagagattgtgccttctgtgcatctgctccacttgctgtgcaccagatgcagactcgtggtcactggggagtccaagttgtagtccctaggtaatttgaggcacgaccaactcataggacgtgatcaaacagaaaccaaataaacaacgttggaggggaccatcctgactgtcgataaattggtgttattttcagatgtgttaatttcagataagcttccacttgtgtctcggacggtatggcatgttccaagaggagctgcatgcttaaacaccattgtcaaaaaacaaacagcagttcgttacaaggttgacaacttacccaacaaacgtcaattttcctttgctcacagatcttgtgcagaactggtctggcttcaagtacccggtgttgtccggatcttccctttcaagaaaacttgctggtcaaggctgcttgctaacggaaatgtctcaacataagtttgtcaattgcttttgggagacacagcgcgtcacttgctggcaaagcaatgtgaaaacatcctagcgaaagcacgactgatcacgtttgtagattatgatgacacgtctcctccaaccatgtaatcgcagatcaagcagtaccagatgtagatgtctggttcacgtgcatacttcattcatcgagctgtcaatacactggtgattaacgtcaaccagattgtggggggcagggaatcctcaactaccacaagctcattgggaatagctgaatggcataactgttgctggtgaagtggccggtgatggcacagaaacggggaatttttcggtgctcaccgaactgtgaaatccagaagaatgttttctagttgcgtgttgctggcagtacagcaccggaagtacgttgtctatagtaatcaaaacttcatgatggtaactccttccttcagtgggaacagacagtttcctctgacagggttcctggttgatctgccaggttattgagaatagctcagcaccttttcgacggcgcgctgcttgtgaggttatccggatgaatttacgcacgtgttccagtgctgcagcagatttttttagggtgacgattggagccaaaatcctcgcgtggacacaacaatttccacatttctggtagctattgtggctattaccggtgatgttatctctatctgccagacgcggcctctaacacgtctcatggtgacgccaggcacatgatagagtcgctgacagaggagtattagcaagcgtatacttaacgccaaatcaaaattgaaatggatttaatgttgttcgtgtcgaccccctccgattcttcatgcgcgacgttgctatgcatgtcattggctagataatgtcttcgctcttacaaaaccttcagtttaacggataaaggttgacccaccatatcgatgtcaaggtatgaaagcagagcatatccatctcaaagcggcaaccccgtggcaatcctttgaatcataaatgtattttgtatgatgtagaaaagcgttgtcttctgatcgttgaaaacgttcacaagacaggagcaagattttcccacgcgcgcagcctgggtgcgcagatcgagcgagccgctacaagggaaccgaccccctgtctcccgtaagacagtgtaaacggctctgagcatttttcaccatgtggtaaggtcatccttggtctaaactgcctgtttttcccgagatttcctgcgaatctctaagttgagaggtccgccatgtgtctaatgtgcggtagtggtccggtctaatcgagagaagacatcaaagctctttaatggcgacaccatccattgaaagccaattcaaaccacagtcattgagtgtcttttaattccacgtctgtaaatggatttttattcggcttgccagggggtagcttgtctctctgtcaggggttttgagtcactgtgaacaagccagaactgttcgagtttgagctcggggactctcgaggtcaccgagacctgcggctttacatggcctacacaagtggcctgtggcggtaagaagttccttgccctttatgttgggatcaatcttttcgcttggattcctcgtggcgagttatggcttgtagatggtcgctgccacccacttcaacgacgcagtgagccgctacagtctccaaccgactgcagacattggttgaaattccctccaaattttatcttcgccgtcaaaaagaactccgttgcgttctcggctgcaa

SEQ ID NO: 3945 - DNA, 1158 bp, Toxoplasma gondii
  source 1..1158: mol_type = genomic DNA
ttgagcatcttctctttttgctgccggttggcattgtcttgtctgtcggcatcctcggatttctgcctctttctcttgccagtagcagtcgagtttttctttctttcggtgggtttcacggaagaacacgaggcttcgagcgatctgaggatcagaggggggaactgcgagaatggccgcaagctctgaggaagacaagcgaagctttggggccgaggccattgagacgcatcttctccgctttctacaaaggaggaaacacagcttcagacggatgggtacgcggctccaaaaacaaatccagtcagacgcctcttcgcttgtcgcgacagcttccttaccgcatagcttgtagtcgacgcagatgcaggcaacacaccaggctgctcgcgcgcagcgaaggaggggaacttgacgagcctcggcaggaaaagcaagacagaacgcgaaaaggctggctcccgacagagctcccaaccagaaaagagtcttgacacagcgtcgcagaggaaaagctggggccgacagacgagatagagcagccggggagccgcacgaagaagaagctgagaaagcagctgaggaagagaagaagcgaaaggacgtgagacgcgaaaagggggaagagcgacgcaggtctgcgtgagcgacaggaagaggagaaaaaaaagatcggctggttgaactggaaggcgacgcggcagaaggagcgaaacgaacagacgagacatctgaaagacgactctgcatctgcatctgctgcagtcctctcctcctcagaaagaagagaacttggactccccggtgcgtcgccattctgccgtctacgcttcttgtgcttcccctctccttgctgttcttctctgctgttctccttcttctctgctgttctccttcttctctgctgttctccttcttctctgctgttctccttcttctctgctgctctccttcttctctgctgcgctccctcttttcttctctccgcagctaacgcatgcggccggcgtcgggagcttcgggtggggaggcgccggcagagaagaggaggaagcagagagacgcacacagacaaaaaagacaaagaagctctgaaaaaaaacaatttccatttgacgagaaaagtccgccttcgcacctcgtgagtctcgtcgtgca

SEQ ID NO: 3946 - DNA, 1723 bp, Toxoplasma gondii
  source 1..1723: mol_type = genomic DNA
ccactatgatggctatgtgctgaagtgcctagaacagcatcaagagatcgcgctttgccactgttgcgcagaagcagaggggtgtcggcatgccccagaaggaccatcgattcgtaggcggaagtcgagtattcatcgccatcttcgtcgacgattgtactgtgcaatttcgaggaaaacaagcattgattccttgataaagcgaccaacaggacgtcaccgccagcgtcgatagcacgggaccgatcgctgtatgctccatcagcaataagcaaaatcgcatccttcccttgcgttctgaagttgggagttgcagccactgacaggagactacagtgcgcggcctcagtgaaagggcatcgtctcctttttccacagacatctggcaggcggatcccctggccgaacagagaaaaaagccatgaaagcaacagctcgacgagacaccacacaccacgcgcggtttctggggagacaaatgcaggcgacggtcgaatggtggatgtgtacagagaagcaaatgaagcaacgaacgacctgattccttcacccagctgaccgtaagcactgaggaaggcacatcggccggaaagtggacaacactcggctcgctcactagcctcttcgaggcggaggcgtgtgtacgcgggtgtgcacactggtggatcagcaacagaagaggagaaaggacagacttggaggggcctggatgctgagtgatacggcagcggcacaccaagcgccttggaatgtaaagctacatccgcgctgggaaggatcacccactggggtaactgtggaaggggaaaggagctgtcgactcgagactttgtttcctgacgaagagcgacctggcgagaagtacccgtcaatacaggacaggaagtcacagcttcacgctgccgaggctggcaatccatatttcctttccctgtcggtgaactggtttgattcttcgtacggttggtgttctcacccttactggatacaactgcaacaaaatagccgagtggcggcactcgtttctgacctctcctaccccgtcgtacaggagggcgccaagaaggcttcttatcaacttgtccttgcccaagcccagagtcgcggtagtcgctttccgcacaaaaaagtagaatgcctggtgcctatggtctgtgacatgtcaagctttaatcggactcctccctggaggaggactgtcaaaagtcttgcaggccagcaacccctgtaaggttccagcataagtaacaggataacgatgtctatgactgaacatttcgtgaaattaaagtaaatccagaagtgtgtagatcatggaagctgctggagcccactgaccgcgacacaccacctacagacggggtcgtcacgactgacgaagtgcagcaccatagaagacaaactttagtgcccttcccatgggaacgggtgtgtcttcaagatgaatggtgccagagaagcccagtacgagaattccaaaagtgaaaagatatcttcttgggactgtccattgcacgcatgcgttgtcttccaccatcttccctgcatgcatcagaagacgctcgttcggctacggaagtggaacatgacagaatctttgaaaaacgcgaagcattccagggactcgtattaacgaaggcttttgttaaaatcatgcttgatactgcttagtgtgtcaatggtaccgtgttgtggcggattccgccgcagcggggagcagtga

SEQ ID NO: 3947 - DNA, 507 bp, Toxoplasma gondii
  source 1..507: mol_type = genomic DNA
agccaaaatttggctgacgacacgctcagaaggaagagaagtaaagcggatactagggcgagcaggtgaatttcagtagcgaaagcaacatccccttgtaatttttaaaacccgcaacaactgaccgctgctgtctccactctggtaatgtaggcacgtctttatatacgtgtgtgtacgcgcgtatgtggtctggagaatccgtggagtttaaatcgaagtagtaacgactgccagacgcatatgcgtgcaccagtatgcgtgcgcgtacttgcaccatattcgagcttgtacgtccacatgtgcgtgcaacggttcatgcgaatgtcgctgtacaagcatacattttcatatagtcatttggaagcattcgtggacaggtgccgctatggtggggtgtcggttactgctccagtcccccgtaaaccgtcgtttttttggggcttgtttactgtggaagaatacgggcagatcatttggcatttattgtgcatgaaattgcgcata

SEQ ID NO: 3948 - DNA, 2809 bp, Toxoplasma gondii
  source 1..2809: mol_type = genomic DNA
gttgcggaaactgtgttcctactcgatcctcggcactcttttcatggggaaagcacggacagcgtccgcgaaggcctgcagcgcggtctccgcaacgagtgcctctaaaatgaggcacctgtgtggtgctttctgttactcttttgtgggatgcgtctgtgtgtgcactacgccgcgcccggaggaagtcgtttctggccccccagtccgggcgactcctgtcctggcgttcgtattattcttcagttgtctttgtccgttgtcgtggaagagactatgcaacgcagaacaaaggcgcgttctccgttcgtcggagagattctgccgggaagttacaacgcctgccggctcacgagattcgtacatcaagtggagacaaattcgggaggtacaaccaagaagctgtcacggaaataccaccgcgtaaaaagtgtgtgtttgtcgaatatttctccaatatttacaagaaccagagccctacttgatctttttaaatactaacccaaaacacggaacaacacaccgtggcttccggggctgtgcgaacgcagccgagaaatgactcgcacacgaatgcagctcacgctgctgctccaagtttccccgttccacgaggaacgtctctcgctccccgaaacagaaagtgatgataaaaagagttgaaagaatggctctagccacagcccttgttgagctgccttcggtggtcaatctatgatcttagccagtctcagaatacgaggagcgagatggcccgacgcttagaccctgagcacctctacatcccttgaatcgtccctggattgcaaagcagttgtccacagaaaagatctgctgttgcaggaaactgaaagtcgacacttttcggccagagtgctcgacgactccggtctttacgaaccgtctgggtcgtcaaaagaaaggagagaaactggattcgtggtgaaggcagccgtgtgtgagggtgcctcgagggagtatctccacgaaagggattcttatcctttagctgcgaggtcttctcgccccatcagaccagcgtcgccgtctgtctggtcgtacattggagaaactactgagtataaataaaaacagccacccttcgtgtgcgttactaactgcagtatgtgtgcccatactagagaacctggaatagaaatacaacccatagctaagatcatagctagaccatgtattgtaattatcacattataagtagatattgtctctgtacaaatgatccgctgcacctcagtcacgaaggttccagaccaacataaaggcagaaaacactagccctgtgtaggcgccggtcctcgaagccgtgtcaacagaacagaacttggactcggtaaccaaaaacgtgaaagatctacaccaggaggccaacttgtttcgacgaagacgctgtcgcttctgtgtttccagtaagccgcgagaaaatgcacggcgaaggcacaccttttcctcttggtccgcatcctcctgaatgtaacggtagaagcgaaaagcaaatgactctttaactcttaaaatgaacggccaaggatggtccgactgttcctgtaatttcaataaaacgcatcttctctccacgaagcgtggcgttgtgtttcggagctctaggaaaaagtcctcttgttctccgtggttaaagctcgtggcgcgtgggtctgaacgttggtgacaccagctaggattcccctccccgagtccttgattgttctcgcttcgatgccgccatattctcgtcgagttcctgacaggattcagagctcgaatccctccgtccaatttccgaaacagccatccacacagactcgagaactgagtctggctggggcgttgtacagacacgcagggtcacctgcggtctggcgcctgctgttcgcagcgagttgtttcacgacgagaacgtctgtgttggaccgaaaggcacgcattttagtgcgagtcgctcggccatcggcaagacgcgacacacgtctgacaggaattcctcaatttggaacctctgttgctttttttccggtagaccgaccacccgacgtcagtcgcgggatatacgagagaggctgcggctgcgactgcagcgccagggtcaccctttttccggaggaacagagctccttcttgcggaaaacacagacgatttcctccactttctcctaaacaaagaacagagaaactatgagccgattaccactccgcattcctcgtgcggggcacttggctttttctcgtctcggcgcacaccgtcctcgacgaccgcacacagcgaccgagactgccgacttacgaaaagattcccccttcagaacgaaggcccgcggctgcttctactcgcagacgcttcgatgcagagaaggcgagctttccgctgttcttcggcgatcctcttttcagggacatctagcccaggctcgttttctgccgactttttcccttgcgtttttgtgaaagagcaacacaacgagcacgcgtggacgaggtcgctgcattcagcgcaaaaaggttccttctgcttccttctgtttcctccgtcgttgtctgtcaactggaaaggtcctctcgggtcaggctccgagtctgtttgtgtgtttccccaagaaggactctcccgcggctcctttttttcgcctgtgtgctgcctcgctgctcgaggcaaagtccaagcatcgagctgtcgaactgcttctgtgcttctctctcgccatccacttcatcagagcctgaacgggcgcccctggatttcctcgagaccgccacccacttgcaagtttcgttgcttctccacgaaactcgaaga

SEQ ID NO: 3949 - DNA, 1643 bp, Toxoplasma gondii
  source 1..1643: mol_type = genomic DNA
ggtggtatccatacgatcgtaaaagagagtgcctgtaagttgaactgtagcggggtttgtaggatcgcgctgtgatccctccatccatttagtccgtttgctacggggtgaatggtttcaggaaatgtcgggattcggaagcaggcgcagcagggcacgcagtgtgcgtaccgaatcggacagaacattgcgcggaaatgccggcggctaggaatatctcaggtggaaatcaagtttagacgcatcatgcgagtgaaccaacttctccaggctttcactgctcatgggctgggagtcactgcaattgctcacgagccgagattgcccaaatgcggtcaaaatgcgacgaaacccagaaagagaagacgcgtgtgactgacacgaatgcaagaggcaggcaaggatgttttgtggacagccttgatctgtcactttttcgtcttcctacgtcaggaacagtcatctgcacgcgtaagggccacggcacggagcatctttggaaaaccactctgagaattcatgtgcctagtatctggtggacttccaggggtggtggaacgtcgtactcttctgcagtgaccagtaaatttgtagggtgcagcgaactgagaacagagcgtacatgactctgcaggtgacgcgatgcgtgcagtccccgttcaagttggagggaatttagagtgaacgtagcttgcgttgtttgctacctgaacagatgactttgaatcatacccctcgcttggttgagcggcgaacaccggaaaaatttgggaatatcatgaggcctttttcttcaacttctggctctgaccacgatgcatgggcacacaacacagtagcgacttatagaattaacagcaactcatgccgcaatatctgtccgttagtctagtgacactatctgatgcggtaacgcatagtcaccaagaccagtctaccatgcgatagttttcgctttgggaatgagtctgaaagagccaactcttcagacggaaataagacacgaagtcagaaaccaagcatgcttgaaacgcctactgtcaaccgaccgtcaggagatggctccagagaataacggaaatgtcataaatgctttggcagacagcgccctgtcaccacgacttctctaacgtatgaacgtagcatcaggaaacacagtatctacgctgtcaaaagcgataacgctttagattggtacagagccttttttggcaggttgggacttctctggataaaagttcttcattcttcgtccgctggtcatttttgtgacgacacactgcttttaatccgcatttgctgtgttagtatactcgtgagacgaccatattcagtcggccccataactgtagagtctgagcccgctggcgtgaccgctcaaaaattatggatacgcaatggcagagctcaagcatctgcctggatgtggaacccggagatgtcgcagtgtttagcgacaatggaatggcggcaactgcttcgccatgggaagtgtaaaactggcatcatgagcatgcagctgcggacaccgaaaactattataaggctgtagtcctttgctggaaaaagacaaggcgaagacattgtcttttgctcggtactgatacatttcttccgaaaacatcgacagtatgcatcaccga

SEQ ID NO: 3950 - DNA, 1829 bp, Toxoplasma gondii
  source 1..1829: mol_type = genomic DNA
ttgctgaagagaaaaactgaaactccctggagccagaagacactcctcccgatcagagaggcgaggataagacgtaagatgtccttttgcggccgtcaacacagacgccaccgaaggcaatgcaccagaggtaaaccctgcaaaactgtaacttgccgttggctcgaccagtagttcatgcatacgctgtcggggccgggacacaaagaaatcgtcattggcgtccgcttgtaggtcgcccgcagcgacgcttgtgaaaggtgcaacatcccccaccggtactgctgcaagaacagagctgagtggttccccatcgatggtgtccttccttgctggtacagtgtcaagatccacggttccacctacactgtccacagatgtccattgatcccggacggctaagtcggttggtattggctgaatgccgccgggtgactttcgtctttgtgcagtctgaccggtgccacggtcggctgctgtttgaaccccggtgtgaaactgcgaatcactccacttcaacagggcaggccctactggttttcctgccatggaagagagggaagaccgccccaacctcgaaaatctcacacggctggaacttgcgtcgaacatggtgacgtcatgggagattggacgagaggaaggtgatcccgttgtgaccacggactacgcggagacccactcatgagtggggaaaacgcaagacagaccagaaacagaaactgtgtctgtgtgtacctcaaggctatcccaggagctggaggcttaatgaataccgcagactggcgcaaggctggccaccaaaccgagataagtacagaaaacccgtggtgaagtggggtatccatttgacactcccgatatgatcatgcacaaacctgactcggtaggccagattttgaggaaaaaacggaaaaacacagacggcgacactggccaacaagaatggacaagatctgctcggcgtgcacgtatgttttgacgcttgcctctacgggatccgggctgaaggtggtgttagggatgactaccacgtcaggaccagcaccagcccatcgtggaaatagcaagaccgctaaaaatgtgatttccacttaatatgcgtcctcgaaagaacttatcccgtctttactgaccaggacgttcatcctgcgttgccagctgagatgctgcacatgcagagttggcagccgcatgaaaaaaggcgagaggaagacacagctcgctacatgccgccagactgaagacatctaatcgggggccgctacctggtgttgaggacaagaaaagagtgctgcatcgatgaggccctaacaaatagggcatcatccttcagtgcttcaaacccttccttttaccaatatttttgtccttttcactgttgctgcctttcttggcgtgccggttcaagtctgtcgctcgagttgtctctgtgtcccgccgaggggatatcttcgctcgcacgagcaagacactcgcgttgcggctcaaattgtagctgcagcattcagagctccgcgcaactttacgctgtgctaaagggttatcttttgtgagcacttccgctagcctgcagtttgagacattttgactggctggttaaccgtgaaggcgtcagtaccagctctattaacaccagccaacgattcatcgtgtagcagtcatcgtaaactcggaggactgtgatcctcgttgagcctgcttcatccttttccctgtgcaactccacttgtactttctcactgtgtttactgactgcctgggttccagtggtccaaaattcgctttctgtttgccacattccccagatcctcgccgacctgcaccca

SEQ ID NO: 3951 - DNA, 701 bp, Toxoplasma gondii
  source 1..701: mol_type = genomic DNA
tgaatgcatttacagagatgtatacatccaagggctctgtcaagcgacaagcatacgagcctggttgtctgtgtctcgtaactctgtctgtttcgtcgacgaacgaggctggaggtctgagttgcggagcgactgtccagcaacgtaccgaggaagagactcgtgagaggaaggctgacaccgacacggcagacgttccgcgtatgcacaggcgtctcgggcatcacgactgtgggcgcatgcacaactttcgtctcgaagtagacctgcccagatcctcgaactccgtacgttgaccgaatccccttccaggtgtactgacacccgttcgtgtgcatgcaagacgcgctcaaccctgtggaggcgtcgacttccaggtccaagtgggcgtccgccgcgtcgagtcgcaccgggaaaagtgagaaagaggaagaagaagaggaagaagaacaggaagaagaagaggaagaagaggaagaagaggaagaagtagaagaggacttagagggaaggtcgtagacgatgggaggaggcgggccgcgttcctccgcggcaggcggggcagctcggtatggcggggcttgcatggttgcgagagggaagaaggacgttggaattttttcgcggaacgttcatgcattattcgccgaaaaggcgcctttggagcggtttttgttcgcgaactggatggctagaaggga

SEQ ID NO: 3952 - DNA, 4718 bp, Toxoplasma gondii
  source 1..4718: mol_type = genomic DNA
gtcgaagccttgctcgtatgatcccggaacatcgcttcgctgttcctcgcaggcctgctgggccggcgtcacggctggaaaggcctcgtcttctcgcggttgcgccgagaccgagggcgcgtagatctttttgagttggtagactgcgaagaagtcgaggacgaggaaggccagacccgctgcagctaacaggaacggcgcggaggagagaaaggagacgagcacagaccaaggaacagccatcgtgagagacgctcccgccccccacaaacttccgttcagggggaggtcctccagtctcgcatcgaggagaggacgggaaccacagaaatctctgaaagaagaactcagccaccagccagccgacaactcacgacttcacacacatgtacatctccagatgtttaccgaggtctacagatgccatattagctgttgttgaaagctcgaagacgttttgagacatagacacgcacagaactcgatgcagagacactcatacagactggtcgagagatcgcaagacagagacggagacgaacggatacccttccggttgcatctgcaggctgtacgagtggaggagcagctgagagttctggaagaactggcgagaagtgacggcgtcgcggcgcctcggcaaagcagaggcgtcaacgagacgaaacgcccgacgttcggccccgtcaacaggtaagcaaagacgaggcgaaagccgcgggacgcgaagcctccagaacgtccgagaaacgcgagagaagagagacaacaccgcgagtctctgaggcggcgctcttcctcgacagtcggcagggagcagaagtcgagagccttgcgtcttcagccgtgaaagcttcaacgcccatctcaaacgcgaccgaggaaagtcttgcggctttctctgttgcacggagatggcgcaagagttgccggtcaaaacggcctcgggaacggagagaggcagtgcccagagaggagatgccgacgaagacgcaactgtttctcctgccttttcttggagcatgcagcaaggctgtgttgtggtgtgttctcttttctgccccttaacaaattgagggaaggaacagaagcgaaaggggagggagagaactgaaagaagagacggggaagtaggagagagaggcgaggcggcggtgagttcggcgcagagtgtgcgacgagaaagccggaacaagtattttttcagggactcggcttctctagtttttgtgcgaagagacgacttcgcagtctttgctttcgcgcctgtttacagactgcggaaaagaaagaaaagcggacagcatgcagagcgtgagcggaagttccggtctcgctttttcctcgcgcatgcagtcgcacaccaaggacacaacgggggagacgaaatgactgcgagtaagagacacgaagcacggcagaaggaaagagaaaacgcagacaacaaaggcaggcagcctctcgctttctcggtgtttgaagcagcaaagagcgtaggcgtctttggtgaaggacgcgactgcttgctcgtacgcaagaggagagaagtctggacagcggacgctagctactgtcgatctcagggactctgcgtttgaactcgaagcagcagaaactacaggagctccagttgtagagaagatacaaagaaaagcgcgctgtttcggtggagctcgggaatcctcgacgctggttgcatgtcgagtggcggcgagctgtatgtacagacacccgaacaggcggaggcgacgaagcggagggcttatctggggtgtatgtacacccgaaaacagacgaaaaatgcacacaaggtgggatgcgaagtcgcgtttcacactttgttattgtctgcctctctttctcactcaacccgacttctcttgtctgtctctctgagtcgtttcctcctgtctggtgtcccccttcgtctgaacctcatctctgtctccggcgccttgagacgatgcctgcttcagctcctctctctgtgtcagaaaaagttttcgtctctctctgcgaggcatcccaagcgcctctctggcgagacccaagcttcctgcgaacgccagtgtgctttcgccttcggtgtgcgagtgtgtcggttcgtctcctcactctgtgactttctgtctgcagttctctgcgagaaaggcaagacgtggatcctcctcagtctcttccgagcgtcgcctcgaagacgaagagtcgcggctctgaggggtcagtccgcactgcagcgttcgtgagacgcgaaggaaggcgaaggaggcagctgcctctgggctggcttttttcagtatggcttctgagctttactgggattttccggacagacacgcgatcacttcacggctggttgccacccacttggcctttgaccacaagcgaaacaggaaacgaaaaagagcgcgaaacgtcaaaagaggacttggcgctttcacactgagggtcgccccttcacgagccacagacaagagaatccatccgagaaccgggtgcacatccacctcggaagagggattgcagatagaggaaacgcaggtcctgcgagtcgcgataagcgatcggctcctgcttcttcagtcttaaaaagagagcgtcgactcccacagagacacaacagacaacgcacgagaagacaccaagcctgctttttccacccctctgtttgtacagtagacttggcaaacactgtcaaggttgaggactagagagcgggagatgcaggtccagctcacctcggactttttgaacgaggatcgaatcaaacaagtgacatgtctagtgaggttgagggaggacaatcgagtgactccgtcgcgaggcgctctgaatttctcgaaactacctccccgcgcgaagaagagagacggacagacagaggagaagagacgggaggagcgacagagagcgagaaatgggatgcgcgcaagacagaaaaaaagagagatgagaaataagtatagggtgaaaaaagctgcagaaaaaagggtgggcagacacacaacgctggtttcttagacactagtgaagtttatctggcttctacaaactgcatgaggtcttggaatcgcgagaaagagtcagaagtgaggatctcggtcctgctgtctctgtcgcaaagaaattcgtccggcgagatttcgtgacctcaagactcttttctccttccctcccccgactctttcaatcctttcactttcagtgaaaacccagactgtttcttttcgtcattccatttcaatgggcctttctcccgctctttcctctctccgatgaaacgtcgaattcgtccttctccagtttcctcctcatgaatcgtctcatcttcactcccgcttcctcacctcgcttgccatcttcttgcttgtctccctctctcccctctcgtctctcttcttgtctcccttctctgccttcttctctctgctatcctctctctcctttcttctctccattcttctgagtctcctttcttctctctgttcttctctctctcggctttccgctcctcaccatgaagattcttctgttgtctgcatctctgcctctcttgcagttttctctctccccttcctgctcctctccgtctcccttcctctcgcagttctcgctctcttttgcttgtatattatgtttcactaattcatggcgaccgctggcctctctccaggcgtcttcttgtcacctgcgaaacgcatctgttcccgcagaaggtctcgcgccagcgcaggagagaactcgagagaacagaccggctctgaaaacgtactgagcttccaaaaaagaaacgttcgcaggggaggaagaagagagttgtctggcattgaagcactctgaaagcgttatttttatcgaaggttctcgaaactctctgcagttcacttcgagctcagcaattgtgtcttgagcagaaagctctcctcgtccgccccccgcggcgccgcctgtcccccccagttcgcgggctcctcgggtgtctggacaccctgcacaccgcgtttcccgcgcctctggaaaaagcgagaaaaaacgccggcgaatgccgtcactttgtgtgtggcttcgatgcagattcggggctttgaaaagaactttcttggaggcttcgaccttctcctctcatgcccataccgcctccggcgcccccagtgtgcactcaacctcaggggaaactgcacttcttcatctcgctttttttcgtcgctccttttctcccagccgctatccttttcttggaacctctccgctcgtcggttttctgtgtctgccattcttatccgccgaactggtaaattcaaacttgaagactcgcaggggctctggacgaccagcgagcctctgtctcccgtctcgcctgtctcgtccacacgagactcctctggcctctgcgtcctctctgtctgcttctctccttctttgtctgtttcgttcgttgtttctctctgtcttttttcttcctctgtcagtccctccctgtcttggtcctctccttcgctgatactggccatgtacatccgtaaagtactttcttcctttttccctgtgtgtcttcgcctcggcctgctgggcctttcttctcagcttctcttccttctttgaccaacttcgctttcctccttgacttgcttctcttccccctttgatctgctttccgtccctctcccgcatcgcttctgggcgaagagaaagaaggttcgcgatctgtctctttcgga

SEQ ID NO: 3953 - DNA, 3972 bp, Toxoplasma gondii
  source 1..3972: mol_type = genomic DNA
gtctcacaccaatttgcaaggtcgcctatgcaggcgcaaacgtaaatccagaagcatgtttcccatgatgtggaaatggctgggtctaggcaagacagaagctcatcaacatgcttctcgagattcatctatatatcaccagatgcacgaatacacactagtccacgtcttgtgagcagggagtgcagccacacaacgacgcgtgcagtggcatgctgtgctgtctggcttacttgtttctacaaccgacccgttgatactgcttgcatcgccgtcgtcgaataggcaatcagcggaacctcccgatgtactactccgtgttgtgtattttgtgtatttccccctggcactgccctcatcattttcagcttgacttcctgcctccaagtcgatatctacaaggtccgcaattgcggtttcgggctctccttccgcacccgagaaaaaccccttttcttgagaatctgtcgtttcggtctggccacatttctctagagaaaatgcgaggcatttgagctcggatcctatttctcctgaggtgctcatgtctgcacaaacccgctgagccgtcacttccattgctccttccgtcactttcaaagaaaaggccagttagaacgtcacctgcctttcccatggcaggtattttcgaacaaaagacagaaccttacacacgcggaaaacgcgacagaagaaaactttgacggcttttcgactgtcttcagagaacaaaaagggaacacgaatacgaacgcagatgaaaccgcgagccgaatgtgtcagtgctaaacccaggcggtgaatgcgactaaaggacgtttcgttctaagccgacgaaatgatggcaagcagagaccacccgaagaggcaacgcagactggctgcttcttctttcaacgaaaagaacaatattcggtatctgtgatatgttcgcacgtcggataagcaaatatacatatatatatgcacaaccaaaagaccgcaagttaaaagacgggatacgctcaccctcaaagcttatggccacgcgtcttcagatagcgaaaaaagttgcaatattttcgaacgagcaaatgaaataatggccgagcacacacatatgagcccgataatgcagtacagagcggaatccacacacggcttgggacgcgtatgttgcgtggaatatgtttattcctgcgactgcagataatgtaggaaaaacgtcagaagcatcggtgaaataagcctgcctgctatttttgtgaatggtgacgcgaggaaaagcgaaccacaaaaggcgtgtttctctccacacttcagcggcgggaaaaaacggaacacagaaccagccaagatagccttatgaatcgtgtttcatagagtggaaaaacgagaacacgtcgaaaaactgatggacataaaaaccttttgcaaaccttttgctgcaaaaagcaagagaaaaacacacaacaacacttttctaagtcgttttgtttgagccaaaggtcgcagtaaaacaagaaatgagctcttgtcggtcatcctcttcaaaaactcgaattccacggacgatgacgattcgtcaaaaaatctgaaaagctcaaaaacaggtcggatcgaccgagacgcagataacgtgattgtagaagccgcgcgaacgcgattgcccacacgagcagctggaaaccacatagccacgacgttcggtttcgggtaaccgatcctttgtcattcgtttcatccacgggcattgtgcatgaatgaaaacctcttagatggttatttgctgtgcgcagacgacttcgattgcaaggcagtaagacagtcgtaacgtgcggatggggcaatctacgcagaaacactacgtagtttgtctttcttcagatgctaagaccgtaaagactgtggtggcagccgtaacatgcgtcttcatagggatattccggcgactaggcataacaacgaaacgcgctcaccatatcaggagagcttcactggagctgtatgtggcctacggcagtgctacatgtccaccgcacatatttcacaagttgaggttggaatccgctgacccacatcccaaatcacattgtatatcgcggtggctagaggcgcactcaagacgccaacgatgctgctctactgctagaacctcttacagtgcactcgacgacttcctgtggcaacttaagccaatcgttgacatcgtgttaggtgtcagcacatcattaccgtttcatttgagcagtgtgaagagctcatcattttcattcaagtaggaccgatgagtgaatcagcgcttcgtcgatgccagctgaatcctggattcattttttcggggccagttttggctgtaacacgtaacaggcacgaggtcaattatgctgagatcagagcgaagaaatgcgtcgtgcccagtcggggttcagtgcagccgctctctttcaggaaaaagaattgtcaacgacccgttgcacctgttgtccgaacgaaagttggcgaactgacatctgtactgaggtgaagtagccagctgtaagggggggctttgaacaattgatcggcgtgtctctgtctccactggtctactttatgctcatacgagctataagctgatacttttcgtacagtatagtggctagtgagttttgtttgatacgccccaaaacatcccgtagttctctgttgaaagggcaatatatatatatatatatatatatatgagagagagagagagagcgtatctacctaaagagagtgccgacgttgctttgttacgaggtgcgagaagaccttgaccgagaaaactcgatggatttataaaccttataccatctacatatataaatataaatgttagctaatggtatatctgtagacgtttccagtgggaactggtcgttttccggacttatcttgcaacgagcgttcaatcggcgccctccgtagaaacgctgatcctcttcgtttgtaggagtacaggcgtctgcgggtgaagctaatggaaggatacttgggcgtgaaatacatttttctgtcgtgcttcactggaccaacagttccaccgcagcggcttctcgctctccgctaaacactcatgagcagctgcgttcaggtgaagcacgagatgcatgcatgcaccgcggcagacacacgcgaattcctcgcttcttactgtttttaactagtggaaccggtgctgtccttaaccaagaactctcacctgtccttcaccgccgctgtaactgtcactctttttttcgtctctcggttttccaacgccagtcatcggtctgtatggccgtgcattcgatccgtttgtctccgggcaaggatcgcttttccctctgtcgggcattcggattcggaggacgaagttctttgagttttttctcgaaagtgtctggctcctgatttccaaacgaaaaagtatccctctgggggttctttgggaaagacgctgcgcggcttcagagacacccaatttctcgtcttgcctgtctcaccaatttttgtcacggcgtattgttccagatccgctatgttgtcgtctctaagctacccccaaaactctttcactgcctcttcaccagcgttctggcgaaaagatcccgagaagctgtaaaccacaaccgagcgggaggaggacagttgtgtcggatgtatattatccacttttcaattcaatcgtctcgtcctacatctctcacgtacattgatacgctaaagtacacctctgcctggctgcgcatctgcagacgtataaacagacagatgcgcagctaactctgtctctctctctctccctatatatatatatatatatatatgtaggtatgtgaatgcgcacgtgttttcttctactttccagtagtgacctgaaacggtcctagggtggcgttttttttgttggcgtgtctctcacttctcctcggacctcgtttttttccggaatctcttgccctaagcgttcgtgacgcgtctcgagta

SEQ ID NO: 3954 - DNA, 2437 bp, Toxoplasma gondii
  source 1..2437: mol_type = genomic DNA
ctctagagttgcgcagtagaagatcaagacgtaaacgttccagaagaagtggagagagaaggtcccgaagaagaggaagcaggagaaaatccgccagacttggcctcgctgcaggacgaggttgtagttgatgtacagcgagaacggagacacgatctccaaggtgcacagcagcatcagcgctgttgagcagaacaagtaaaacctcgtcactggcggaagatgtgagaagaacaagtccacctgcgccatcttgcggaggaagcgaaaaacgaacagaaagagaggcagcggaggcgaccgcgaggaaagaaaaagacagaaacccggccgcaacgccgccgcgagagagatgcgtttgcggagacaaagagaaggacagttggagcagaaagaaccgaaacgagacagagaatggcgagacgaaagtgagagaagagagacgccgaggggggaaggcaggagaacagaggagagaaacaggagaaggtgaacaacgaaaagtcaagtggaagagacgaaagaaaagaagctggcaagagctcgtgcgacagacgaaataggaaaacgcgggtgaatctcacagaaaaggcagaaacggtcgtcgtgtctccgcatctgttcctcctcagcagaccgagtgaacgcgttcgcctctgaaccaagaaattccaggcgcgaaagcgccgcggatccgagaaagaagagtgatagacgatgacaagatacacgtggaaaaggggaagaaagagagaggcagttcttcatcgttcagcggaggcgcaccgaaaacagccattggcaacgacccagaactacaccccgaagaggaagaacaactggagaagagaagaaactccagcaaaaatgttgtccatcttgttccctcccttcttcttcttcctcttgttgttgttgtcctgtttgttgtccttcttctgcttcttcctgttctccgcgttctccctctctctcggttttcattcgtcgcttctgcgttctgtcgcgttgtgcctcacagggcgtcgtttcgcttcgtccagggagtcaagtgtagaactgcgcttcgtcttttggcggcaaaacatgagggaaagcggagaacttctgtcgcttcggccgccgagctgtcgactcctttcgagcgaagagcgtctccgcggcaacgcctcggtcgaccggttctctgtcttcctcgttttcgtctctttctgccgtttcctttttgttggtcgtgtctcggacaaagaagccaaggcggtcgacggtgttcgagggccagccgggagacgcgttccggcaaacacaaatacatgaaaagagttgcggaattctccgagcgaggaacggacaggaaggctgggctggccagcggggcactcagtgcacgaattgaactggctggtcaggtcgacttcgaacgcgagagttgagcgggagagagcgcggagaattttttgtttctttttcgaagacagccgcacacacacggagtcccccaagcgagacagagaaaggtgacaaacgctgtctgcttttgtgcgaagaaacgaacagctgagcgaatcgccgaggcgttgctactgcccgacggggacagagagaggaggggagagacggggagaacgctgtcattatacgaagagagaacgcaggaaacagacggcgcgcgtttgtgttttttcgtcgcgttgtcaactgttcgtctttttgcccttttccccccttttgctccctgtcttccctagaaaagacgccagcaagtgcctctcttcgccgaccgctctccccgggggaacggggtgggtcgctcctctttgcttctctccgtcacacttccccgtcgattttcgaggcttctctgtggcgacggtttcgacgttccgcgggaagtcttggctcgctgcggcctgtctcttgcccctctgcaaagtcggttttctctgcggcgctccggcaccctcttccctctctttgcggtacctctccccaggttttcttcgaatcaacctctgttctcccgtttctccccgccgcagtacgcatcgctaaacgactcccagtcgagtctcttccgtacactcttcgcagctgtcgcttcctaccgacaaggacgtccctatattgacacacacatatacacatatacatatatatatgcatacaaatagatgtgtacatatgtatgcatgtatgtgtgagagctgctctttctttcacctttctttctctttgtttcgcctctccagcaccatctgacgctctctcggcggtctgttcttttctgcgtcatctctcatctcttctgtgtatcccctgtcccctctttctctgcctctgactgacttacctcttccctcttctcgctctgtctcctctgcctctcttcttcgagttttttttcctcggtcctctcttttttccaactggaaggaaa

SEQ ID NO: 3955 - DNA, 3496 bp, Toxoplasma gondii
  source 1..3496: mol_type = genomic DNA
cctgcatccacgtcttgcgcaacatttcgcattatcgactcgattttggcgtcctggtttgcttctcaagaactgtagacaaagagtgcaaatgaagatccaatttccttccatcgctgttaagaaaatcgcgaacgaatcgttaactgagaaaaccgcctaccttcttaagcgcgccattgacgatatctgctgcagtacggtacttggtcacgacgtcaggattgctcagatcctggacgacttctgtctcaacttctgaaccagttgcgtctgccatggttgctatatccgacaaaattggaaaagaatgggagttctgcagactgtatttgccgagactgtcgacggccgatgcccgagttggttgtcgactgaatttcctgtgtaaaggagagcaggagaactctgaaggtatgaacaatcggcagaaaaaacacgggacatgcagcagaaaatggaactaaaggagggtaacgagcaggcggtgtgagcacgtacacacacacgagcgatggaaaaaacagaggattcgtccgaaaactgagcctggcagaatataccagggcactcgaaatccctaaaaataaaactccctgaaacaacgacaaacgtcagaactcctcctatacttattttcaacaatttactcggtgtgacaagtcgaatggtttcggtttgtcattttcacgtctcccccacaagaaactggaacgcaagacggacagggaagcgattgtctggaagagaactgggaaacgcctgcaaggacacgatgttcacgggactacgcgctgacaagatgactcttttagggagaaaaacagccgtttgaagcctttttctttgtgagtgcagttaacgacgcctacttttcgtccgggatacactagggaggggaccatgaatggcgcaacttcggctggcgccttctctttcttaaactgccacagaaaagagagataacggagagaagtaacgtttaaaggacgagagaggcattcagccggtcgcgatgtagcgcggcgaggactgaacaagaggaggggaaatgcgcagggggtctacttgagggcccgaagttcgcggtgacgaaagggagagcacatcggatccctcgaattacaggaaagtgtgtaggcgtgactgagaagaatatgtttgaatttactcacggtgacagagagaggacgacggaatacatgtttggacggacgtttggcatggaaaaatgtggctgtcacttgtctgaatcttgaaacgggggaattcctttggggggggacagagccaactcacctttttccgatatacacaactgcgcatccaccggtttcagcatgtcccgttaagagagcgcaggttcaaaaatggactgaagatggcggcgaagcccaaaaaaaccagagaaaatggtaaacaaagggtgtggccttacccgcacaggcccacacgtaacgccaggacgaagcagagtcgcatgtcctctgtacgcgtttaatgtcagattattcagctcgggttaagccgaccccccttccccccccacccttacccaaagcaccgcgatcgcatcctagatgcgtggagtctctgcaatcttgcatctgactcttcccgtttccggtttagccctctgcatgtgcatgtatgtactctgacctcttgactaccatcatttcaacatttacggcacacaaggaattttccaccttctcaccaggcggataacgctttcacgtcccagcaatttggggcgcatgtaacccgatgccgtctcagctgctcccgtcccgagagtaacagctttctagacggcaaactgatacaagcgtgttgcccggaaacatcgttgcagcaatagttacatggaggcctcttcgcacttttctagatggggaaagcaaatagataaacatccatacttctactgcgaagaacaggagtgttctcacaaacaagagcttatctgacgtttccaagaataactgcatacggagggttcttgtggggtcagtgtcgcccgcgacgaaacggattccgtgcgcgggtgtgcgatcacattgaaagcttttttgtctcagaacgcacttctaccccgttccattgaaacagtgtgctgctttatgttttgatgcgttcctctgagacggcagctcttctgttagcttgcccacccattacgctgcacacccagagttcgggtccagctcgcggcgccccagcctctctctgcgggcaggagctcttagctggcgtacaacgacaggatgaagccccggatcccaaaggaaaggccactgaatggcaattattttattgtgaactgcaaaactgagggccttttgtgcatgccagagagcacgcgagaagggagctcttttctagagtctctgttcactctaaaggccgctgtccgaaacgggggcggaagtacggtccgacacagcgcttcattgcagtacgtagcaccagcgatcagcattccacacgccaaaaccgcgatttccgtaactaggaggaagagaataaagttttagtgcagacgaaaaagacaccgatttgaggaagccgtttgtctcttgctagacacgttcgaatctatccggagctgacgaactcgctgaggaacacgtagggtccagtgctgctcttttcgccttaaacaccgagtacgcggaggcggctgcaacgccgtcttgaccctgggctggttccgtatttcgtcccttttttcggttacgaaaccaacgtatccgcgttacccatttcctctccacagaagaaagactaaatccacttcggttcccgtatcgggcgtcattttcacctgcttcactgttggcggcgtacggtttttttccttcccatcagactgggtttgggattccgtagaactcgttgaaagttcacaagcattccctggagccagaccagagaagattcggtgattctatttttggtttgcccaccgagaaacgcgtcgtgctcgtcccagtgttgaggaaagaaggcgtgcttcgcacccggcagagtctcgaagcagcaccggaaaccgtgttgcggacgttctgctgctgagtaaaggggcccgctccctagtccacaaccgaatagataacagtacacgtcctcgagataaggtactttgatgaaagtggcctggcccactggtggcatgttctgcgccaggaggctctttgtgccgaggatctgcgcgtgcgtctgaggtgctccagtttaggtcattcgccgtcgcgctttagacctagcgtcgctttttcgaactcgaggatttcccttgaatggagataatcgtcccggaagtgtgacggctgtgtaggtctccagttattaaggacattttcgcccaccttggcaacgcgaatctgtgacacctctagaaacccccccacgctcttttaccaatcgactagctcttagcaggttcgagttgtttggaggacatcaaccacacaaaaccacctttcaacga

SEQ ID NO: 3956 - DNA, 2948 bp, Toxoplasma gondii
  source 1..2948: mol_type = genomic DNA
caatgagacatggtaactgatgacggacaccgtgtagtgagcagtgcccatgtgctcgctgtttttgtctttgttttctgaaaactgctcagccctgcggctgatgcgcaccgatattgcgtgttattgcccaataaaatttcaacggacgtgaaacctaaacgcaaagagatgtttaattgacctacaaaagagcttgctggccagttatcgtgcagaaggtgtgcgcgcactttaggcaaaacgcgtgtcacatttggtagccgaaatggattctcacgcttgaaccagctcttcggcaaaagtcggtagagttcgcgtacgtggagaatagcgacagagaaagcattgaataggtgtcttggcactgcgtcgtttttaccataagaaagtcgtgggagagggacagatccattaacagaacctacgttagtcgggaaatgcgaccagagtcacgtacccgcttagacagaacacgaggatttgacagaattgtactgagaactagtccacgaaactccaattggcgtggtataccactcgatgctgcactaacgccgatcgcgaagcatagttttaaagagatgagtctgttgcatgtgcgtcagaagtcgctccgtaacaaggcattggtgaagtaataggcttcctatgccttccaatagtgagaggttaccggacagccagtttgtcagtaacttcatattgaagctgaacggtgttttctagccgactataccctgctactattttcgtcccaaaccagttttaagtatttgcgtcatcacagcgtttttcattcgaggtgtggtgccatacgtgttctagtatggtatatgtatcctggaggtgtcgaacgtcaagcgatggcgcgcccgcaggaagcggtcatgacatcgtttggctgaagccagttaaagtgctgtcgacgccacctgcggacgccaggaatgcaaaaaatattgagaacggaaatagaagtggacacagatacttaaaatcacagaatttataacgaaggtacggccgtcgctatgtatggccctcgccgttgccacatccggttagttctgtgtagacactgcgttccacggtattttgaggttgatccgtgaagatccttcagcaaagaatgattttgtgacagggagaccaacacttcgggggaccttgtaaaaacacgcggtttgcttgcagcagatgacatcgtagaggagttgctaccgaacgttcgaggagtctgtgcaatcccgcagagacgccagtcatctaatggagcggcattcgctcaaagcgaagccagaactgcgttaggaattccgtgacagataatcacgtatttgaacgcatgctggaaaaatgacgctgctttgtccgtgggtgttggccatccgcgcgcacgtgtacatcaagctacagacggaagcaccagtcattttcagtattaatgttacggctgtccaactgaagtatcaataactatggaaagggtttgcgtaacacactagcaaaacgagtaagatgtcttttatactgaagagtacactggctttcgcccgctagtctccagttacggctgccaagacactccagcggctgggaaaaaatattcctaacacctaccgaggatctgtttcatggggcacctcgtttgtctcgtgtgtgatactatcttgtcatttgcgtgatcgttcaaagtctgtcttgtccgaaaccaccgatcagaagccgtgcatcattctcttccagtgttgccttgtgcgagcgctgcttctcggtcaccgggtcccgggcccaccttccctgtcaagtgtgccggagcaccaaggcatgaaacgccactgtgagtttgtgttggtcacgaattttgtcacctttctgtgcatccaacttgatgctgcgctgcagttcattttcactatcagagccagctcagtgacgaactggaaagtctgctgttgcatttgggacactcctccaatccgtatcgtcagctaatccggtgctggactgtggaggcgggcaacttttacacagcagttttacttctctttttcacgagtgcgcgtgaatgcaagaatcgggagcaaagctgtttcgagcctaactattctggcattgtcgacaattcgcttttcacgatcgtgtacccgcgtgtgtgctcggcgcatcggacaaactctgttcaacggagtgcagcgtctgcatccatttcgtatctgaatcaatgactggcggaactggcgttatgtggtgttgccctgcaagggaaaaatgaatctgatttcaaatttttgcgggtgaaattgactcttcgcaagcaacatacgaaaacgcgtgtctgtgtctcctctgcgtgcgttcatttacttttccccgacgcatcacgttctttcaacgggactagtttgttatttggtcggcaacaggttttgacacttgtggacatccgccgtgcgagtgtgagcacctcctccaaaccgagcgtgcgtagaactctgcatcgttttgtcgggttcaatttgtctgctttatggagtttttcatcgtctttgcggggagcaaatagcggagccagaacggaggctccttttgatgtctttttctccagctgatcgaatgctgagtgtcaccagcagaactcatgtgccagggtgtcgtctaatcagaaagggaacgagaggctcctagatatttgtttctcaaaagttgtgtccgtggaagtattggaattgaagatcctacgacatcaaggttactccaactcggtcgtgtcctgaatctgaaagtgttgaattccaagatcctgcggcttaaggttgttacgcagggtggctgtcgtgtctacgctgcagctccagtgtagataccagcagaatcgaacttggagccgatatttttctgttcgtgtaggtgcagcgggtagcgtcgagtgcctcagtagacaa

SEQ ID NO: 3957 - DNA, 4079 bp, Toxoplasma gondii
  source 1..4079: mol_type = genomic DNA
gccttaaatagaaaaaggagagtgaggagcaaccactagatgtaagagaggtagctcgacgaggttcgcggaaaaggaggaaggcaacgcctatcaaaggacagagcacggaaaggatgacgcaagaggacgccgggacatgcgaacatttgttcccccgttagttccggcgggaagaaaaattttggtgtttcttcagaatgaaacaaccaaagcaggggactgaatgtggcaatatactcaggacacaaggggcagagcatagaacggtaaaaggaccgaggcaactttccttgccgggaaatttagctccgtgctacgacatgcgatacgtcaacttctaaggcgcacggaagactccggttggacatgcatttccgaagggtcttgccgacgacgcgagcgatgaattgggaagagatgcacaggaagagcctgggcacatcagagaaagaaagtcgtgattctcatcaaaaaagtctgagaaactctggaaaggacgctacgactcagtgtttctctccggactagccgtcgtctttctcccaagatggaaggaacccgagctgtgccagcgagtcacctttttcatcgtgcagacatatagcaattcaatgcgactttccgtctttttccccctcctatcccgtaccttccttgattgctctgtcaaactgcaggacgtcagcggtacggagtgacctcatcgtcggttgagactttgactgccaaaactacgagggaacgtaaccagcagcaagggttcgccgccgcgtggaatagctggcgccagtgcagagcacagcgaaaatttcgtcgggcaaagaaatgggatacagacgggaaaatgagcatgtgcaagggtgtaggcgcgttcgggtggcatgctttcgcaccatgactctcgtgaacactctagagggaaccggggcaatgaatactgacgagtgaagcggaaagaacgcgacgagttaacttttttccgtcaggaaggggctggaaaactctccagaaagtggtaagatggtgttgcaaaaaagacgaatccaagatgacttccgcgctaactgaccagggatttgcatgaggtcacgtccagttggcccccgctcctctgtagctgtcgcgaacagcgcacacgaatgccacggttgctgcagacgcgcgaaaagtgacggatgctgaaatacaatcgccagacactgatcttcgtgtaaaggaggcaatgaacacgcaaagaacgcagctaaggcggagcctggattttctccgagcaagaaaactgctcacaaacatattagttgcctggccagcttgtgccctggcgcatcgcgtctcttccgcccgcgggtcagtgtgtgaccttatttactgaggtgtacgaagagacaatttgtgagaccctgagggagaaagcgttgcctcatttcggcaagttccgcccaaatatctcgtttcctgtcatatgtcaggcagagagcgtttccattacaacaaacgttttccttcccgatgctgcaagctctttcgtagcatcccattctgtgactaattatgttgtaggaagccgcgcttcccgttaagcaactccgatttttgctccggggcgttagacagggtcacgctagttccgtgggaggaacattgtgtcactacatcgttgttcgtggccgggcgaagcacagagggaataactgaaaccctccctcttctgtttgccgtccagcaacctgtgtctagacaggtcaacggttcaaagacaacacgtgttccctggtccagagccgaggaggcacaggagtgaggccctcttcttcatcaacggcacgtcaaataacgttccttatctgtagtccatgtagtgcagggtagccagaaaaaaagtccgggactgtgaatgcggctcatgcggaaagatatgggatggtcggtcggaggcaagccgctcgagatcttcagcgcttctacgtttatacaacagaaactttccatctccatgcatgagacgagattcttttgggcgaacaactacgcacctgtgaatctcttcggcctcctgtattaacgcaaaacgatctgcacagctctgatattgccaccacaatggctgcaacttcttcacactcacaccctgtcccctgtccttgtggatatgtgtctaaatgacctttcacgttgtgccatcattgcactgagtcctcgaacggcgcgtttgcagactcgcgtccagaagacttctgaccgaacggtaaacactcgcgacccgtcgcactgttctgtcacagtggttgctggaacacacaaatgtggtacacatgatgaacaacggaatatccagttaccggagcagcggtcggttgaattgaaccccacactcttgattgctgcctgctacaaccgggaaggggttcactctgaagcttgaaaccaccgtatagacttcttgagaaatgcgcatccagtgggcacacaggaaaataacatcccttcggggcatactgaactagacagtttcatcagacatggggccctcgtctgcacaagaatcgctttcacacacgtctcacattcacacaggaacattgtatagagcacgttcgaatatctcagccaaaaatgtgtacgttcagggaagctgggttttcaagcatcaatgaagatctgctgttccgatgcaacagatcattcaggcgacgggaggaggggagggatgatttacagagatttgtgcttggaaaatattaagtttgggctcgatgccttgactctggaaggtgttttctggctcagacgaagccctttcctctcgcacatccgtcacttaattgaaccaagctgcggcgcagaggagggccaaggggagacgcttggaaaagccaccctccgaagaggcggcaacaggcgattggcttaccttcaccggccctgaataatatcgaatcctatatgagaaccatgacgtatctgtcagagatcaggaatcatcaactgaaatgaccatgcaggatgccgggcatcagtagttgaccgatccgtcagtgccgtgcatgccagtgataacgaaaactgcgacatctacggagtcagcaaatgtgccggccgctttaccgtgatgttgcctcaaatatctcttgcggcagaaaatcagcgtgtaacataaaaggtatgctgaagctaagcaagtaccgagcaaaatgttaagagtaactgcgagcggagcctcacgcgtcttacgcgcgaacgacgtgcataagcggacggcgcgacgacacggtctacagatcagaagcgaattgacttctagaattgctgtctgcggcagttatgcgaaaaattccaaatgtgtgcgaccaaatgtgtgtgcgatacaagcaaggtggttctgctctggagcaggcttgtacagtggcagggaaaacgtgacttgttaccatgctcacaatttgaaaatattaccagacacatcgtgactgcacgtacgcgtgcgctgattggtgtaaatttcttgtcataacaatcatcatattttccaggtagctttctgcagcttcacaggcagtttacgaatcgaatatttcaagcgccattcaggcccatctataagggagtgaccgcgcggcgagccgtcagcacgcggcgtacgcgtctctacgtcgctggagttaattcgtcttgcgctaggatgtttgttaaagctgccattgattagtcatcgtactatgcgttgtcaagcttgaatatgcactgcctgttgtactgcgtagattatgagttaccctatgcgtggacttggactgcgcagtcctagaaacaaatgatacccggatgctgaactgaacgtgttcgcctatcaaaatgatatttgcatgacagacactaaaactcagctaaatgtgatccttggttcgtcgttttgttttgttccctatggggtatcgacaaagcgcttgacgaaacgcagggccgaatgccctgatttgaaccctctgagcttgatctggccctcaacaaacatgaggtgctgagaaggcttttgagcgctgtgtcctgccttcatggtggattgttgattatcaaaa

SEQ ID NO: 3958 - DNA, 1710 bp, Toxoplasma gondii
  source 1..1710: mol_type = genomic DNA
cacggctaactgattggagtcctctgtttctgtgaattgagattctttcctccgactccttggaagccgcgcttttgtgtcaaccgcgcgttggtgcgccacgtcgcacagaaggccacaacaccttagaatacgttatgtggtccctagcagcagtgcgagcctactagcgggacgtttgcgtccttctggagattcagagtccctgggtcttttcggtgttattcagaaatcaattcgattccgaagtgaccagccacacaccaacagcacacgctcaaaatttgcgacttcctagtacatttcaaaaccataaaggaagtgccaacgagacacctaggagggttcccatacacttagatatgttgtatcctcctgtttatacacacacgtctgtctacatacatatagatgtatatggtaaaaagttgtaagaagcaatagcgcatgtctatgctctttcactggcatgttgcaaaacccaggataagctgcagtcactgattcgaataagcctcactcgagctttcagcccgagtgttcgacgttagcaaacaaaattaacaaatgtctagcatccagccataaagaaacatgtgctccggtatttcgggtattgcctgtgctaaaagtctgggaatctgcgtgaaacacagaaatgacatctagggctttcttcttgatacagcattggccaaaaaatgtctgcgcaaaaattcgttcacaacgagctccccagaaagccctcattcgtgacgtggaagcctatctctggcactagcagacaactgcgtactctcttacaagcttggattcttgagatgttttcgaacatgtggggaggatccagaagtgcaagcactcgtgagaaacgcgagtctgaaatgtctttgtctgccttcatagtctgttggtaagtctcttggaaatttccattctgtaaaacaagtgccccccgcactgtcctgcccctggctgcaatgtctgtgaaaagtgcgtttgtaaacagcggaactggatacgtctcctagtacgtgacactgtaaatagactaaagcagtttagatgtccgtatcctatctgttctgctcagtcaagcaagcgtaaatgcgtttatagttggcagattttctgcggagctgtcggaggctgacgaagtagctcctttcgaaagcaaatggggttaaccccacttttagatacttaccgaggcgaaagttattcttaaccaaagattgatacgagttgacaaaaaagtaatcaaaacccgatgtcttctcaacaaaaaataacaagggcaataccttgtgggagacctgactctcacaccgcggtccgtgtcagcgcaccgtagcgcaaatggatgcgtaaagttcttttccgaattccaacagggaagcctatcagctgttgaaagagtttaactaacgttgacacgcttcactccattatatgttgttcaggcaaaaagaggagtttctcaactcactttgattccttgtcgtcgcaccggcagtgtcgctttgagggacccttttcgtacgtcgagcatgtgtttttcttctttacccagtgcaaacattttctaacctcaatcttcaatcgtttctctcgcaaatttcccgtgcgaaacttccgttttcggcattcttttggcgtctgtcgtctctagatccacttgtctcagaactgcgggcaatcaatcaccca

SEQ ID NO: 3959 - DNA, 1786 bp, Toxoplasma gondii
  source 1..1786: mol_type = genomic DNA
ctgtgtgaagtcttttagtctgatcctcttccgtcgcatggcacatctcacacgcagctacattggactgacccccgggcaacctttgagcagtgctccataactggtgaggtgtgcaaacatccgcagctggtcgagtggaggatgggctgttctgggtcatataaacgtagcttcggagaccggctaagctggataccactcttcaaggagacgttcaaaatggtgttcacggattcagctcctcctgtcacatgcttcaggatgcgaagaacggacatcgaggcgccattttttcatcactgggtcagatcgttctgcagacttctgctgctgttttaacgtacccgtcaacaaagagactgtcggcatatatcgttttactactgcagcacgagcgcgccgccagaaaacagacaccctacctcaaggacccttcggagaaagcgttgacggtggagacactggagctcgctctcccactgcagacgcgccatgacctttgaaactcctggatgcacttccttggcaagttctgctccttcagccttttttcgctctgcatctcccgactgcagcgaagatacaggtcccccctgaccgtcgagaggcgccgcaccggacagcgacggtccacctgactgagcagatgaagggggagaagaagaaggagggagaggagaagaagacgggagagacgaagaagggagaggaggagaagaagggagaggagacgaagagagaggagaagcagcagaagggagaggagacgaagaagggagaggagaagaagaagtgagagaagcagcagaagggagaggagaagcagcagaaaggagagaagaagaagggagaggagaagaagaaggagcaggaatagactgaagcggctcagttgaaagagcctgatttgtctcccctgcacgagcgacggcactgaagtcttccatcattttttcagaggaggagagagaggaccggggaaacgacacagaaaaaaaagacgagtaagaaaaaacttcgcaggtaacaagaaggccggcaggaaagaggagggaaagaagtgccctgagtgagagaaaagaactcgaagcatgtggagaaaggacggtgtccgtcgggagacgaagcagaaagcgagagcaggagatgagaaaagagagacaaaaaatgccgataaagatgttaagggatcgacaagcgttgagtcgcacgagagatgctaagaaaccattcagatgcagagaatctacgacagcgcagagcgcctaagcctcatgcgcgaccttcagaaaaaggccggcaaagtcaactcactgagaaaaaacgacttttttccgctttaaaaaactgaagccatcgaactgtcccggccgaagtcagtaaaggagaaccgtattgaccagacttgcgaggtctggcatacctccgtcgcctttgggtgagttttctcgctctcacactccacagtgtcttctctctgtgactcttgcctgcgtctcgtcgcttccttcgagttcccatctctttctccgtttctctgtatccttttgaacgctccgaatttccgcgtttctctccgcctttccgttcttttcttgtctatcagtctccttcatctcactcgccgtctctgcctgtgtctctgtttcttcttctcttgttctcaccgtttccttcgtacttgtttctttgcgttccgccgttctcttctgcagacaaagtcaattagcgccaagcgttgcggcctgacgactcgggcagaatgcttcttgctggcgatcca

SEQ ID NO: 3960 - DNA, 2879 bp, Toxoplasma gondii
  source 1..2879: mol_type = genomic DNA
cactgacaagccaagagccagtcacggatcgaggatttggaatccggagagacttttccccgttcgtgttccggatcatccccccgggagcacgatgcattttgaccgtttctgctggaagaccggtcagagatttttcagtgtcctctttttgctggttcgtgacacgtacctcattggagagagcaaggagtgcatcagagaaatccgtttcgttcgcaagaccctttgcggcaagaatgctgccacgatcttcttccgcgatggagtctgaccgcgacactgccgctgacacgccggttgagagccgtctggcaggctcctttgcctcaaccactttttcttctgctgaggctctccgatgagaatctcttctctcagccctgaccttggcggtgacagatccacgcggtgcgccaggactggtcggcgcacccggaaacaaacttttccggatgtcgtacattgctgccgttctttagaaaggctctgtggtcaaacaagcctgtcgccccctgcaggttcacctcagaagccgcgcggtgacgctctgccctcgaatcacgccgtcctcacagatcatcgtttcgttcgcgtttcgcggaagtctctcgcggttatgaaaaaacaaagtcatcccaatcccggaagttcacccaaataggcggccgctgcgcacacgcaggaaagaaataagacgatcggttgcagaaagaaagtggctccttgaacttcctaaacatcgtcaccgtatgatgacttgagtgtgaacctcaggaagcgtggtcgataaaaaacacgaaccaaatatatttggattgtccgcatgctggtgcggaacccttttgcctacggagccccttatgagctcgtcagcacgcatgtgtcagaaactggatttccatcagaagagtaaaggaagcgaggcgattgtccagtgaaaaaggcacaacgagaagagccagacgacgataaactgctgccaggccacgatgaagagccaccggcgcaaggaagcacggaagggcaacggtagacgaaacgagtcgctccgcataaaactgtggaatctagtacagatgagaaccgggaaggttccgaggggatagagacgtacaagaaaaacggggaaagccagaaagtcctcaagaatgcagaaagaacagccacagacatcggagtctacgttcacggaagcgtgtgaacgttccgtttctcttcttcagttctccgcacattcctcctggatccgttacttatgactcagcagaattgctctcttcacaacactccagcatagtcaagctgaaggcattcctttgtgaaaatgcaaaaacagacttgcaaggccaccggctcctggtggcgtgtctacgctttctcagcccagttacgagagttgtcctgatggcacgtcggaggttgtgagtaagggaattattcactggcaatctattagtgacacggacaaaggcagggtagagcaacagaaatatctcgtccgattccacggaaaatacactacactgatggaagactgcactcgtagacaatatgaacgggcctacacaactcggtcgcagaggacttctacatccttcacgagaactcacgagagcatatcgaggataaaaggagcccatggaaatcacaaacacaaaccaaactcttcgaccacgttctctgtcgttagcgaaagactgtccggtgagtacgcgcggcgttcgttcccagtccacttttcgtgaaattttacgggcagttcctttcggcaacacacaaagaaacactctgcgttctttggaaacaggacgaaagagagaaacacgttctctgtacacaccaggctcaaggccttggtcaccggcgacgtcgatgcattctcagctagttgcggagactttttgaggctcaacttctggatctgggagaggtgcttgccgtctcgaatcgacgaggttgacttttaatcctctagcggctgcaaaaatcaacgtttctcatggcaagggcgttagcgctgtgcctgaccctccttttttcccttcagctgcgtggctccagacaatgcgcagcttttgaagagagcttggcggcgaccacaaagagttccggcttacatgcgagtaatgagtcccaggacagaagcgcatcgaggcgctgaaacgcacgtcgctaccgcttgttggacattgggatagtccctcgaacccacattttctgaccctgtcgtatttaatacgttttccttgtttcatccctaagcatgcagatcagcacaaggaggttgctgctctgggtttgctggcgaaaaagttgactttggtttcttccccgtgtgccgttgcacaaactccgtttccagctggtcgctcggtcccgacttcgattcatcccgagacggtgtacagagcgaggctcctgatctcagccagtgaacagcacacagcacggatgcacggaaagggcagcgtgttgtgctggttctttatcataacagcaagtttcacgggctttgatagcacatcagaactttagagagccgagaagaaggcacaagtatcctcttcttcggtctttcggtcccgtcgtctccgttgaaaccgagacaagaagactggactcgtaggacggcctcgccgatattctgtcgattctagtgacttccacgtccctcctgcgttttctccctcgctgactttcttgtttgattgtcccccgtagacgctgtttagccctgtttttttggcgcggttaaaagttcttgggttgcggccgtcccgacataaggccgcccggcatctgtgcgtgaccttgacatgccgaggctcccatttattgcttgcctaaccgtttttcacattgtttttcggtaaaaa

SEQ ID NO: 3961 - DNA, 2289 bp, Toxoplasma gondii
  source 1..2289: mol_type = genomic DNA
ggaacgaggaggaagagaaggcaagaagacaacttgaggaagaagaaaaggaagagaaaaccgagagagactgatgagagacaggctcgtggctggggggtccggaccggggtcggccggtaatgctcggttccctgaagtgcgggcatcgtgctggcttccggaaaacatgtctgacaagcgaagatgatgacggagaacggagaagtcgaaacgcggcagatgaatcggacgagcggcggtgagagaatggagaggttgcccaggcggacggcgagcaccgtcgcggcgtcgccatcgccgagggaaaagagaggagacgcacacacagagagagagagtgactgcggtacaagacgaattgacgccggcgcaagagaggaagaaagagacgggtggccaagagaggatgcgcgccagagataaagggaggcgcatccccgaagtacgaacgagggaatacgactgatgaaaaataaaacagacggagagaaagagagaaggagacaggacacacaggcgacgaggcgctaagataaagggactatggagacagaaaagagagcagacactggtgtgcgagactcagaaggaagacaaggcacagaagagggagaaaaggaggggcgcaacgggaagacgcgcctagaagaaacgcgaggaggtgagaatgaatgcagacaacaagagaggcaaacaaagcaactgaacttgtgaaggcgaagaggaacggagaagacggcaaaagagagaggagggaacgggaagtctttaatgagactcaacaagagttgaaagaaattcaattgcgaggcgtttagacgcagaagagctgagttctctccctggaagcaaggttgaggttcaccctcgtaattcacctaagaggagagacccgcaggggagaggtgaaaacaaccgactgctgctgaaaagagcaatcctttcactcctcctcaggcagaaaagcttggggaagcctctgccttgtgccgccacttggactcggaaagtttctccaccattcaatgcgaagtgaaaagaagacgcagtgtcttctgactcgagagcaaccttcatggggcgacactcgagatcattgggaacgaggcctgtgttccttccttcgcaggagatgcagatttccttttcttggtgcaagaaagaagcattttgttctctgttgactccaggagcgagaggcaaagagtctgtgcgacgagactcgctcgacagaaactgtccagttgacgttggattgttggtacactcgaagcccccgggggaggaaagcccagagcgcgactgagaagcagagacaccggagagaaaaaggggatttcgtttcgtttcttgcgccgaggagaggaaattcggcaggacagagaccgcgcgcggctctagagaagttgacagcgacacagcagccttcgttgccgcgcaactgccgagcaaagtctgtgggcgagcgaagaaaagcacagaggcaggagacacagggcgacttgttgctgcgaatcggcgcgagtgtactagcaaacgtccgagtacagcgttgctccgtttcgtctcctggaaaaatgctccatctctgaatatcctgcacagaggaatgtcaaaaaaatcactgccttaagcgcctcttggagtgcatttccacctgacgtctcacgctgagcacagagagacagctgttctgtctgcatctgtcgcccatgtcgtttgaatcgatttttcgcggccgttcttctcgacgacgctgtcccacgcgttcgacgtcgggggtcaacggttgatctgtcgtcgattctgtgttttcttcctcgttgagtccttttcttacatctcttttcttgcctctcctgcactatctctgttttcataggcttcctcaacccaatttggagtctccacgacgcctctgcagctgccgtgcgtcttttctcacccgcaactacagcaggtgccctatcgaccgcgacttttggagtctagcgtcgctggtcttctcgttcgcgccattttttgtgtctttcacttccccttccttcctcttcgtttacttctgttttcggagaccccgtaggtttttcttctctccctcgaggagcttccatcgctgcgtgatcctcatcaacttcctcgtctgaccaggttgcgttcttccttggcaatctttctcggcttgctacttcgccaatcatctctggggcaagctgaggactcgcggatccctcagtggacgaacaaacaaggactcgacttcttgcttctgagtctgaggaaaga

SEQ ID NO: 3962 - DNA, 2517 bp, Toxoplasma gondii
  source 1..2517: mol_type = genomic DNA
gttttactcacagcaagaacgctttcgaggcacaaaggtttgaaacacacgagatcattcttaggctctcccattttcgacgcagctcagtcaccccggggacccgacatgatcagtcaaccgaactcctgtacagcgtgacactgcgctatccgcctccgcagcctccacgtgtatgtttcagcactggcttctgaaaactaagtaaactagtacgtaccggtaacgaaggcgtacgcggcaatctagttgaactggtacgacacaccactgacattagaagttgcggcacacactcgtttccccgaggcaaaagagttacaaataccgttgcggcaccggtacagcagccacagttaaccagtcgcggttttcgtagcgtcacagtcccgaggaacaagaccatgccaaaggaaggcggagcacatgcgttatttgggaccttctacaaaggggagaggatttgaggaagtaaatgcagcccctgcagaactgtccgcaagggccgatttttgccgctctccgcttaccgggaacagttacggatcggacgggcgttctaacatagatagcctccgagggagagctgagcgtcagaagaagttgatttttaaacggattcgcgcctccggctgctgtagcaaagtgacgagagggcagaacgaacgcgttccaccctcgctggggagccggagcggcaaggctcgcgaagcgggagaaggcccgggcaaacattttaagtggcaaacgtgatggagacgaaacagacacggccacgagaaagccccacgaagactccctttacggagaaaatgtcgttctgacggagcggaaacagttatggcccacaaacatcagccgacggcgcccggttgcgtgcctgtaaacttgggggagtttgcagagtgtccttttccaacacgggcgcactggattttaacacatgctggctctggtttctggggataagtccatctgtgctgaattcagagatgaaacacagaaaatgcgtcagggacgagaattcacagtgtgtaccggaggactgcctggaaaacaacgggaggggaagggtgaatggactcgaaaggcgacgtctgcgtatcacgcgggaagccggcctaaacaaactgaaaaaaagacttgatttgtttcgccgggaccatgaaaacgatatcctgctgggcgaacccatcgaaaaatcggcggacaaaaaggcaacaatacgcgcatgcagtccccggtggtcgtcgttcggcgtgaccccccgtgtttcgtcagaaggcagccacagcctatctggagacactgggacggagacagggctacctccgaataccctgtacgtctagcagcgaacagcacactcgagaacgaagtagttttccgtttttgctctgaatctcaacgagcgatgtaagtttacacttgcactcatctccataatctaggaggccggtcgacataacggacgaacggctgggttggcttctccctccacggagacaaatcaacccagagtggcacttcactgtgtctctgtctcgctctctgcagtccccggtgattgccctctcgacactccgtaaagaaaagtcgcttgccacgaagatcccctacaaaaaggtgcccgtgtacgttgttttaatacactgaaatgaaagttcatggtatcgttcaggggctataaggaagattcgggtttgctgtatccgcagcatctacacacgttttcacaacgtgcggtcaccgaagccggcgatcgggaaaacacatgctgtgactttagtgaaataaatggcagtcaatcgcgaggtagccaatgcgcctttgttctgcccgttattgttgtcttgaggtgtatgtacacaccgcggcgtgagcccctgacaaattccgccgttggatcgaggggtcacagacactccaaaactacttttcttgagttttgttcggacactccgggaagcatcatgccagttgtcgctctgtcctctcaaaaggttgtcccgctggtctttgtctccctgaagccggcaacacttgccagtctagccgttgatgcttggggcttgtccgcatccctgctggtgacggcacgtcgaagttagttaccggcattttgtccgctcgtcttcagtgtcgccatgagcaacgacccttggccagtttattttgtttctggattaacagcatcccgggcatactcttgtcctgtccgcaccgccgccaccgccaaggggtcttcctgttaacacagcctttgatcgtttgtcgtccttgccacgagccaatttcctctgagttccacaatcgttcacacgttctttccgttcatctgtgtgtgccttttcggtgcattttgtccaatacaatcgtttgtatgctgcggctcgtgccatcacacaagacagcgtacagtccattttgtcgcagtgtccgtagcgtcgcggcgctgcttccatctccacttggcttctcccccagattattggggacgtttcggtgaccgcaaca

SEQ ID NO: 3963 - DNA, 2139 bp, Toxoplasma gondii
  source 1..2139: mol_type = genomic DNA
gtatctacgtagctcactgcccagcttcaggattaggccaaaagagttcactaacgacactgagaaatagatcgcgtaagtgcctggaaaacgacttccgaagcacccgcacttgcagatgcatgtccggtcaggactgaacgtagtaacaacgtggagcaatgcagaaaaggcagcttccctcctcgacaccgactccgagcaagcaacatgtcgcgaaagggcctgtttcggaggacttcccaggggtttccgacggaggactaccaattacccattgctcaatacacttctttgcgtgttttttctgctaaccgtgcaaagaacagcgctgctccaaggtgaggaaaagccgttggcttgaagcctttgtttgtccggacttgtccacggctgcccacacgaaagtgcagggtgctccacactcgctgagacacgcgactatagagggaccgcagaacccccatgtttttttccctgcatgtgcttgtgagactttggagaggaaaaaggttaggagacactgtccaccaagaacttgacgcaaagaagttcagcaagaagcagacgcgcctcggcaaggcaaagccccagcgggcgagacccacagacgcgccgggaactgaccccgcaaaacgcgggacgtttgcagccagaaaagacgtcaaggtcgtcttctttttctgttctgctggaaaaataggctggtttcaaagtggtgagcagatgacacgtgtgccgaagggagagaaaacgaaacggagaatgtctcaagggagaatgaagcctacgcgtgatggatgctcggccaacacccggcaacaggacggggagagagacgattcagaagacctgaaaaaggcaagagaatgcgcgacaaactcaagcgaaaccggctgaaaggctcaccacgaaaccaaactctcgaaagcacaccgacgaaaaacggcgtactcaagacatggggaggcgagcaggagagaggagagaaaagtcgggcctcagaaaaccgaaggcgatacgaaagcatctgtgaaggaagacgcaacaaagcgatatcgttttcactagaagagcagaaaggggcacccagatgcgctactctgtgcgccggtttcagagaacaggcaggagatgaacaaaaccgttacacctgtttgtagagagaacgagaaacagggaatggcggcgtctctccctcgcgaccaggaaaaaactcttccgacggggaaaacgcctcactgattcctttcaaagacatcatgaactctggctcgaagttccacactgcactcttgacagcattcatttcgttcacatgcccaagcagccgtctctgcatgcacactcgagatgataacgtctcgtggaagcctgtgcccttctcttcagtctttgtcaaggtgaaacacaggtcgccgtccgaaaaaacttgatgctttcttctttctgctttttctccctttctcggctctgctcgtccacagctctgcgtcctcagaggggagccaccttgtctccagcgggtttcgttctcagccccggaacgccgtcgttcatttgccacttgttccgctcttctgagtctttcctttctaccttgctcgcatttgtgtggcttctcccccagttttccggcgtcttgtggctcctcccttctgggacgcctcccaggcctcctttcgaactcgacaaatccacctgtgccagcacagctgtccgtccacccatgtgcagaaacacccagagtgcagtttgcgtctgaacagctgtcgactcgaggctaagccttctgcaggtggagtacgcagagtaaacaaaaaactgctgttaaactcgaaagtcaaacgtatttacgtcgtcactgtggacgtttcgatgagaaactcgccaagtgcacgaaccgttttagaggggaaattttcttcgctgccgcaagaaaaactacagaccaggactcgggtgcatctgtttctcgtgtgtactatctcagggaggtgacagacggggagatgagggcttgtccccttgttccttcccttccacttcgttttccttccgcgtctgtcgccttgctctctccgtgagaagcaggtgctctttcttcttcttcttcccctctgtgtgacgactgaacca

SEQ ID NO: 3964 - DNA, 981 bp, Toxoplasma gondii
  source 1..981: mol_type = genomic DNA
ggttttcttcacacccgttggagtgaatgtgtactcagtgacgtcgtccaacacctgaacagacacgacagcgacacacactctctcgacatcatagccagcacgattgggcggccgttatcaggtttgctgcggccgcagacggcatgctgacaacggcgactgcacttcgattcgcgtaaaggcttctccgatccgaagagcagtgaaaaaagcaactcttcaggcagccggtctaaaaagaaaccgccgcaacagtgacatctgaaatgcggaacagttattgaaaggcgttcgtactccggctgtttctacaccgcggcttcacagaatgggtgtcgagaattgtgccacaagttaggcggtggaaaacaccgcgtgaaagttggaaaagaagcaatacagacgtaccatgttgacgaagtcatcgaaacctcggagggtcccggctaactccttgtcacctttcatgataatccacatccgacttccgatacacttgtccaccagggcgagaggcaagtagctcggacctccgctgacaacgccactcgttgccggggccgacgtcgctttgggggcagctgcgctcatcgtgaaatagatcagttcctcagaaagcgaatggtatggtgtgacgggatggaaagcagatggtggttccaccaaaaagactgtccttcatatgcgctctcgcgttgttttgaagtctggaggccagtttgaaggaacaaaaaatcgacagattccgctcaagactgggcaagttgatagggtccctgtcggttgaaataaaaggcttgccacagtcggagtgacagcttctctctgtcactgcggttttctgcgattcaactggacaggctgcctttcgctttcacggcaggctcaaaagaaagtcgcgacctttcgaatgagttggccaatccgagttcggcgcagaaccgctgaaaacgcgacccctggtggttttttcttcaa

SEQ ID NO: 3965 - DNA, 2401 bp, Toxoplasma gondii
  source 1..2401: mol_type = genomic DNA
gcaactgccattcgaagggaaaggcgtcctttcgttggccgataaagcagtcaggaagaccgtgacttttttcttaggagtttccccttcttttccgcgggaatgacacggcaagtctttttaaggcttcatctcaaattctgtctacgtagtcatgccgagctgtcttcggtggtcagtctagggttttagcctcttgcgaactgtgtcttcagcgaccctaaggccttgcgacatgctacggatcgagaccctgatcagctgggcaaattttctgttttataatttggagaagcgacaagaagcgttggcatcggcccgcgagacactccaggaagccattgctcaactcgaaacggtgcctgaagagcatttcgctgaagttgtcgaggcgttgcaaattctcatgaaaagcgtgtggcgatggaaccaagaaagtcggaaagacgccatgtacgactggtggtcaagtttgtgaaagcttgattttgaatcgaatcagctgaagcgacagtaacttgtcgcagattttcgggtatttccccagatttttgagcagggtttgcgaccccgtcggtgggttacacagggatgggggagcgactttataccgacctgtttgggggttccaaagtcgtcttaccaagaactaatgcgatctcttatttcctcgcatcactttaagaagggatgtctaaaaacaacagacctaggcagggttcagattttttggaatgacacctcatgaatctgttcatgacgacccgttgacgtgcatgacgcagagtgacagcatcgtccatttgagaaacgaacacttgcacacaaggtgtttctcaatgattttaacacacgccaacaacagagacgctttcatcaaggaaactctacttgtaaaaaaattcacaacaggacacgcttcgatctgtgccgtcactttaccggctactcccgcgtaagtcggctctgtgttacgcgccgctgccttctgttttgaagccactattcccctccctaggaatctcgatgcccagtttgattgagggcgccacacggagaaccctctttttcatttttgtcggggtcgattcgatcgaaggaaagctcactaagtgactccgcaaccgcgtgtcgtcgttcgtcgctctgcatgcaaagaatgccgctctagtcccgaagtcgattttctcgcttcctcccttgtgtcgatgaccacacgcgcactttcctcgcggatctgtcgaagttttctcttgactttgtgcgtgcggtttttctgccgttcaacgaacccacaagggaatcttgccgctagactttgaggctgaagtgcgattgctgccacggaacgccgtgtaataatagcgtgccgagggactgaggggcactctgaaacgtttctttgtggcctctgcgacgtcttccgcctcgatttctaactgtttctctacagttttgtagtttatcactccaacatccagacgccacaccgggaaagagtgtgggggtgcactacgtttgaggtaggttccgcgtttcaccgaagttccggtggctagcgccgtttctcggcgtcaccccgtcacgcatcgcacgatagagtcctcccttttttgcagcgggcatgtagcttgtggatttttctctcgttttcgcttctggtcacgagattcccggtttgctggttcgcgagatcctgacgtcgccgggatgcgccgcgttcgtacacttcgccggcgcatttctcgccgtcgacaagaaagcgcgttctggtcgcagagacagcgttgaaaaggagagatggcgaggttgagagattcgcatgcagcaccggaaacgcagtttactcatgaccgacctacaaccgtggtgtcttggtcgcatgaacgacaaagcttggcagctggcccgcagccgcctttctcgcagtcgccgcggatggcgcgaattccacatgtcgatcgcccgtgttccccgccataaaaaattgctacgattgtcaccatttgttttctgaacatttgaagcctcactgcaagcaaccacgcacgcatctttgttcccctgcgccgctgctgccgcgtcgacttcgttgagggactccgaaaaagtcccgtcgagtagctttagatcgtagcatttccgccgcatcctgagtcctttcggactcttgaggaccctatgggaacacagtctgctcgggggtttgcatgtttggacgggcgccgaatgattttaaagtgtcagtagagaaaactccaccacagcaaagcgttctcccgcccccgacttgttttcctttcgctcttcctcccacatgctatccgctgtctgtccgtgctgtctgtgctctctttgctgtcttttgcgtgtttcaggtggttttctcgctgtcagcgca

SEQ ID NO: 3966 - DNA, 1795 bp, Toxoplasma gondii
  source 1..1795: mol_type = genomic DNA
cttctcactaactacagactagtgttgcgtgaacgtttgagagtcagaaccgaaaacgcaaatctgtacgtacatggttttggaaacttgcacacttacgcatacgcagttcctttctttatactcgctagatctgcgtgaagggtgttctcgtgtttttgtgtctctgatcactcttgtttcctgtgtgcctcgagctcgctgaacagtttggtccatgaatcagatctccgagtacgaacaatatgatcatgctagacacatatgaactaggcgcgccggtccttcagcaacaatcgatacacaactgcagaagaataattatatcgctttcgatgcacgctttgttgtggctagatcacttcacagtgagacacgtgaatgtggtgctgtacggaagtgtccgtttcaaggaactcctatgtgttagggcagaatgctcttttcaagaagaccgagaaaatgagttcagagggccctgttacgcaaatctggaaaatcgtataatccgccatcacgaataactcgcttctacacgatttgaccagctactggatttcgatcaggctctccgatttcaggatcgaagtgtgcgttgttgccgtgtgtcggattacaactgccatccgacagtcatgtctgccactgactaaaggggctcttgggacgacattaccgtccacttcttttcttcgtgttgtgcagtgcaccagactaccgatacccgcatatggaaaagcgaagatgagcaacaacgaaatgctataattacaactgggaagcgagtgttccctaacaatccgagcgtgcaacgtgggatggacttcttgccccactactgaccgtctatacaagctctatgtcacggctcaaatctatattcacagtgcattcctgttttattcccaccgttgcttggcagtgtaattgaggctctagagcaaagacaccactggtgaagaaccctgtgtcagtcgaaggtgaccagtaaagagacaagaaatcaaaggcaacgcgcagagcggaactcagtgggctttaggataaatcagtgtcatcatgcagcgtagccgtagtggaacccagcaagacgccaggtcatgggataccacagccgttggggctactttccagaagtcttatgaggaaacagataagacaggtttcgactgttagtctcccctctcacgagggcatatcggtactcactgcagggatgtgattttgtgagggcaatgctgtttcacacttgacgagttttgttaatacaagctcacctagtatccaagttttcggcttgtagacggtccggggatcgcgcatgcagtttttcgctgattgtcggccaagtcgacgacaacgacatacgcccccgttgtttcccgtttccgtttcctttgtgtggctttaattatctccctgtggatctttcgcggacctcagaaagcacatacgctgtcgtcgaggctcgagacgctaccccgagttttctctcctggacggagaagcgtttctgttgcgcacggggacttcggttttccttccagtaggctccaagccttttttctgtcccatttcttgaacccttttctgagagacccgccattttccgtgagtttggaagtactagattttatttcgaccgttcgtctggacgccgcggtggaccaccgatccttgtagagtcgacaggagttttccctatagggactccaaggaaaagcgtgtacccttggggtgatcaaactgcaccacagtgtctcccttgctgccacgtctctcctaattggcaaaa

SEQ ID NO: 3967 - DNA, 2497 bp, Toxoplasma gondii
  source 1..2497: mol_type = genomic DNA
ggtgaagttgctcaaacaggtggaggagaagcttcaaatcgatcattcagcgtggcagggagacgccatgttatatggtactgtgtcattgtgcgtgccgggtctgtaggatgaatgttcggacaaattttctgccagacggtgcgtgatgcaccgcagctgcatcagaagcgtttcattttcgcaattgcacgcatcagtacagcgtttgtattctgtagcgataaaatgggattcttcacgttgctgtgtgcgagaactttgatggttacaagacggacaaatgacggtgtctgaccgtcgtgttagtcaaatctagaccgcagcgaaaaagcgggcacggactcttaagcgccccaaaagaagttctgccgcaacatgctgaggatgccagcggcaaaagcttattaatgatagctttctcgtcgtcgccttctgcgacactacactgagctcgagcccaggcgtcgatccggcagtgcagatttgccttctctttgttttcttgtcaatctcgcgtgaaaattgtgtttccaggagacgcaaaaaaagttgcgacaaaaatccatgttgtgtagccttcagctccccgctagtagcatgtgttacctgtctcgggctgacttaaatcggctgccacttcatcaagccaaagtgaaacaggcacaagccgccttcagcttcatagtctgtttcgtaaagcaccagggacaggtagattattagctcggttttagacaagtttcagactattcaatgtacgtatctttgagaatggaaggctaagtcttgcgcgacagttggtcacctactagactgttgaatgctctacagaagcaaggaaaagatgctgcttgctgatgaaaggagagttgcagaggagaatttttcgatagtgtaccagaaagatggaggataagtacagcagctcttccatgaatgcacgactgtggtcgtcggcgtagcacagaccagtttttctattctgttgcagccttcaataagctgctcggtaatgctgtgaagcaattcagcatattgccgatgcttttcctctgacttgtatgggtaatacgaactcgtctgaattccattatgggtaactgaaggtattccactcaaagtgcgtgaagctcggtagctacgcttcgtcggagcgtgcgaagaaattctcttcgacatagaagggggtgtgagagggcagccacgcattagcaatgcatttggcctccaaagccatggtttgaaggcagctgactcaaaaatctgtcggggtgctgttacaaaggctgcacatctgttgtcgccgaaaaacgactgtacatccggtgaactcggcgcgcagcgttggcccaccttagtttctctgtgatgaccacccagtcgacatacttagatgcaaatgttcgaaaaataaatggtattcttcgcgtgcattttactgattaccgtcatttcacaaggcactctgtaaaaacggccaaagcggacgtgccattacagcgactatcgaatttggtgcatgcacgatcaggggatgtacgtgcttccccgaacttgcgcgcctggcgtccgcccaatattctaggaaaaatgccgtacggagttcggttgtctgcacctccctaaaaaatctgcatgtacgggggggggctttgggccagctcatgagttcatgaagccaattcgcattttcctttttcacggagatagcagaattccacgaatttgtacgcttccttccccccgttatttacttgtaggagcttgcctgcagcgtcaagttctcacacagggcgttccggaaagcgcccatgtccacgttcctttctttctgccagcgttgctgccagtgctgtgccttcgcgttcggacgtggatccggtcttgtctccagaatatgttgtggtgttctatatgttctctgcgttcgtgaaccgccactctgtcggtgcgtacccgccctcactgatgtttctgtcctgcgtgaagcctctagcaacattgcgtcaagaaacgtaattccgtgtcggcatgttcggaaagagttcactgttttctttgcgttcctttcgacgtgctgcgacgcagcctgagagcgaggccggctaggtctgtccagaattatcatcagtcaagcgccctgatcaaaacaaacaagttctgtggcgcgctaaaaactggttgcgttcgctgcgcgtcacagggcctctggtgcaattccgtattttctgctgtggcatctacacaacaaagtgttcccctccgccctggtgtgccgctgtgtatatacaccgcgccttcgccatttgagacgtccgctttcaagggatgccggatcttccgaagttggccggttgaattcgccacttcttgccagcaaaaaaccggaaatttgcacgccacacagcttgttgtagtcgcgccaccagggctaacggtcgctcgctttttagagcgtctttttttgcacggaagcggctctaaatcaacaaga

SEQ ID NO: 3968 - DNA, 2063 bp, Toxoplasma gondii
  source 1..2063: mol_type = genomic DNA
cctaccggccatacttctggaattcccagtcggcgttgtccaggggacagacctgccgcgtcttgagccatcgcgagatgcagtggaagtggaaagcgtggttgcacacgccccaagcaactgtgcactcttccgaactcgagcctccctgggacgcaagaagaaataagaaacggatggcatacagtaggcacacgccttacatacagcccaagggtgatttgcttacgataccgtacttgctgtcgcgagggaagctattccacaactttgttcatctggtatacccatgctggagcaggggttcacacacggcgacaggaaagacaattgaaaagaggaaaactaagtttcctgctaccttttgtgtctgtcaatatgtgaaacacacactgagctgtaagccgcaagtgtctggtcctgagtggaggacaagcagaggcagtcgattcgcaaagcccacaaatatccctctgttctggtgtgtctcaaagtccgctgcataaactgaagctactgtgcgtggctaccgggtagcttggcgaccgtggatattactgtccacggtcataagaaaatgcagttgcaaatggccggggctatcacaagcgctacaccctttctttcttccaccagtatctccacagtttgataaacaccctgtgttgtcccaaagtatgcgcatattccagtccacatcaccgtttaagtgaaaaacgaggacaggatgcgctctacgacctcgagggtggatcctcgctctggacaagtatcaaagttttttcaagacggaaaaaaacgcaacaagacagcagccttcaacacgtaagagccaagtgagagtggcagacactaggcagttgcgttttttcgtttggcttctttcaagctcttttttacctgccatgccaacgcacctgactcgcctggcactcgatacacaagtccatgatgtgatttcggcaaatcgcacagttgtcgacgacgatgtcccaggaccaaagggcgacggcagaccactttttaacttcgaatctccgaacaggaacctcagaagagcttgcttctgcggcggcggcgccactaccactactagaggcagaggggggcggtgcactgacgtccattggagaagttgggtcttctgctcccgacatggtggcaacgcgttggtgtcaaagaaacaataccccgacgagggcgcactttacagacgggatagtgtgggaaaaagccgcgcttcccgacacaccagggagctgaatatctactcgacagacggttcagttcggcggcaggcctcgatatcccggagacgaaaaaagagatccggaacacgagtgtgtatgtgtgtgctgggcagccagacaaacatctccaaataggcaacccctgaagagcgcaggagaaatggaccgctggaaaagacgttcttctggtgacgacttgcccggcacaaaaagaatgccttccttgcgattcgcgactcgcgccgcatgcacgccagcgtgaatgccagccaatctgcgttttgctgggtaaggtcaaaactcgaaaagcagggagactcaaaagcccacgaggtgccctggcatctgcagtagtggaggacacggttttttctcatttgactagagtgagtttcacccacacaagtcgcctatcctacagagccgcctgtacgtacagccgaccagctcaccatcccgtttccctgtgaacgaagtgtaggcttggcagatgaactgcagacggcgactatccccacgaacaagcattaagacatttctgcacagtgttgtgaagactgttcaaaggtccattcgtcttgtcccgaagacgacggtgtgctcgtgcaccaagacataaaacgaggcacacacggactgatgctgcagcaaaatcgcggtccaaagagttgccaccgacgctgccaggtttctctcgccgacagctcctggaatgttttatccgtaaaacccgactgtcaagcctcggaaaactgctcttatgaacactgcccgcgcctttacagccgtcattttgccggacagtcctcaaaa

SEQ ID NO: 3969 - DNA, 2962 bp, Toxoplasma gondii
  source 1..2962: mol_type = genomic DNA
agagactgaagagggcggcttcggtattcttcctcgcgacgaaagagggccgcgcagccgacgaggtttggaccgagaaggccatgccgcggcgtacgaccgcgcggactccgaagtcggcgggggtctcgcgtccgcggcgggtgggcgccggagaccagacgagcgggggtcgtaccacagtggcgatcgaggacgagaaaacgaaagacgcgacgaagagtacacgagtccccagatgaccgcttgtgactacctgccgcggcgtcgaggcgaggaaggcgctgtgctcgcgggatctttcgggggatccgcagggccttacgccggggcaggccccgaggagagacaggggcgacgccggtctcggtcccccggtggcggaccgtactttgtggggtatggaggctactccacgcggacatcttcggcgcaaaacgcgccttctgcccacatctacgcagagcggagcggcgagagagacaggcgacgcagagagagagaggatgaggcgctcgggcgagaggcgggccgcgaggaaggtcgagaggagatggcgaggagaaaggacgaggacagatgccgcacaactgcagtcggccgcagagatcgaaccgactacgccggacgcggggaggaagagcggagagaagtggaagcgacggggtacgagcagaggcatcgcggctaccgaacggcgcgagatgaccgcgtctagaagagaaataggaagacggagagttctaggggggaaagcgaacggaaaggagagttccgccgagagacggcgtagggaagaacgaatgagggggagaacaacagggacgacagcgtccgggggaaggagtgtcttgggttttcgagacattgccgcgattaggtggacgaatcagttttttctcaaagcactcggggaagctctgtactgcctttcctgcgattttttcgataaaagaactgtgatcttccgttgcgtgtgtcttctctccgagagagctgcttgcacaggggaaggcgcggcttccatagagcgtcgtggatgcccttccgtgttgtagcctaaagagctcgcgattcccccatgcagttccccagagaatttttttgactttctccacgatagagtggaaagcaacgattgctgtgtctttcttttcttcgatacgtttttgcttggctagcagaaagactccctgtcgggtcgagagacagtctgcacggaaacgcagagaagaatggaagccgcggcactggtcccaaactgaagttgcagaggtgtaggggtacttctttctcagcggatgcgtaggtctgcctgcacaacacagggatttttcttttctcgagtcgcacgttctggcgaagtatcaacgcgcagcatgcggtttagagctgagaaagcgtcttgcggccgtctcggctggcgtccacgcggtttcgagcacctcacagtgccttcggggctgtccttttctgttcttgcaaaatgtctgtgcgggtgtacgagggcattgcgtagcttgcactctcgtcgcttggcattcttccgcttccatggcagcggcgcctcgcggaaatgtcaagaacggcgcagcgtatgatcaacttcagcgtcccgtttgctagacggcaagtcagggggtcctccaaaagctggaggggagtacgaacgagcggcttgtctcgcgcaaaagatccacggattgtcctgcctgtgcgtctacgaacgctggttgtcgaaaacacccgtcacgagcgacggtcgagaaagtgcagggataactgtcagaccacgttgaggtggaaaagaaacgtttcacgtgttgacaacttcctagcgatgtctcgatgcggcggtgggacagccttcgtgaatttgacgtccggcgtaactcaatttgccttggttgcaaagtgtcgttaagactgcctccatttcttttgcctctacttcgcattcaaactttacggtctcgcttacttagattcgttgtaggaggaaagcagggaatcgagcctttgatgtaaaatcgaatcatgcagcaaactcgcagattggtacttcattcgtcccagaacgcgcagggggatgcgttgccgtttgaaactcgaagagtgggtgtccactgtgattccgacaagacacaagagatcgtggggtcgtcgatgacctcttcgtcgcgttccgcttcttcaaaagatactttttataagcgacgacgagactcttcactgccggtagcgggcagaccggttcgaccgtcgtgccagatgccagtcgcaggggacaaagttcgtgcttgattcgagctgcgtgattgccggagccgcgtttttatggaccctttttagcgtttgttcgagtgctagactcctgaaacagagcattttacgcaaagtctgtgaccgtcgcttattactgtgagagtagagcaaagttacgagggatgtcctgcctgagccacgaaacctctgcgtccacgtctgaagcgcgtaatcccacgtacataagtgaggcttttaccctttcacagacgccgtcgtccggcttgcctgatttttacgctaccgtcttgaaggctctggcacagaagggcacacacgcccttgttcctggacttgtgcactttccaccgtgaaccaaagaccacgaggctcagttcaaagctccaacgaaccttctcgctcttaatgaagagtctctttgtggccttcaccggatcaaatgctgtttcttcgacgtgtaacgtcaaacctgtccgcggcgaacttcactaggtgacaggggggatagacaggagataagcagccccacaagaatccgtcagtatcagaatgtgcgtcgtcgcttgcaacttcccctctaacccgagattcgtgtggaataatcaacttgaaaggccctgcaataaagaaccgcaatcgagcaaaattaaccatcaaactccccacacagccccca

SEQ ID NO: 3970 - DNA, 2745 bp, Toxoplasma gondii
  source 1..2745: mol_type = genomic DNA
gacggcaggactgctactcgactccacaggtgtaacctgacggctacagacgccttgcaggcgcttctcgtgaggcgtctgaacgtagaggtcgtgtgtcttgtccatgcgtctctcctgcaagccaaacgagaagttgggtcgtcgccagctggtctgctgcgcgccggcagaagcgagcgaacgcgtaggcaacgagcaggaagtgagtgggggagaagacgacgaacggttcccgagagagagcgttcgcgtccgcactcgggaagcgtggaaggcgccggggggttgacgaagacatgcgaaaagttccggaaaaacgaacggtgcagaggacagggccgaagaagaagaagtgacagagagagaccgagggaagcgataggcgagggaactggaagagccgtcgagacgtcgtggaccgccgacgcggcctagaaaagccattttcgcagctcagcgttccgagagcgggcaagagccgaaggataacagtcgtctgtagctcctcgtgacagtctcacgcacctggcggccgcgcttgagcgacgctgagaaatcgagacgcagacacgctcactcccgcatccccagcgactttggaaaacggagtcagacctcaacggggacgcggtcgatgcctccgtcgaacgttccagtttgtgcgttccaaatccaagaggcgtcgtgtttttgacgaccgcgtcgggtcgcggtgagccagcgaactcacccggtctgccagagacgcagtcaggagaatccttcttggttcaccaagtggagttcgaggacgcagcagaggatcaggccgatccctgaggtctcagcttccagtgtcggttcttcgggtgtacaggcacacatccacggacgaggagtccgaagcgtctggcatggcgcttcagcttccaccttttttctattcattccccgcgttgctttttttttcgtccgtctctgccgacctgcttggagagtgtctgaccagagtggcaaatacggacggggcggtcggtgggtcggtcgtcggatcctgaaaaaatccagcagggtggcggcgagctgtcgcagtccggtgccgtctcggtttcgatcaatcatggagacattttggaagtccgttcctcacgactcacgcgaagcatttggtggcgttggaactgaggttggaactgagaaaagctgcgcagactgggggataaagcctttcacaagacgaagacagaactgtcgaaagagcaggaaaactcctagacaaggacgccgcgacactccacgcggcgagttccgtttgggagcacttcacctgggacttctgttgaagagttgtccagcacagcaacttagagccgcaagacgagaacggccctgacatgcgcgcaggaaacggagaagttaggggagcctttctttttgcggactccaggtagggaaacgcagcaaacgacagccagggaacacggagacgggaagacagagaggggtcacccaggcgagagacgcgcggctgaggaactcgatttgtctgctgaacgtcaatccctcaactggaattttcaaacaaaggacgtcaaagttgaagccgtagagaagctgtagcgaaatgacgaactccactggaagacgctgcttccaagcgcaacttgccagacccaccaaaagcctgccgcgggtgtagtagacacgcgtcgggtcagctgggcgcttctacgtaaccgattccaaactgagaaaaaaggaacttcccgtagaaaaaaggatacatatgtctccagaaccgccgctctccctgctcgacctttcacggtcttttgcccgacgttgcgcgggtcgtttgtctcgttctcagcgtttccgcttctggccgctggtggcgcacggtcctccgttccacggttcttgaaggtcctccttgaaagggaacgctgaaaagatcctttcttcgtcgtctggagaggcagatctccgcatgcctccgctttcgcttccttcccagcctgtccgcgatctccatccgtgtgtctgcagggacggcctcaacacactgtctccgggatttttccgcgactcccgcctctcgaccgtaagagctggcgtctcgcccggaaattcgcatgcaaagagtccggtgtgctgcgacctttctttttttcagaagtcaatttctcgattgcttctgccccttcttgctccgggtaggcaggtttaacgtttttctctccacgcaggtcatttctttgcctggagctggcaggcggcgggtgcgggatgtccgtccttggtcgttgtgccctcgtgcgtcgcgcgatgcgcgagggccagtcccttcttcccctgaacaaacaagactgtggaatctgttcgtttttcttgcagatgcttctcacgcagagttcggagtgtgtgtgtgaggtgccgacgagtcgtttcgcgctcttccactctctctgacgccgtgtctccccgtcctttcgactcgacgttttgtctccatgccctggtgtctctgccacagcttttctgaaaacctttcttcttcgcgtttcttctcttttcctcccgacgcttctgcgtctttcgtgtgagtcctcatccgctccatcttccgccgttctccccttcaacctcctgcctccgtttccagccttccacgcgaccgttctctccgcgtctttctcttcccctctcgcgccgctccatcaccttctccggatcaaaaagcttgtcttgttttctgaagaa

SEQ ID NO: 3971 - DNA, 3007 bp, Toxoplasma gondii
  source 1..3007: mol_type = genomic DNA
tgctaccatctcgcgaaagcgtttatagtgtttttccggtgttgcttggttaaatggaaagagagatgatttcgagttccgttcggtggcgacgtgcgggcgtgtgggcactgggattcctgttcaattgtggcgctaatcagaacgtgaagaaatcgagacagttgtttcttgtcttttttggactgtttcatcccgggagatttcttttctcgctccttgttacgaaacaacaatatcttgtgtggacccctcggcagtttttgctggcgggtcgctgctccacttcttgacacacgcagaacggtggaagtcaaatcgaatgcagacagttccgaacgtaggggcattttcacattcaaggtagatattgcctccgctatccaggactggataacaaatctagtgaacacgatgaaggacctaggagactgaaaatgactgcagtcgcgagttgcagaccccaatcctgcagtcgtctgttttcaagacagatgaaagtgttgtttttttacatcctacgacgttaaggttattccaaatcaattctgttctcgagacaatctgtatgaattcctgtaacaggttttaacatcgagaggaagcgactactcagatgctaggttgatcagtaccatcttacacagctgtgcacatttctcaggacgtttggaggatcaaacagggtaggcgttcagtttacagttgtatctctgattgggtctggaaagccactcacgtttttttgccctacttagctgtgcagaggggagagaaaaagtgtgagagacggagattcgtggtggtagcgtggcgtcaatcgcaggtggagtcacttgcacgttgtgggaccgtttttgctgacgtaaaagtgtatttctcgcaaaattcgtgggtgatgtatttttaagatgtcattttcagtgattcgaaggtaaaccgctacttaaaagcagcagataccgtagccgaatgcgaattctagggtttatttcttcgacactgcatactatatgaatggtcctcttgcacctccagagattaactgtgacagtggagaggcatttcgttgttttctttttttcatctttcactgtacggggctatcggtggcattttctctagagcaactgaggaggctggcgcgcatgttttcgcgtctagattggaaggcttcgtgtaaatcgaggaacgcgacgcaggctggcgtcagaaaaaagcgaggtgaaagcgtttcttcctcgtggaaattcccattgtttgcctttacgtgtttctcggctgagcgtgagcgcgcaaaggaaatgcaaacacgcttctccgtttctctttcaagtccagatctacgaaggggagagaacgacaggttcctgtcgtgtctctgtagggagaacgcaaatttccagtagcactgtagtaaaggcgagttttccacgaacgatttcgagtcagaaaaaaaggggctttttccagtttcggtgacttgcagtcgtcacactatagcgttggaaacctcatatcattgccgaaaatgtaccattcttcgcatatgcctattttggtgaatatttcactagccggccacacacactgtgatgaaagaatcgcaacatggcgcaaacgtcctgcttctcatgggtctgttagaggacttgccgctcctcttatcatgagtatccgtagttcttttacctggttaggtgtgcctttacaccttgtgcaagaggtgaagagtatatcttacatatacgttcgattctcttcacagcgttggtctaaaagcgctcggtggatatatttattctctcccaaactgttcacttgacagccaccacagctgggcaagatgcctacgcccgacggttatcctccttttgttggtaagagcccagaggaagcggttgaataaacctgtggtcaacctcgtagcatagacgccccagataaagcttttcagtcatcctatctcagaaaggatcgctcccaggacgatagtgctgttttgaattgtcgttttctctagctgtttctatacgaatgaccacagacaggaaggtattacgcgtgcaccccccgcgttttttgctcgtgtttctaccacaaaacacaaaatcgatttccttgtcatagaaagttcagaaatgtaagacggcctccacaccatgactgtcggtctttttcccatgttttctttgtgtgacatgtagaacaaatattagctttagtcagcgagttcgcatatgcaggtcgtggattctgtgaaacatagcactagttcgatgtgccgcttcgccgcagcgggagccactggcacacgaatcgtcgatggctcggttgtcctttcaagctttttcccccttccagttggctgtgtcttgcgctttcttcttttcgtttctgtttcttatggcggttcccttttcatttcggtggaggtgccgtgaaagccgcgtgtgcgctgtcttcgtaaagatccagttttttctctggtcacttgagtagcagatgttgaaatgtaccacactcactttttcttttgaacgtttttggtaccgcttttttgtcttctggaaacgaaagccgatcaagttcgactgcagtgtgtcgctatctgttttctcgatacttttccaccaaccgtgcactctgcgttgaaggctggtgtgcggcattttcacaggtacacaggagacagcgtctcttaagaaatttcccctttctaaaaccgcagataaaggtgtcccatttcttcccaagcagcagagaagagttttttcagcgagagaatctgcggaattgccgatatactctcggagttcgtgggtccccgaaacgaatcagtgttctcagctacagcagctgctatgcttaggggggtgtaccgtgtgcaaatcggagcccgtttcctttatccattcgccaccttgaagcccgatctgaagcgaaggatttgttcggcttttcttcactcgcatttcacgctccgaaaaagactggagaccaaaga

SEQ ID NO: 3972 - DNA, 4415 bp, Toxoplasma gondii
  source 1..4415: mol_type = genomic DNA
gcacacgagagggcaagagtaaacgaagatctaggaagaggtaatacagcgaaaaagaaataggaaggcgaactgttttctgctccaaataagtttcgtcgatcagagaacagggcaaaatggcaggcgcaactcgctgatcactccttgttccacgggcgcgagcagtgagaggcgaaagaaccaacgaggaatttgacaagacagcgagaagaggagacgggaatctgggacagtcgccacagaaggctgctcttgtggtgcaaatgcggaaacgctgagtgtcgaagagaagaaggagtacgaagaggtgtagaggaagcggaagcgacgctgagcgggcaggtggcgggcaatggagacgaagaacagtggaagtagaaaacagggaacgacgaaactgcaggggagactcaagtgacgtgggtgtcgcactcagacggggaaggcctgacaacagaggaataccgaatggttgagggtgttaatctttttagaaggcacctcgctgcgatggtggatccggaagttagaggaaggagaaacaaaaggcgtctgcagtggtaccggcgtttacgtgctcctcgacaaaagtgaggcgaagggccaatgttaatcacatccctctcctggcttattcaccgtctgtcctacagatggagtcctcttcttctctcgtgccttctctctcttcacgctcgacttgccccctttcctttccgtgagctctttctttgtcccccatgtcttcagctccctagcgccctagtaacaccgactttcgggtattgtctcacttgaggaacggaggctggaatgtcgtgacgacgagtcacgcaaagaaaatgtgtgaagaatgggtttgttcagcgtcaaacaaggtgaaagaaatgatgatgcccgaagagatgaaaacggaagcggagaaaaacgagcgcttgcggcgccacgagacaagctagcggaagacaggccttttcaatacgaaaaaattggacggttgaggaaggaaagaaagcaagaaagcagagagagcggaaaagactcaagtttagactgtgtgccgaaaaattaaagttcatgctctagctcctcattcctacgccgtctgtgagtaagacgagaatggacggaaggccgcttacagcttttggagaaacaaaggacggagaaaaaaagaaaagggaagaattatgcagtcgcttttgccgaagcaaaacaaagcaggagcaagacaaaacaaacgagatcaaaattgcgctctactgccgggataatcctggagggtcaagtgtgtctggagagaccttgagacttccaagagtcgcgggagagaccgtgggtgaataagagaaatggcacagagacaagagcaattgctcggtaaaagctcacttctagctttctcccttctctgtttaatgcccaggtcttatctctgtgactagcgagagaaacgcacgtaaccatgtccgctgtctacccacggcagccccgcgggacggtcctcgactcacaacctaacacatcgacaaaaaagatggaacatctctgccctcagccagtcacatctttcattcggaaaggaacgttttatatggcaattctttctggttgccatggctgtctaagacgaaagtgaccgtttgttttctcttgccaaccgcgtgtcgctcttgtcgcgaacttgggctccagcatgtcgagctgttctctgctggacctcttcgtcgcctccttcccccccctccccacctccaaagaaaagagagtgacaaaggcaagcaagaaaatacatctgacaccgttccatagccaagcgtttccaactgcttcttgtaagctgacacggatgcgtttccggcgtcgagcgctttcggctctgtcggggggttgtcgctggcacaggtgaacgcggtgcacctcaaaacagagcttcgcgttccccttttctgcacgcttttgaaaagaacagaacaaaagattaacgaaaacgatgatgaggagccctccacatatatcagcggaactcttctcaaacgttgtcgctacctcgcccgcgactttccgcagatcgctcatgcacaatctaccagcaaacgtgcgagaggcgccagcagttgacacaaaaatcggaaggaacgcaaaggtaactctggtaagataacttttctttccagactcaaagcaagattcaatgaaaaaatgatcaccctggcagaaggacacaagcggggcgaggtcagacagcacgtggttctcgtgtctcggttacccgcgcttttcccgttgacagaaccgtcgtattccgctagctgtggtccttgggctttaaagcctggctcacgagacttgtcacgaaaacgataggtagatctagccaaccaaggaatggaaaaatgtagctcttgaagtgacttgttcaagtttccctttttccaaaccagagagagagagtctgcaaagagcgaagaaggctaacactggcggcttctctcttagaggaacgatcgtaggagtgaaaaaaacgattcgagcaggttcaatcctgtcctgctgtcgtgcggaaagatgaaggacaacagatcttctcgatgaagtgttaagtgtatcgcattgctggaagtactctgtaagctatggcatagaatacgtcatttaggaacagagacatgtcaggagcgggtgtaattgagttctcttagcaagggggcaactcagttttcatcctattcgtcaggtaccaacagcttggtcacctggtaggcactgtgccccggtagtatgcgcgaatcggaatttggctagaaagaactgctcagaatttgtttgaaaggggagcgactatacctgagatcagctctccagttccaggcaaaaccaagaggctctagatccgagtgggaaacgtcagcggcgtgtgtagtgaggaggctcgcaaatggaagcaaatcagtttactctttaccggttggaaataccatgtactgaagacgcagcgtcacagatctttcacacaagtgaggctcttttgacgcagtggtctgtgtgagccatcgagtccgccgacagtaaagtggggtattaagtcgtagctgaaggtagcaagcagatgaaggctgagatgtgttcttgctacctggaaacgtgggcagaaaacaagcatgattgagacgttttctgtgtatgcccgtcgcaggggcgccacacgagttgcagcctctttccgcggtgaagcgagaactgcgaatcgacccccagtacaagagagcatcctagatcgctactccagttcgacgcagaaacaaagtggttcagcgtcgcttttttgtcgaccgcggatggagagatctgccttcaagggttgtcttcaggtgaccacacccaggcggatacgcacgcgaagaaaagcgcagcaacgcgtgcatgcagggagaccccgtggcgggttcgcggtgaagaacgagggaaaaagtcgacaggactcacttttgacacacagctgcacgtttttaacacggtctcccgtgtcgagttttctccctctcaaaagaccaaaaccagatcgtgaaaatcaatcctttggtagggcgaatctccttccaagggctcacagttgatatatctaacgcgatgtgttccagttgctggcactgaaatatccaatcttgttcttaagaaccccagaattattttattctctccatttccatcgactgcgcgtgttcaccgaagaagtgcgttgcgcgggccttctcggctgccgtgcatccctagccaggcgaaagcaaccctttcgttcattcacaaaattcggtagaagaagttttacctcgaatttcctaaaaggagagaagcgtgcatcgagcatatcttcctcaattttttctcggtccccctgtgcatgtctcttgtctgtctcctcctccaacgcgctctcccctgcgtcgggactcagccgagggcggccgcctcgaattgtagtcactgggggggcgattattcgggtctataatttgatctacttgatcaatataggtcgcgctactccatcagcacgtccatcatacaaccacttcgttttctcatcagagacaggaggcgtttgtgtgcctttccatgtttcctcgtcggaagcgttgatctctgttagctcttcgctctctctcgtgtctcagcgccaacagatttcatcctcctgtctccgccgtagtgccacatttcggctgcgccgtcgtctggtgaggacgtgagttgaaatccgtttgtcgtgatcacaaactcgcttccctgtctctcttctcgtttctccacggcctctccctttctacgttcttccttctgtcgcgttcacttgccaccgcgcctccctgctctgccgtttctcctctttcctccatcgcgccgcaggagaa

SEQ ID NO: 3973 - DNA, 3897 bp, Toxoplasma gondii
  source 1..3897: mol_type = genomic DNA
gaaacagttcgcccatcccacagatttcgttgtgcatcaaactgcagacaccctagattcaccgccatttcctccctgcgtcgcttctttcacagggaattgggtttttctatccggactgcgttcatgctgtagacgcggcgccaggctccttgtgaatgagccgtgacggatgctccgattcttctttttagcaagccctattgtaccgactccatctgccactttttaaggaagcgtctcgccgcggtggggaggggtttgtggaattgctggactgcggtttacgagcgcttttgtctcacacagaggcgagaatgtagcttaggcgaggactgggagcgtttgctgcttggctagaattgaggaagacctaaatgctagcactgcggctgccccgtatccctcgtgcagtgccacttcgtggaacggcgcacatttgggcgcggtcgcttttacaaaatatgttggtggagcgtaaaaatacgcgaagaaatccacatggtactgttttaccatcgccgtaaacaaaacattttgacacgtgataagcgcgcgtcagtcttgactgtacctccgctgccctccacacgcacgtgcacggaaagcattttcgtcatcaaatcgtaggctgtgcgcatgtagaaaattctgtttttacagctggcgtgactaaacaagtttgttgcaccctcgtgtgtcttccagggccaccacaagagggggagcttcggtcgcaatggtcagattcagtgttcgccgacgatcagttgtgcaccgctggcgcaaaggatagaacagcaaattgtttttatcgtgttgcttcgtctcttttgtgcgcacaccgcgcgaattgttcgattacgcgggatcgactcactgaaacacgttttccgccgttcctcggagtatttgcaaagatgtgtttttgccagcctaatgctttgctgtgaggaatcgacagaagccagaccaggttgatgacgcatcacccttagtcgcattgcgcgactcccaggttgtcctgcgatgggtgaagtggtgatatatctgtaagaacgacatacatccccgggatgaaagctggttcaactggccgtttttcttgcgtgcgaagcattccgtgcgcactgctgcgtgtcgcctggccagccagtcgaattctcgcagtgcccactcctcagattaccatttgtccaggatacatagatcatattctagacagctggggatgtacacgtctttactatgagccacgattggcgaatgcttgtctcaatcagcagctccaccaatgcggatattgggtccgctggtcactttttgtcttgtacgtgagtccacatttaccgacagcacatcgcattatctcttttccaccatgcacacgaggcagtttcttgcggcatagaagaaaggtttcgcaatgctggcgtggggctctcagcgagtcgatcgcagttgtcaagcggtgccgtgatcccttctgctacagccacttgctcactccctgcaacataaccaccttgctgtttcacttgttccatcagttctcgctacctacagcgttcaccagtaacagtagttttttgtagcccttgtattttgggcagggtgaatcactgtaattggattcctagagaagtaaggatcatgctggttatggttatatatattaagccggcgaaacagtgtgataacggcttttcgtgtgaccacagcagagaagtgcgctgtgtggtcgaacgtagggattcgcacttattgactgtgtaggagtgaagaatttacctgtccctcagctgctgtaactcaaccagcctacacctatgtgttcctccgttcgttgtctatgtaaagaggatggatgagtgtacacatggtcagaatctcttaatatgttgcctatcgccgtcaccttgagggcttctgcatctcttactctacccgccctgcaacgtagggcggtgtttgggctggtttcgttagcacggcgcgggactcctgctgtcacaggcaactccatagtcgctgttccgatcgttattttaggttggttaaatcctggatgacctacagatgaacagaaaattcaatgtgagagagaagcgacagatacacgctgaactgtgtggtctgtttcacagcggaggaatcctttgtttcttttcagaacaccgttacattcaggagcataccgtcacattcgatgatcttattgtttacactagaatagcttaattcgaagaatcagaaacattaaactaccgaagaaattgaatataactccagcgatgagagccagatgatcatggtttttttatgattgctgcacaccaccaccccactggaatgggtaggaaggagacaccaaaccaccgccgtaaaacacgggaacaacctctaacagctcacgcctcacgtgtatacaaataggcccaggaaatgcttttcgcatgcctgaccccacaggcaaatcattctctccttgcgaacgcttttcatgaagtcttcaagatacagagtcgtcaaccagttctcgaatggggttgagcgaacagaggccccgctttgaattcgtgaaaacaagcggcacaagttttgtcgcggctgccttgactgaaaaatctcgattgttgaaggaagtgggtcaacttccagcgtctgtgaaacaaccagtttgtcaaaacggtgcgtgcttaattcaggcgggtttcatcccgccgcttccccaaacgtatacagctgtcctcattgctttttcatctgcatacgctgttttgtgcatctttgtaccgttcatgaacagtccatccagacctctatctccacaattctgtagtgaatgcagagaaaggacagttcccaagtttagacctaactactcgaattggctatcgagtcgctcggtgctgtcgggccacagtgtacagattcgtctctcgtgccggccattaatagccgggaacttgcgagccgaacgacagtgcagggtaagggtagaatttttctgcatcaacggtcacgcctgaatctccaatctgtacccttttgagaaattgtttcttactcgtttcttcccgactttcaacctgaagcatcgaccgcaaatcgaaaagtgcgaaccacacgacaagcttgcatgcaaacagctaacggcagccgagccaacccccaggagacatctgacactccctagagacggtttctctgaaaaatgtgacgttttcttttgaagtgaccgccgatttcttttcatttgccgcgcatgcgtgagcataagcactgctttcggactcggtggacacatacgtgcctttgtttcgcttcagtgcggcctgttccaccgagcggacacacactcactacatttgcattcactgaaataacgtccaacttgctgtctcgcgcggaaagccagtttacttcgctggaatcgtaaaaaactcttcggattcagtgaggggcggtcttctagacatttaggtcatccttgggactcttcgaggcgccgtcgacggcacggcttctgtcgactgcaaccgaataaaacgcgcatcgacgaacagcaaaaacacacaaactggcaatgcatcaagaatgcagttcaccccttgactctgaactccatcgaggcgacggcgcggccagccgtaccttgtctgcctcgagggtcaagggtctaacgaatggaatgcacctttcattccccgaaacttccctgcatgttctagccgccttcaactgtgttccgccgcggctccgtcgcatgtgaagctttgttttaccgcagtttgactccagagcgtgcatccgaatgcgaatgacgtgcctcaatcaactttcacgtctacacacggacgcctacatgaagagttccagcgcggcaaacctgga

SEQ ID NO: 3974 - DNA, 4315 bp, Toxoplasma gondii
  source 1..4315: mol_type = genomic DNA
acatgcaggtaaaacagagcacgacagagagacacacatccacatatacacgtataaatgcatacaacatgtacatttaaaggtacatgcgcagagaggcaaagtgatatatatatatatatatatatatatatgtgtgtgtgtatgtatgcatagagacataacgccgttgacagaagcgtgtgaagcatttatttgtatgtgaagggagagctcggcaagaggtgtctgcgtctcaataatctccgccgccagcaataagatttcttcgctgctcccagaatccagaatgacatctgcgtagagaaatgtgaggaggtgcaagcacgggtacgcgcgtgtgtatcttgtcacgaccagatgaaaatggagacccgttcaagccagatggtatgtgaaggaagtactcgacaatttacgtaaggcaggatggcaggcaattcaaagaaccgctgtagtgctacgtgtctatccagtgtgtctgcggggctcgtgtgggcaaagagcagctgcagaaaggagctgtgtctgaccagtcggcatagaactcgacgatgaagaggtcgttggagccgacgacttgttccttgaactgttgaccagagagaacctttacaggtccgttgggcgcgtagagtccagcctgagcgccagtgaggaccgagaggacagcgaggagaagcgcgaggtgctgcgtctgtgcaagtgccattttgaagactttgaggaagcgagatccgcagggaggtttaaattcgagagccgaaaagagacaaggggaacagccgaggaaaacatgcgtttttgtctcggcgtcgacagtgtgcacaagacaagagagacaagccagggagggaagaaagaaccgcgcagagagggcgtcgttgcctctggggagagcaaaggccgcgtcgtcaacctgcttccgaaaatccaccaaaagtgcccaacaaacgtccacagtccacctgcacgcgctgttctttccggtgtacgtacacccaggggctaggcagagaagagacgagagaggtgcaccgcgccgcatgcgcgcgcctgtgaacgccatgcagccgcgtttgtcttttgcttttgcgttttcgtggctttctcgcttcagcgtgcggagagagaggcacaagttcgggtgtatcgacgccagaatttttcgaggcgcgggagaagggggaacgcggtgtgctcgtcagcagcgaagaaagagtcgacagccggcaggattgtttgcacagttttctcctggtttggaaggataaagaaggaaagtgtctgccgagaaagtttcgggtaggagaaccagtgggaaatgcagaaggtaggaagggtgaggacgagattggagagagggtgctacgagacgcaggctgtttttgatctgcggacagggtctctatgaggaaacagggaagagcgagagaaatccagtgagtagccatctatctgttaacagagggttttgaaaaaacaaagagaaaacagcagtttttctcgcattctgtcgcaagacaagagcgacagcagagatctcctcagatacactcgtttgtttcctccgtatttgtctccagctcttctgttgcctcagccttatgaagcgtcttttctttgttgtctcgatcttccgcctcggtggtttccccttccttctgcatcttcccccagttctaggtttccccttccctctgtgcttcgtcgtgcttcttgcatctctgtcgttcctcctccctcgcttgtccctcgctcggtcgcttcacagaggatgtcccttctctctctcgtgtctccaggaaaacacagagagtgtggaagcccccttatctatcgcaggttcggtcgaatgcaagagcacactctgtaaacttcatgccttctgatacgtttctgcgactatgctaacggcgcgaaggaaagtttaagaaaacacggatgcgacccgggcaagtcagcgtctcacaaacataaacggtcacacgcaacgtacatgcacagaaaaacagagcatatatacatatatatacatatatgtatgtattcgtcgtcaaaactgtttgtatggacttggctcctcagtgatgggcaaggagtcctgtgtgtagtgctgcgtcgaacatacacaggtgttagtatcaactttcaacaaagaaaataaggacatgaagatagagactacgagaggagttcgtcctcgttttctctgttattttgtgaggagagaagttccatgaagacgacagagaggaggcgtttgaaaagcagactttcttcctgtctgaaggtgttagactgcgcgccttttttctttaaaaaagacgcgtagctaagagaaatggaaatatttgcatcttctgtttgttttatggagggacaaaaaggtgaacacgcgttctttctcgaggactttcttgctcgaactcgccgattctcaggcttcctagttcggaaatccagtcgtttctccctacgacttcttttctgtggctttcctcgacactgctttgtatagtggaacgcggcacaagacgttctgcctaagttctcctgtgtatctccctccgctggtctgctttctggtgtttctccttcagatctctctagaaagaaaaagagccttaaattgggagaggtttcgactacaagatcgtcagtgtatttcctatgaagaaagaaaagtattctgtctgaacctctgctagaggcagaaggctttcgagttcccttttcaagtgaggggagacactctccgcctctattctgatttgaatatagtctttgaaacaaggggaaattgcttatttgacgtcaacgaaaacccccataccatcttctcgcacgcaatctgtatctctctgtcaaaatgcatttttttcttgaaagaggatgctgagaattccgttgttccttcaaagtgcagcctgcggagagacaacaggggtgacgaagtctcagaagcgacagagggaaagagagccgaggagacgtggagacggagatcaagagggagaaaccgagtcagagatcgatagagaggaagagatacactgagatggacagacacaaagagaggactggatcgacaaagagaaaaaagatgccagtgagaggaaagagagctctctatgcagaaacgtggacgcaagcgtcgaataacagagataaacccagatcctttgaacaacgatcgtttttccttccgatacacatctttctgactgattcagcagtatgtctcgcctctgtctactctggacacccgagtcgagacgcttggaaattccgagttcctcagtgtttccgaaaactgcaagaacgagaaaaagagaaaaagtcacagacttgtccaaactccgtttttctctcacatgcaaggcgtacatgctgggtctcgcgtgcagcgcgtgtagacggcgcgaggcgcttgcatgcagcggaaaaagtttctcggtggttgtctgcgtttgaagagagatctggagacagaagactctcagcattctcgatttttcaaggaagtagagcgagtcgttgtctcgtatctgttggagtctgtctgcaacgcgtgtttagcatgcacacaggaaggcggcggtggttcactttttgagaagagcggacgtctctgcctctccccccttcctctctcttttcgctgggagttcgagcgagagacgaagagagagacgctgatccgtgggtgctggaacggtcgacgggagactccgcatttgtcagactctgttctctccccactgtcgcaggagtcggaagagtcctctctctgctgtctcttcgaggcagggaaaaagcaggcttgatcccctcgtttctcgcttcctctgtctggcatgttccagagtagtttcgagatttttctgtccttcgtctgtcggccttggccctctcagggtcaccgctggtcgactcggagacgctctctctctgtcgttttggcggtctttctcccctttcgtctgagtcaatgacggtgctacacaaaacacagcagccgttcttcgccctcgtctcttcttctttgggggagaaacgggggtttcgtctccaactttactttcgcttcatcgcctttttcttctccgtctatcccgcgtctttcttttcgccagtcgccttgggtctctcctgcctcgcaccgctcctcttcactctcctcactcaagaagcacccgctgctgcggcgaaggttcgtcgtgtgtctggggcgttgtcgtgctccgatttgtccccgactccttgatctttctccactgttccgtctgtctcctttcctcctctctttcca

SEQ ID NO: 3975 - DNA, 1911 bp, Toxoplasma gondii
  source 1..1911: mol_type = genomic DNA
ttttctctcggctgctcgttcttcttcagtcttgggagctccgtagccgcgctctcgccgactgttgtcgccgactgcaactgcgcgtctctctccgtctcgccctccgttctttctgtagaagctcgagctgctgcctcgaggcctcgacgcctcggtctctgcggaggaaccggggattgtcttccccctggggtccgtcctccgaaagcggcgtttctcccctcctcgctctctctgcacagaggagcgacctgcggcagaggcgcgcgacgccgcagaaaccttagcaccttcgctccttgagagcgcgtgactgtcgctctgctttcctccttcgcgactccgcagtccagaacgcggccggccgctcttgcctccagacctctttggcgtctgcttcgcggcctcgccgacggtctccgaagagcgcgcagcgacgcctttggacgtcaggctcttcattttcgccgagatcttcacgaggtgtgcaacgcagaggaggcctcttcctcgtgctcagacgacctgactctctggagaagaggaaacgcctttttcgctcgctgcttcttttccatcacatagcgacaggcgtttccatccactggggcaaacacagtttggaccgacacagagagaaaaacgagagatagaagaagcagagaagaggatagaggtggagaagtagggaaagacggcgaagacgcgacaggaatccactggagagaggaaaggagaggccggctttgcccgtcaagaagtcaagagcggagagaaggaggagaaggagaagaaggaggagaaagagaagaaggagaagaaggaacgagaggagaaggaaagaacttaaagcaccggaattcaacgccctgaaagcgagacctgcgacgaagagaaggccttgccgagaagcgagtgtctcctcgttttgaggacaggggagacgagggtgagaagcgaggaacgccgcagagagcgaagaacaaacggaacctgactaggggaagagaaaaagaggtcggccaagggagaaagaagtttgtttcaaggacggctgccggttttgcgaggggagaaaagaggccgctcgccttgagtgcgggggaagcgaggtgtgtcacgacccgggcggtccaagtcgggaagcagaaaaacgcagaagcgataacgagaaagttgagtcttcaaaaggcaacgaaagagagagccgcgtttcctgcgtttggagaggtcgcgagacactgtcgcttgcttgtcgaaaccgagaagatcaacggaaaaagctgcgaaaaaaacagctcgagaatcgatgcatgcttctctccgcgccgcgcgtgtgtctctgcccctcaaacgcgcaaagctgtgctgaggctcactgagaaaaagtctcgactttttttttctgcagagaaggaccaaagcagggaagctcgacttctgccacgaagacgaaagcgcgcgcgctcgagatctctctgtctccttcatttccctcgcttcggcgctctgccccccccgttctgcttctttcatccgagtctcggtcgatttcctcctcttctcgctatcgttttttctctatcttctctcccaagcgagaaacaaacggtatcaaggagttctcgccgcctgggcgcgcgctctgcctttttcaatctgcgtttctctcgtcagtctccttcccgagagactcggaggggaagaggctcgagcggctgcttcttcgctcctctttctccttcttcccgtctgtctcctgtctcctccccagaactctccctttcctcttcttcttttcctttcttcttttcttcttcttcctcttcttttcttcttcttttcctctttttcttcgtttgtcgccttttcgagttgagtgaagagttctcctctgcgtctgcaaga

SEQ ID NO: 3976 - DNA, 2173 bp, Toxoplasma gondii
  source 1..2173: mol_type = genomic DNA
agtgttcgtgtctcttgcagtgctttaaaagcacctgcccatcccttcccccacagatgatacttcttcctcattactgagtcattttttccgcgaagccagaacatgattcacaggggataggtgtgttttatgatgagttaagatggttatgtgttgtgtttagtcctgtgattctcgcttgacgtgccatagccctcgagattagttcctaaagcattcgtctaaccgataagactcgttgtgcctccctcagtgagttatggtgcgtgtgtcagtattttggctgcacgatatgttgtgtggtaattgacagattcccgtaacaaaatcactggtgaggtagtttgattgatgcagtgttatagttcctgctatagcccagagatgttctgtggtttggcgcctccctattcctgctatgcaagcgggtatgtttccttccagatcgcgctgcaccaagacccatttcactccagatgagtcatattgcgagacataacgtgttccctcaagaccacaaaaaatggtggctgtttagtctagtggtatgattctcgctttgggtgcgagaggtcccgggttcaattcccggaacagcccgtttagggtgtcattggtccatttctgaagcagacaagactgaaggttacagttttcgcaggatgaggtttatcttctgctagaatactaggatagcgacgcgaacagcgcagtcgggatgttctctgtgccagcgtgtttctggctttttacggcttccccagctgttatccaagcgccgcaccttagcctggcgaaagctatgcaaactgcggcgggtctgaagtattcggggcattttcatctttgtggtaaacacattgcccttactagtaaaaatggtggaatgacgtatctagcagtcggttcttaatgtgacagtaatcgcatttccgcacagctacagtcgatagtgaggtgaagtgcttactgttactacgcgtgagccagtaatgtcgacctgacccgatcaggtttcttctcactagtgttcacacgttcctgagagcggatgtgatactatggtgtgactcgcagtgactcactagaatgatgcacagaagaatgcttaaaacattgatttaatgtacagtctgtgtgccctgaatattatctcgtgcaagtgttcgggtagtcctcgtggttccacgaacgaccttctctgccagtgaacacagatacgctattcggtttcacggtcgtgcagctaaacctattccggtcaacaataaaactgctctccatacataattccggagatcaacatgccgggtagaagacacgtgaatcgccagtgaaaagaaatcgaaatcaacgaatgaagggcgcatgcttttgcagaatctaagccccgcgtatttgttcacgtcgatggagccctgccggtcatcgaaactttgtcatgaggcagttctgcgtcattattgtttctttgcaaatggcacagctcatcaagaggcatttgataccactaaatccaagcaggtcaaacgtttatgataaagtacacgaaaagacgaccacttgataacgttgatcgcatcacatgctgagcggaaagagtagcaaggttgctttgaataatcgaaagaccaggcaataaaagctggtacaagcgttgaaaactttttatcggcgtctcttgattgctgaaaaagagcatgcgttatagcagcactaccttcgacacctgccccggggacaccatcttgcggattaacgggcacggttatgattatggagatcgctagcaggtactctggtccattactagaaaagagatcgaaacgagcccttttaaaggcaggttctgagtgattgaaagagacagaggaacagggccagcagctgcaacaccggtacgcgaacacgcagccagacttccaacgcgagtattcccgtaaacaccacacagcgttcggtagagaccatcccccactaccccattggaacgagcacacgaaattcgctaccgtctactacaagtcatattcattgttatcggttccaaaatatggtacatgatgcctttgtgtggtatttggagtctcaatcctgcttcgcctcctggaagatgcccaccacggtaggtgtgtcgaaggctcggaatctcactggttcaaggggacag

SEQ ID NO: 3977 - DNA, 2546 bp, Toxoplasma gondii
  source 1..2546: mol_type = genomic DNA
tgcagcttccctctgtctctctgatctctgagccagaaagtctgcccatctttcgactcgcgtcgccgggagagtggcatcgaagaattcggcgagaccgtcgtccaacgcaaaaggatcgttcacgcgttctccgccttcactccgatttctctgctctccttctctgtcgaagcactgtgttaaagttgccccagttcgccgagtctcccactgacctctctctgcggctccgcgaaaaagcgtttctcctcgcctctccgcgaggtctcctcctcctctggcgttggggtgtgcagacgccgtcgcgtcgttccacagagtcctgtcagagagggccgaagcgggtgtctctcccgcgcctgattgcggtctttctcgctcttcaagaggaccagacggaagcatcgcaggcgcatgccctgtaggcagtcgagacgttacgagctccgccctcgaggtggaacgcgaagccgagcttcgctctgcacctgtctctcggtgttctcgacctccttcttctctctgttccctgtgttctcgctcttccccgtctgctcccgacgcttcacccctgtctcctgcgcaccgttcctcatgactggtgtctcctcgttcagtggcttgcgaggccgaagaacttcgctgtccatcgcgttctgcgtctgagttctcgggcagagaatcgaacgcagctaagaggtcgagcaggtcttcttctggggcttccatggtgagagaagaaaggctacgcacccccctctcctactcggtagcatcttcgccgaggtcggaagtttttcctctgttcctctccattttcacacccgcggcatgcccttttccttccggtcctctctgctcctcaggacatggctaacctctctcgtttctcgcgtttcttcttgctctggtctcttccaccactccaaccgcccttgttattctcccctcgagggaatgggggcggcaagagaaaggaaaaaagacgagaatccacgagcgcgcaccgcctcaacaatgaaaaagggaggtcctgggagaaagcgcgttctgcaggagctaagcttttttgtctaaaccctttcttctcttgcccgcttttcagtcgggaacagactagcggggacgaagtcgtcaggcacccagaagaaagcgaagaagcgatggacgaacgctgcgcacaagtcctttgcgatgagagaatgagtctcaagcgcctcaatctgtgtgtttcgtctggaagactgaatgacacaattaaactcttcaagggcactaacgaatgagctttgttcctcacttctttgacaggcttctcgctcctctctccgtctctggaagcacagctttcaagaaggcgagaactcaccctcttcctttttctacgcaaatacagaaacgcactctgacagacacatacatgcgtgtgaataaggagctgcgaatctagttgaggtaaatcctgaaaaaatatggaaagacgacgagaaaggtgaaaacttcagagagcgcccttgcccagctcgcggcgtatcgcgacctcctgcgcctttcaggcgaatccggggaacttgcgttttctgcatttctctccctctttctcggctgctcctcgctctcgagaaggcctcccatgttctctaacttgttactttttttcagagatcgtgagtctcaagatttcgctttaaaaggcggctggtcgcatgcgctattctcgtcaactgcgtgtgtctctggagcgaggtacgccgtcgcttgcttcccggcgactttgaactttttctcgctctcggtccctcagagattcttatcttcgtttttcgtcctttgttccttttgcccgatctttcttggatgttctcctccttttctgcgcctttttccgtttctgctctccgtttctgccctccgtttccgcgccgagagacagacgctcagaacgccgagctggcagcggagtcgctgctcgcgtgctctgtgcgaaaagctgctcgtcgaaccagtaggacgttgcaaactctgtcgaaaacggattgaacatgtcgcttcttctcgttttcttgcatgaaagtcttcctccgtctcagtttccccgatgactggtttacgcttcgtgattctttgaggtcggactgccgttccgtgtgatttcctgtcaccccagactctccctccatcgcctcgtcgtttctctcctttcctgtcattttcctcgcttcttcttcttctcgcttctcctcgtcttctcgctgtcttttcctctccatcttcctttcttccggttttcctccgcgcttttctctggtccctgttgtctcgttgtgtcgtccttcctcgtcttttgattgaccgcatcgcgaagagaggtagcttttttcgcatgcacgagagaatctagaacctgggcaaagtgcctccactttctaccctccgcatttcgccttcttgcgaaaacggaactttctctttttttctctcgcgcgcctgccgcttgccctctctcccctccactaccactggttccttcgagtcgtctctga

SEQ ID NO: 3978 - DNA, 4702 bp, Toxoplasma gondii
  source 1..4702: mol_type = genomic DNA
agaagcggcgacttctgccaaggaacaaaccggtccttcatggccctggaaaaaagtttcgaatccacaaaaatcgcagaggatgtccaacatgtcgcttgtgcggtctacgaaacctttctgccacaaaccgacagaaaaacgagcgcataaacaggccttcagatacacaaagatatcgacacacacacacacacatgcgataccatccacatgcatctgtctatgcaaatatatatttatatatatatttatatatatacaaatatatatatatatatatgtgtatacaaagtaaaatatatcaatatatatgtagcgagagcgagccagggtcctgctccgttgcgcttagtaggctggcggaagttttcctggacttttttaaaagagttgtgttcctacagtgtattccatgaggacgcggccgtcgtccaaagcgattcgcagcgcgcgtttgtcctttcctccggagaagaaggaacggatgttcgcatcggctgtgcatggcgcgacgcagtagacaaaatcgcggtggtgttggagacagaggcgaggagagaaaactaggcccgtcggggcgcggctggcaggcgtctcctcgagggaccaaaccaccacggaactgtccagactcccggaaacgagctcgaaggaaggtttaagagaagaagcagaagcggaagaagaagaagaagagagcgcattcttggagacgacgcagacgcaccggacggctttggagtggacggcgccctcgaaggcgagtagaaagggagaagacgccatggcgaagaaggccgaacgggaggagacaaaggagaggaaacgagaagagcgaggagacaaaggagagggagaagaatgggaaggcagcacagagagccgaagggtcgctggcaagaaacaccggatgtttgcctctgggaccttctctgtgtgtatctcttgtcttttctttacttgcttctgcttcgttcttggtgtctctgcttctctcagtttctctagcgattcaccgcggaagggcatgggtggaaatctgtctcttgcctagtccttggtggttgcatgcatacacacgaaagaactctggcgcgtctgcctttcttcggcgctctctcgagcttcccttctcttttccgacttcttgtttcgctcccaaagacaaggcaacggctcctcttcgccagaaaccaggacgctttgcgttcttgagtgcaccgctagacgcagatagcgcggcacgcgcccggtgcatgcagcgcgagcttcacaaggaggagagcgctcctgctgcggctgcccgcgggaaaaagaagactacaaaagttcctttgctcgccttttttgtcgacaaaacaagaaagctcgaggacaaagcgcgcctcatctcagaaaggtcaacgtcgtggagcggtatgccaacgaacactgggcaaagccatcacccttggagggagagaacggccgcgagtgcagtgtcttgccgggggggcggggggccgcgcgcaaatgcggagtagcagagaagaaaaacgcgcagttccgagaagaatgcatttgtgaggggactcgactcagcctcaaccgtgaacgaggaggcaacagatcctcgggagaacacacagcctttcttctctcggagacaggccgtgagagacaccgcggctgcatgcacctgaagcagcggaagggattttttcgattttcgctccctttgttcctcaaacggaaagtgaaacgacctcgcgaacgctcttgagtgcgagcagaaacgaaaaatcgagagagatgcagagggacagagatgtgacggcaagcagtggtgggcgcgacggtgtcactctagtcaactggacggaaatgtagacaaacgcaggagcctggaaaccaacaacctgccctgcgagaactcagaatcaggcaaacgcgtaaaaagcgaagcatgcgaatctcggtactgtggcgtccagatgtgagaaggaccgagatgaacagaagtcaaggtggactctcattgtatccacgctgaggaagaaagaagagagtcccctgacggcaaccagatgagcttcgacgaaagtcaacttctttcatgaagtggacaacgatatgtccgcgaataaattagtcccacaaaaaacaagaacatgcacgcatatattagtaaggagagaatataatgcgggaagccacccttatcaacagaacagttgtgtacaaacagatctgtatatacatacatatatatgcatatatatatatatatatatatatattcggatgccgattcctgtttttcagggaccccgacaaatcacatccactaacagctgtttatggatacatatgttggcagatttgtatgaataaataaatatatatatatatatatatatatatatatatacgcgtttgcctaattgcatgtctattcgtgttcacaactgcacttccgtgtatttatatatatatatgtaaatatatatgtgtgattatgtttgtggatttgtaacgaggagagtaggccgaacggttgtcaggggtgtatggcaatttcatgtaaaaactgcgaatcttgcggctgcgttttctgctctggaggctgtgaaaagtttgcaggaaagtgtatctgactcggcatcttcttggcttttttgggagaaaggcggctcgcgccccgtctcggcagatcccccgagaaggacggcgcataaacggaggaaatcacaaggagagcaaaagagggagagaaacggagagaaagagacaacaagagacaggcagaaaggaaacagtcgagagagaaaaggataaggaaacaagacgaaagaggggagcgaagagagaaagaagaaaagagagatgacacgagagggggagaagagtagaaagggagagaacaagctagagggaggaaagaagcatatgagataggaggtaggtgagcaagagagaagggtggaccaaagcgttgagagacagcgagagggaaaacttggggagagagcgagtccaacacagacagacagaaggaacgacagagagaacgagggagagggagaagaagagagagaagcgatcgagggatcaccggggagcaggctagaagaggggagaaaagagcaggcgagagggaacgctgcaacgagaagggaggagagagacgaaagacactaaagctggagagcaggagggaggtcggaggcgagaggttggcaaaacaatcgacagatggaaaataaagacgataaaaacaccggcgaggtgaccctgagaaaagagaacaagacatcgagggtgggcgggcgggggtggggggcagagacagcctggatgattttctccagaggaatttgtgagacagatttctgtttcggattgaggaccgttagaagaaatcaaagaaactccccgttatttcatccttcaagagtttttcctgccctgctgccagggagcgaactgcatgccttttggatgttttctctcagcgcggatcgctggcttttttttctgccggcttgttctcctgttgtcggagaactcttctagaaacgacgctttgctgcaggtgtctctgtttctctttttaaaggaattcgaccgcattttctcttcgtttctgtcccctacaacgcaaacttttgcggcctctccctccatgtcttttctgctccggggctgtctcgacagctcttctcgttcctcctcagcaggatcgtgtcaggattttactacgcaaggaagttctcgttttcctggaccaactttcttttcgaggggaaggacctcttcctgacaggcggctcttcacttgctgagaggtccacgagacggcgcgtcttcgcatgcagtgccgcggcgtttctctctcttctggatttctcatacacagcgacaagcactgtctccgtttccaggaagcacagcagaggaccagctgtccagagacggcgagggagagagaactggagagaaggagagaggagcagagagaagggaggtagacgaagacagatgaggcagagagatgtctagagagagaagagaagggaggaagagcagggaggaaagccgagtgaggagattgacaagaatggtcgtttctctgtacgactttccagggacgttctgcgtagtttttcctgtcttttatacctgaggagcgctcgcgtcgtattcattgtctctcaccttttgagaggcttttctctgtttttgaagaaaagttcgctttcttaccaggtgccgatcctcgacagtcactcagaaacgtaaggcatttgagagcgcgtctctctcctctctttcttcatccctcgttttctttctttcctctcctccgttctccctctgctccctcatctcgcttctgcggggtgttcgtctcctgggcgtatccaagtctctctcctgcgctcgttctgccgtctctggagacgccgcatgcacctcgacgttcggcgcgtccaatgagtctgaccggctaacgctgcggatccgccatgggaggcggctcctgttcctggacttctcgttcgcgtctcgccgcttgaccgcctgcctcgcatttcctccctcgcgccctgcagactgcgaggagtctgctgtcgggagagaacacagcatgcggacctcgagacgcctgcgcagaacgaccgcagacagttgagtgagcgtctgtcgttcgtgacga

SEQ ID NO: 3979 - DNA, 2023 bp, Toxoplasma gondii
  source 1..2023: mol_type = genomic DNA
cgtgcttctcgtattcaaagtcgctattccattccatgtcatcggaggaagagcaggcgaagcgagcttccctcggcctcgtgagtggcccgcaaacaagtttgcttccagtgaggggcgttcccgcgtgatgcatgaggtttttttccgcttcgttgacgcgctcgtcttcacaagtctgaaaggaagtttgatcttttgtccgcggtatgttgagggatccagaaccgggcccctgacgctcagtcacggtgatttgcagaagcaaagcggaatctccgagaaaccgacttcgactgcgcggaaactgaaacgttttgaagattcgagagaaattcgtttacagcaaaaacagtgttccggggcgaacgaggtagtcacaacaagtttggcagcttcgtccctcggtctctccaagagtacggcccttgcggttctgtcgtgctacataatacatcgcttggttgctagcgaacacaccagttttctgctgggtatcactttagcatccgcctctgcagcaggtagtccgtttctgttcaacaggagccaccgtgtggttcggcacatagctacttggagcgagaaaccaagcgcagaatgtgcgttttcatcaagacagtagaagaacgcacagcaagtgtaactctccgataaaccctcgaattttaggaagagatgacgactcccccctcttccgtttttctcttataccccgcaaaaatgccgaggcagtctggattttacccttttagtcgttaatggacctctgcaaggctgtcaggacactgaaacaggttatttgtgactgtctgctattggtcgagggaaggcgcaaactgatcgtggcaccttcggattccgcagatcgcaatggagactcaactggagactctcagatgtgaacacacacactgtgggggacctgccatcacataagcgcacagaggggaagtgcacattccgcgtgcacgcacttcgagggatatccattgttttgacgggaagctgacgagaaataaatgaagcggaggttttctttaggggaggactacagtcacttatcgtcggcgtgtgagttcgaggcatgcttccccgttctgagattttttggttgacgatgccgtttctctctccgctagttttcgggggcaacagctggtgtgtgaaagcaccgaaacttacatatagaacccttttctagtcgtatcattgcagcggctgttcacatatgcatctgttgtggtagccgaccatcttcacgttcaatttcttgcccaacttgcgtgcgcgagattccatatgcatagaataggtgttacgtttgagaaattctttcacgtgttgtcacacgcttctttcgttttcagactctatcaagaagtaagtcgacacactttggctatctgggctggcttggtctttctagtaggcaatgtcaacacacaaaagattttgaccagctctcacgctcatcacgcattcatccacacatggaatcactttggagtccacctccatttcagtgtgcgctgatcttgttgtcgtccgcaaatacgaggtgaaccctcgacccgtgtaatggcttagagacagttgaggaaggcggtcctatccgagatcgaactagccaccttttagatgctcgttcctgtcattcccgagttagcacagccctgttagcgcctccggtaagataacctttccacctgatggaccgctatacaagtcctctcgttttctttccctcagagcacatgtctcagccaaaagttgctccgtgtgcagatacgggctacattcccgaagggaagactgatctacgacgcctaacctgtttgtattgtatcgaactagcacatctcgcgatcatcgagcgtatcaacaagatttagtcaatcccgaagatatctgagacgatcacgctattccaaatcacagccagagcctgtgtgtgccacctctccaaggctttgtcatcggaactcattagcatcaagcttgacggcaatttcgcaagaaa

SEQ ID NO: 3980 - DNA, 3982 bp, Toxoplasma gondii
  source 1..3982: mol_type = genomic DNA
caagcacaggaccgcagcaggacgtcaccagacaatttttaagagcgacagttgcaacttgcggacctgaatcatttttgtactattctctcgatagtggcaaacgagcacgactaagaaacgttcgaatcgcatgcaacgtaacagtcgaattcgaactcgcttcctagcacggtcactctttgcgcattctttccaaatccttcaataactcggcgtagggtgagggtcgcgggttgaatgggggcgggcgatatccgtcgtccaactccgtttttccagcctcagcaggcgccgtggaagtgcgggtgccgccaaatcccttgacagcctttgcggcggccgctgctgctgccagcgttgctgctacccctaaccccgtcaggactcccttcttgaccttagatttcctgcttgtcttgtctccctcttcggactccgaagcagcttcgtctgccggcgtgaccgtggattcagaggatgacgagtctctgacgactgtaagcccactatcttcagttgaaaccgaaactgagtcagaaaacgcgggcagccgtggaaatgccggaaacgctgggtagccgtacgacgctggtcgtggaggcgtgggagtagaagtagtacctggatagctgtaatcgtattgagactgttgtctcaactgcagaccagaataaccgggagtcacctccgcacccggttgaacagaggatggggtgaagacaaaaactgaaggaccgggaggaggagctgctgccgggtgataataggtggccgttgcttgtgtgcgaagaggctgctgcggaatcgcctgtacggggtgaccaggtgttcctggaacgacttgtgcagtgtagacacctgcaggcatatagtaaccgccattcatgggagaacccgggcctcccgccgcctggggcgcctgcgggacgccttgttggtctacgatcatgaaagatccatcagggttttggataataagtagctgtccctgaggaggtggagagccctgctgtccgtctgcgtagggatacggagttttgtttccgtacatcgagtggtagtatctctttttcgccgcatggtgttctttgtcttcccgccccgtgaggcccgccatatctgcgaggtaagaaccaaagctgcactcacctccaaacgcaagatgcgacaccatgacgacgacaaataaagaaaaccaagtgccctgcattgtagaaaacggagttcaggatcttcttgtctgatgtctgtctaaaaacagtggacgctacacgttccacggcgtgagtacatttttcaacggcaacaaaaaaatagactggggtttgctctgacgaaactccgggtatgcgttggttgtgaaaaacagggaactttgcgtgtcactaaatgcagacacggattcgcgtctctgtccccgtggaagagacgcgacacaaaccgcccaacttccggttggcacaataaaacatctgtacctgcttgcgtggagaaaggtttgcctacgtaaaatttagtcgcgctcttgggagtcccggccgcgatgattagagaatgctagctacgaaaaaacctgagtgcttggcagcttcgagggaaagtacacgtttcgcgaagtggacaacggtgcagcacccttttgggggggaatcgattcgcagagaccctggaggccacaagaaagagtttcccacggttgataatcctcatgcagaaacgccaactgaaacatacaagtaccgtagcctttcgctcgaaatacctcttcatgaggctcctgttttcccgtgcgcgtatacgcccgtttccagacggcggggtgggtgattcaaaagcaacgatatacacgggaaatccgaaatggtaagaacagctcgaatccgtggcagttgccattgccatttagacgtttgctcatggaacatgtgtgaaccagccgtagtgtcgagatctatgcagttgacggtgggtaaacatcgcatcgacaaggtagagcagtgtatgtggctgacttctggccgtcagacaattcttcacaatctggaaccgcgtctagaaccctgaggcaccttacatctgttctgacaagagctcttcgctgttgacaatgtgtacgcggcaggtggttgccagtgtgtggacgcagaatcgcttagacgagcgtggagcgtcttcggcgtgtgcacagccgttgtagttgtctgtaacagctaatactgtgaacagtcgtctttagcaatgagtagttgagaaaggaacggtagaaaagggacaagaacacaggtatagcagccgccgtcagattcttttgctctagcagtcagcgtcgcttccacgagtcctgtattcctgacgtcctgtgcctttggcatttgtttccacagcccaacgaaattggcgttggcgagggaagaatctgcagaatcatggtagtccctaacactgacagtagtgtaggatgttgtgtcttccatgaatctggcaccttttatgatttgatgctttaagcaaacaaaactttgggatgaagaccatcctcccgccgatgactgccattacaaggaatatgttggacgttaggataaccgctgaggtcgactaaaaagcgagggtacggtacaataaacggtactagacggttcgatccgtcgcgtcactggtatgccctatcccagcagccatgatgcggggatctcagctttcctgtacggtagatcgcagaatcagtgcacctgcttgacctgtcagggtttattctcttctttcatggctacttccctattcctcgcgagccaccccctcatatcacctgttggttttgacgctgttgctctcaagcattggctatcccacctgcttactatcgatattactcagtgtagtgaatagaagccataacgacgtcacgctgcctagcacttgctcaaacgtaccactggaaaaattacctgatttgcagaacgtacagcatcgtacacgactgcctttgcaggggtcgattgaccactctacttgcacgcctttctgacgcaatgtggaaagacggaatcgcgttagttcttgggtaaacgacttctgaaccaacccgtattcataacacagccatcacagcttgcccgtgctgcgacctttcacattctgacaacaccttccctctgtccagatagtcagcgatagcctttgatgacgcattaaacgaggcatcgaagcgagcgcagaaattgccacagcatagaggcttttgcaacgcactgtcgttaagtgactaggctttctccgatcaagctgcacattcagagaattgattctccacgtaacccgagccaggcctgcgcacctcccgctgcacatttggccgcattgactatgcctctcctcgacaaggatgtcagcagaaaccctttagttcatggatccttaacgcatgacgttcgaacttccagagttgacaagataacgttctgcacttgttcgtatttccgtatttcaagcgcccgaccgcgaaaaagccgtaacaccgtcgatgacccacgggtcggatcactctgacgtcactagaaaggacatcgcaactcctctctacgagcgaaacggccttagaagcagccagttgcttgaaaaagaagctacgcgggcagccgtttgtcgcgttggctatcccttcgaaaggctgcagtggacgaggggctgaagccacggaaacaaacatgcccttccactttattcactcgttgtgcgcgtcgcgtgttgcgcgtcgatgcgcttgtcccctgacttcttcgtgagggcgcggcgctaacagaactgcgcgtttgccgttgatttaaggatctcccagattttcccagatacatcggtccgccttttttattcttctgttactgtaagtggatacgctgcaagaggcaccgcttcttctgtggaaccccgcacgcgcagctgccctctgtcgccttttccgcgtcatcaactggcaaga

SEQ ID NO: 3981 - DNA, 3482 bp, Toxoplasma gondii
  source 1..3482: mol_type = genomic DNA
ttgattaaatgtcgagttcggaaaccattgtacatgcgctcgccctttgcagacctctggggtagtgccttccgcaagtttttcgtggttcgggatcttcacggtggcagcgctgcgcaaaagagaaccgtgcaagcaatggctatctttggcgcctctggtgtgtaggcccgcatcgttcctgatagatgcttaacattcattgacgccactgcactcatcctaaagagctctggggacgcgtcaaccgtgttgtcagtgtcgctatgttctcttcttattgtgattacatgccacaatcgtaacgtacgacaccactcgactaaatctaacactgccactgtaggtgacgctcggcactgacgagtcctgtgcagccagtatccggccgacatcggcgaaatttattgatttgtcttcacacattcgaaacaccacagagagtaacactgccgcagaacagggaagccgaagagttgtaggacggcagccaagagggaacttctgctctgtatgattttgcagcggctcacaattacgacattgtctggaagcctcccccagttgccactttgcttagctactatggaagaacaatgggtgccagagaaggcatgtgacatacagaggaaagaaaaaataacgtcaggcacgtgttcattgagcagcgacaagacaggtcgacgtcgatttcaatgcctcttaagaagataaggcaccgcgtagagcatgcgttgtgaaaagggccacaagaatatgtctccaaccctgaaaaggcacggcttctttggtagcaaacgaaaccccagctccgttgaagaccgtgtagaaaattaccatcttaactagacgaatcactctcatacagcgaagaatgctgcttctgagtaggcggattgtggctgcgaatgtaatcaagactacagattttgatcctacttccaagcgggaagccactccataatgtgtgctgcatatagttgcttcggcatgtgttcaacctgcatttcactggtgccaaggttctttagtccctcaacaagagccactagcgagatgcgaacggtgcagaggggagctgccgatcaagaaacgcagtatctgggttgcgtgttttgctcattgtatttgcatcggcttcgcaggtagaccgcagcatcgcatggtcctgcaagctgttcaacgccccgtgtgcatccattcatcgcccctcagtttctttcgtgtcgcagtagaaagtctttaaagagtgtgctcagaatgaacgtgagctcgtaccagtccccactgaaaactctacagctcggacacgatcagagcgacgctctgacggtcggcagtaacgagcctacgtacggagtcaatgtttcagtaaacaagatttgtatgatgggaagcattaatgacttagtcgaactgcatggaaggactaaacgcgaaaccctgatgcactggtagactttggtaaacagtgtagcaggctaagtgttcacagcgtctccgacagctgtttcacttgtgacaaggcggtgcaaattcggtaaagatgacgttcgaaaaggagagcacccataacaatgccctgacacgctggataactgaaaaaactctatgtttttgtaccagagaccctgcgcaaggcagaaggcctttttgccaagcctgagttagcacgagttaacaccgttaggcccttgacctctcgcttctcgttgatggaaaagcatcgcggcctctgatctgccgcacattggtttctttccttcccggttatgattgacggctctattcctcgagcggcacatccttttgtcgtgtgtcggggcatttccggtatctctgtgtgtccccctcggaacgtttgcagtgtctcccccaaaccgcctagaaaccccctgcttctacccccgctggtggcgttttagcgaaattcccgtcgttcgtcggcacatcctgagagactattccacgcgtccgcaggacgagagcacatgaaaacggagcagaaacgtcaggtgttcccgaaatttccgtccagctaacaagggacccgaaactgcaggcggcttttctccggggactcagcctccgggtcaacccacgaggtgtccggcatcgccgtgcaaagaagccaccctctgcgtagcgagaatgcgggacgctggaattcgttttccagattcgactgacgaaagaaaacgactgaacaaggcggaactcgctgccataatggatttatagatgcaaagaaagatcgatcggaagcgagagaacggagccattctctcgttcccagaagaaaacgaaactgccgacctacagagagtcgcccgactgctactctctgcagctcgtgtgttcgtgtttctcggttctggcgtgcttccgtctcgaagagagactctcacctcttccttgcggcacctggttctccagagtcttggaggcactgaaccgaactcttcgcttcttctgaagggaacggcgctatctccagtgccgcgacagtttccccgtgcttccgtcccaggagagcggcgcagcccggctccccctgttccaatcgtccaaagaaaagacaaaacgtcttcagtgtgccacagctctggaatttccttctctgcggttgtcgtggtgccaagcacaatcagcagagtgcggaagccgaactcgttggggggaattctgccaaccgatgcgagacctctggtgtaacgctctaccgtttctgcacgaacgtgttcagttccggacgcccctggcattcgtgaggtagtcagtgtgtctgcaaagaaactaatccctctgagagtcgcgtgcaagttgcggacgccgttggagaatggaccggttggggctgcccctgaaatcggactcttactgtcgccaatggaggcggccagcgtctttttaatgcattgtggcactcggttgtcgctttttcttctttctcgttagtaatcggggcgttgaacagtggaccgtgtatgcgtgcgactccacgtatgtgtcttgtttcacgcaacaaaggctccttcgtcatatgttttcttccaccccagcccgtgcctcttcacgcacacgaaggacgccctcaactgtgtttgtttccaaggggactcggtttcaagtgtggaaaccgggcaaggaccgctgtaaatgcggtggtgcagggtcacacacaattcatgacccagtttatggcacatttctgggcaggtgtgtcagcacatttgaaagtgaaagctcactaacgtttttgccccgtgagtcctgtctgtggtaacgccttgtagattgcttttgcttccactaccgtcgctgttcagacaccaggttgaatcagtttcgtattgtgtgcccgccctgagttttttacgtctattttgacgatcaggttgtcgctgcccgcccgtcctgtcactgagtgggtgtttcactcttttctcggaaccgatcgaactcctttcccttcacgaaaa

SEQ ID NO: 3982 - DNA, 2130 bp, Toxoplasma gondii
  source 1..2130: mol_type = genomic DNA
agaagggctgttataaagtctttctggtgaaacctgatgggatgaccctgggtaatatggtgttatctttcatggctgcactaaattcaacaaaatgacgctgctgtgggtcgtctgctcgaaagggcagtgaagctagccaggttgatattatgcggggttctgattgggattggatcctttaggcgaccagtaatggcttccttgggggcaaggggaaaatagtccgagttacaagcgatcagatggaggattattcatctgtcccaccttttgacagtgagcaggtaggccgagccggccactgagcgttttaccgaggaggcaaatttacgatgcttgcgcgccagccaaagctgctgtcgttgtggggggagtggtcaaatcatcacatgggaaggaataacaccaagatttttctacgtgcgtgcgactgtggatgaagccacgcatttcgtccaaatcggttttcccacgttgggcaggaaaaactatttgtacgaggattgtatctggggaccttctgcccgcaactacgaacgttgtcagacatggctctccgcatacggagggacagcaacaataagcagtcgatgtaacaaacagcataaacgagtggaaccatcttaccaccatatctgggcacaacaaaggcaataaaggcatgaaatgaccagaaagacagccaactcttccttcctggcactcgcaacatactttgtgttcctgggtggttcgaaagtcgtttttccaggaaccagcgcaatctcctatttcttaggaccatgcggttgtgtgtttgtagctcagagtagatgccaggggtagtggcgtcggttggacactgttctgtccattgagtataacttgatggttgtaactcgtgaggatagtagaagacaaggcctgaagcgtcgtctgccttggtttcatttaaatggtgctgcatgtatccagcacaaagagctcggctggtagtccttcttctgtggagaacttttctagttgtttttgtggaaccgcgagcacaccggtgcatgctgtactcacacaccggctcccgggggtcttcatggcggccgacgcacttgccgatgcagactgaagggaggaatatgtgtttctcgtcgtttgctgccatcgagattgactctttcagtcataaggtccaagtcaaatacaccgacgcggacagttaggagttttgacaaaggcaaagactcttcgggcgaagccccaacgagatgccaagtcggggttaccattgccggacggcgtcaactccctccagctggcacgctgttgacttttgctgagccgcaaacggacctttgagcagaacctctcccgagagccacttggtcttaccgaggagttggtacttttttcaacctccacgtaaaaaacatttgctacaacgatgcctgcattccagctgtgatttatcctgacagggctgcatgcagtgtcatgcacgggagcgccggtctcacgagtggcattttgagaccttgaattcgccaagggtgtcttttgtgtcacttcccaattacagacttgacagaatctcctcattgcatcgacagccgccgtcagggactcaaggccctggactttcgtctcttcggaccgacagcgaatgcgcgggccccgactccgtttgcgcaaaacaagggcgaacttgggattcggttaaacaaagacttccaagatctgaaccaatcgtcaagctcgtggcatctattcttcgcagggaaagcttatgaatcgaaccgtgtaattccattcgaagaagcagggacactgcagtaccgacaggctgcaatctttgcaggtctcgtaacttcatggcgtgctatttcgtggctgttgttgtgaggcagacccgagttacggagttgaataaagtctcgacagtcggcatctcttcgactgaacatgcactgccctcgttgacacgttgacgccgtatatcccgccaaaccatcggtgttgaatgaacagcgtttcctcgcgaccccctctgatactccgcgtgaaaatccctgctatctggcgcctcaaaaagctgggagaaatgcttcttgcatgtgtcgagggcctctccaacctggcggtgaccctttccga

SEQ ID NO: 3983 - DNA, 3089 bp, Toxoplasma gondii
  source 1..3089: mol_type = genomic DNA
ctcttccttctcgtttcgctcactcaagcttgctctcgcctctccgagctccggcaaggaagacgaggagggagaagaagaagaagaggcagaagaagcagaagaagagagagaagaagaagcagaagaagagggagaagaagaagaagagggagaagaagaagcagaagaagagagagaagaagaagcagaagaagagagagaagaagaagcagaagaagagagagaagaagaagcagaagaagagagagaagagttttttgtggggtttgccatgttgggaggggaagctggtgtcgcgcggtcctcggggaaatggtgttgtctctcgaggagcggtcaagaacaagggagaagaagcaaaagaaagaaaagaagcacagaggaagagagagggagaaagactggagaaatggcaaaactgggaagagagaaagaaaagttgcgcgcagatgagagatgggagctacggcgacaaggacggcggcgaaggaacgaccgaggagagaacagacaagacgagaaactagaaggagagacgtcctgaattcaacgaaagaacatttcgtttctcgtccaggaagaaggtgcggcgacgcccgagagcagcatccccctcacgacaaggaggatgaagacagaccgtaaagggagccaggaaagcgagaatccaggctctggatggtctgagtcaagaacgcatgcagtttctctcgcgaaaaagaaggctgaatggggagaaagcgaggaagacagagagtcgaatcgaacaggagaaccttgtttttaaggggagtttcctgtacagatccgcctcggtctgtgcgagacgtcggtggcgaagaagcactgtgtgtcttgtccgaaaactgagagaaatgcgagaaacttgcttctcacaagctgaaaaaccgaaagactcgggagtttccctcaggtgtatgtacaccccccgccaggcggttgtcttctggccgagcgagagtgggccgaagctcccccgctctctcccctttttcttccctgggtttcagacctcgggagtttttcttccggccagagacatcttatctacgatatctccttctctcttctccgtttttcttcttcttctcttttctcctcttcttctctctcctcgcctcgtgtcttgcgcgtagtagcgaggtgagagcgagagacggcagcgagcggtcgcttctccagggtgctgcttcgtagtcgccgaggagaatcgaacaacggagcgacgcaggagaagaggcgcggagtcgggcttcccggttttggcgctgcgtgagagagagccgcgtttctcgcagcctttcttgaggctttgacggaaacagaaagcgaagattcagaggtagagtcacttgccggcagctcgcggtgtgcagataaggcgcacactgcgctagagaactgggcgctcgccttcaaaaagcctcgagacagaggaaacaagaaacatttttctcgcctctcggtggattttccaggagcggtatcaccgtcgcacaccgctcctcccgtggtgcacttgggagagaggcgcggaaaaaaggcgcgctgcgcgtccccgcgtctcccgcgaaaaaaggtctttgtcctctcgctcgaagcagggaagaagcctcgcgtttgcagaaaagaagaaagcagccgccactgtcggtggggaaaccggaccttcggcgttgccgcagatcacagagtctcccctcgagctgcacactcgaagagtcgccggaaaaagtccaaaaaccggagagagcgcagcgttcgccttcgcggttccgccctcccaggaaacgcgcggaacaccggtcgccactgacaagacagccgaaactcgcgctgcgccgccagaggtgggcgtctttctactctaaccggaggtccgtgtgtcgcgtccccgctggctcgcggcttttcgcggagatcttcgcggaaccgcttgcgcgccggcgttttttctcagttccttcctccgctgcctgtcgtacactttcgccgaggaccgcagcggtcaccgactgcgcagaaaacgacccacagaagtgcgtgccccacagaagaggcagctgcaagcccagacgaggccttgtgaaagaggagagaaaacgagcggagacggcgagagagacggcgagaaaaagagcagagaaaacgagcagagacaaagagaaccgacgcgagcgcgcgaggcagaaacgtggaaagcctcgaggcgcccgtagtggaacagacacagaagagggagagaggaggcgcgtcgagagagcggcgggtgagcgcggggagaaaagcttcttaacaggcgtagagcggaaacgagagaacgagtcagctcggccaaggtcgttccgtctgctcctgctctcttgagaaaagaaaaagccggcgcgataaggatacacgtagcacactgccgcgaaccgcccacggggcgactggactgaggcgagattcgctccgtgcagacaaccgagaaaaaagccaggaagcgtttcagcagatgtgaggaagcgagagcgtaacgcagccagaagaaagagagaagaaaaagacttgcaggagacacagacagaagacagcgcgaggaggtgaaaggtagtagtgtgagaaggaaaagcgagagggaagcgaagagcggaatggcggaagacacatggagagaacgaactgctgagcatgaaacaagaatttctttctggaagctgttgaaaaacgagtcgcctcccccgtgagggtgtcgtgaggttgttgcggtgattctccacctgcacagagtctcgcccttggagtggatcgggcagagaaaatcgaggtcaagtggtgctctctctgtagcttgagttctcggatcagcttcaacgcgaactctgaacgagaacgcactcctctctgatattgcttcaaacagaatcgacgcagaaccgtttcttgcttctatagttcagagttcctctcgtccgtctgcgtccttcccccccccctctcctccatcacctcctcttctgtcactttcgcctctctcgcctctctcgagctctttctctttcttcttctcgtctctccctcaa

SEQ ID NO: 3984 - DNA, 4519 bp, Toxoplasma gondii
  source 1..4519: mol_type = genomic DNA
acaatagactgccggtcacaggctggccacacgcctacacctgttacatgcaggcggtaaagcacgtgcctatacacctgtggatacgaaggcgtatatagaaggaggtggctgtgcaaactgacctcccctgacaagagagaactgctgcatcgagggatgcacgcgtccaatgaaagtgttgctctccatgcgccgggacaagacaatagctgtgcttggtgtccgcccaggaacaaagccttgaccaggcactcctcgtagtgtatgtgccggcgagactccaggcaaggaataactttcttctggcttcaccaatcgacgccccgcctgcgccccagcagcctctaagtcaccctcctgggccttgtcatcgtgtccgtctttgggaactgagaaaaaagagcaaatataggaactttgtaccatgacgcagaacggattcaggcaaccttgagttggagaaacaaaaacgtcgacacggtagcgacatgggggatatcaaatacaagacatgatcgatgggttttgcacttggacacgaggacgcagccgaacagagcgggacgcgggaaagcgggcgaaatggcgttggagtctaatgaaatacggcctctttctacacccagcaatcgacaaacacaaaacagttttctgtacgtgtcccagtgacaggtactttcccctgatgtacccgcagataggatatatagtgtgtctgctggtgtagtgtctgctggtgcctacgcaggtaaaaacttatttcaggttttacagacctgcttatgtaacagactatgcacaagatatctggaggccactggggtggcacgtggagactactttgtttccggtgtaaaacgcacattcggtcgtgtgagtagacatgcaacaagaccagttgcccttactgggggtttgtcgctcgtccgcggtggtcgccatgctagttcctttcccgtcgaccgctttttatatgcgcacagtttcaggaaatgctactagccacagcgacacgaaatgcaaagggatttcgctcgctggtcgtgttgcctggcgaggtccgaaaagcgcaccgattcttgagggctaaatcgcgggaatacagaagtgcacgctaaagtgtaacgtcgcttgcgtttcacatttaactcaaagcatcatatgacttcacctcaaagaaaacgaacaagcctcatcgcaccgattcgcctgcgcgattgtcttgttatggggaacagaaaccctctgtttcgcaaaccctatcccacgcagcgaaaagtcaagattcacgccaaaaacctaatcaacacggcgaagaagactcattccacagcccattcgaacagacacaagaaaaaacactccaatgaaaagctactctagagctctgctgcttcgagagacaaacggttcgcgggaggtaccttgattttcttcccaccgctaactaggtgggcctttcggtgaatccgcgcggcgaaggagattgacgacacacagaggaaacttctggttacaacaaagctggctgtgtagtggaaaagtgcagtgggcacgcgtgttccgaaaaggacgacgaactctcaacattcaaaacatgaccgcagaaggagtatccgcgtgtgcgaatatcgcgcagcgcattagtgtgctcgtttcccattataggaacaaataatttacagagaaacacaatccactctgcctttatttgaaaaaattccacaaatggacacagtgaaaggaacggcgggcgaccccattgcgataatgacacgatcacgtgccagccccagaaagcatgcccaccaagtttcttccagataagcaagttcgtgcggatgaggtagcttcgtagatagtatggcttccaccttcatgggctctttctcgcgagcccacgcaccttctccaccactgaaaactcaaggtgtagaaaacgagagttgagttagagattcgtcacaaatcccaattacgtcatcgccgtatacgttctactactgcggcatctttcaatcggcactcgagcagcggtgctggtcgcgctggctcgttagacgctggcactggcagcatagtacagagcggagaagtatgaaagaaggtatttcgattggaagattgcgaccgtttgagtcttcaacgcaaaatttgctggtagacgatccttgtccgtctggaagaacggccacaagcgctatacatagacacctagtcgcgacacgtttacacaccggtcttcgtcactcgttgcggcgcggctgcacacgtgcaacagggcgagacacgctatgttttgttgccaaacaacattcttgaaaacaggcgttcatgcgtattcaatatcgtgaggtgtgtagagaggcgtctgtcaaggttcaaacacagggagaagcggcacagacgaggagctccggcgttggtcgcatggctagacgagtcgtagtagctccgaaccaccactcaattgagaagaggaacgaaccgacgtaagtgggagaagacttacattgggggggtgtgagttgggctggtgtcggccacaatgaaacgacaacctgttttatttgagccgatgtcggggccggcagtagtggttcatcaaagctgctagtctatggaagtcgtccaggcagtgtccagttgtccaaaagtagacgaaaaacctatccagtgacacatgggtacgaaaacagatcagagaatgcgaaaaaaaccgtgcctatctgtcctgaaggagccgtaaaggaatgcggcacccagtatgatgtggcgagcataacgttccccaccttggcgtcacatctgtgcaagaatgtttctgggcttactagtttttcatctctctctttcccctgcacagcgttagcttaccaccctggcaaaacgaagaaggcttcctcaatcgtaaacaactgttctcggcagggatcgtgtttcgcatcgtgcacactgcgcgaccaagaaacgtggaatacgtgtgtcggggtaaaagggaaacgcagtagttgctttacaccctatagagaagtactcagagaacgcaaagctccatatcgcgtacgagagtcccgcttgagtggcttacaggaggcatcatcgtattttgtcttgccaacacgtgctgccgacgtgggtcgccatttcccattgtcgcaacaccaccgaaacagacatttctgttcccgctgaggggaggaaactgagcaaattatcgcctacctacgcatgcaaaagttaaagatagagagtaatgcagagctcagtgatggttgccacgaccgacgtttcagcttggtgcgtcatgggttttcctagacggagccgcggtacggaaggtacggatcgtgtcacgttaccgtgggtgatacagtgacatggttggacttttttttctgagatagcgtccaaccacgaaggtattccatctctgcgacgattttttagaagaggtagagccaacgttggacccagcttaacccgccaactagctcaaggtgggcgtggtactgcaagtgtcgcagatgacctctgcaatcgaggaccgcagctgcaggctgggaggaagctactgggccttctgttactaccactctgataaatttcgtcgcttctcactttttcgggcaaaaacgatggcccgtcactagatgtcttatgtgcaaaaggcaagtaggggattacggcctccgctcgtttggaatttcttttcaagagacactgcaactcaggcggtttgctgagtgaagagatccaagcggacggcgtggcaaattgccgcactgtccggtgtttgcgggggccttggggtctcgattagtgaacctgtgaattctgaaagctctacagctcgtctcccttatgcattttactccctttcgcgtctcttaccgcttatagtatgcgtgtctgtagccagtatactccataggatgctgcttttctcatctgttgaggttgtcgtggtaaagcagctgggcaacgtggtcaggtgccaaggactcagtgacgcacacgtcgattccggcagagtgtttagccgttcacctgtgccgttttcgcagagagcgtttctatggggaccggctcgccgtttcactacgctccctagataggaacgtcagtcctcccactcacgaggcgcgtcaactcaccagctctccagacggtttctgtcaatcttcctcagcaggtgtcgctccttcagctcagcaggggcttttgaagcatgctcaagaaagcggagtagaatgtctgagttttgctgttgaacagacgaatctaccgctttcggcgacaggcgacgtggatacggtggggctgtaggaagcacttgaagaggggggttgcgagtttcctcttgaatttgtcaaatgggaagtacacccagcgacagacttcaagacaaacgccccttctttcagcggtacggatctgcctctcagcgacggaattgggcacaaagacaagggaattttctttttttggcgaagctgggcgcctacgagagaga

SEQ ID NO: 3985 - DNA, 2013 bp, Toxoplasma gondii
  source 1..2013: mol_type = genomic DNA
ccagtacatgccctgcccgctgttggctctccgtaaattaaaggggactatcgcgtaagtgtttcaagacgaatcggagagcttgttttcatagcatttgttcacttatattcgatcctcaggggcatatgtgagctctctgcttcttgaagtactcagcccacgagctaaaatgtagtgttcgtcttttttggctgtcggtccctcaggtgcggcattccagcagaaaaggaaaaatatgcccaggaaacagacaaatgttggatggttaatgggaagtgagtccagaaacagtgtgataatagaacacaccggccgtgacgtagctcatagagagcgttcttatataaccacttagacacacacgatggtctttcttggtaggaagagctattctagttagggaatttcgctcccaccctttgcgagccctctgtgaagtgcaacagcaagcgcgaatgatatagatgagcctgtgtgctacgtgcttcgttcgtttacagatggggcgtaatccactactacactcctcatcaacaaacaggaacggcgacatcaaagcatgataagtcaaattgtactgctgcgataaaaagcgcagctcccgtttgagcgacgtaaaacgtcgactgtcatacactgcggacagcttgtgctaggtgatgtgatgctctttatttttctcggccgttctctttccaggggaaatgcgccgttatacctgcttccgcgtaaggtgcaagctcggaattgctttcataatgcttcaagttgacgtggaaactttcgtcacacgctgggtgccgcgagcagcactcctcttttccttgctccggagccagttggagacagacgcagcgaaaatcacgaacagtgacacggcgacacgggacaagagacgtagacttgcaggtgttgctggccttttagcgatacattgttttcacaaacggccagtaccgcacgcttttattttaaatgaagcaaagcaaatacacacaagcgcgtaaattgaagaaacacgattttttctggaaacgttgaagtatccgagattgcactgctacagcgaagtaacgaagaaagaacccccagaggggactaaaaagtcatcaaacaaactatatgtagcaactgatcccgcttagtgagcggcaattaggcaacacaggcaacaggcagatgcttccctcgatatcactttaccgtcaatgccttttagcatttagctggaatttcacgtttccattttgaagcgtattctcatttaccaggacctgcgtgaaacacgttccaagcaagaaagagatcccgactagagcatctacaacgctatgccaaagaaccccgttgacggcgctgccgagacgactctgatatccctcagtgtgccactttcaagaatcatacgcgcagattcaaatatcgcagggggaccgtcatggtcaaggacagatcccccttctctcaacagggtaaagtggaccttctgctgccaactaccaaagaacagaatacgtgggatctgcagcactcagcaggttcgaggtttcatctgcatgcgccatgacgcagttcggtggctcggtaaaccaccacacaagtctattgagtgctcagagactgatttctctgattctaaaacgtgcaacatcaaaatgtccactctgccttgtaacacactgaaacacgagtgctgggtagttagcactccaaccgtgtacagagatcgaacaccaaaagcctttgacgacgaggttgaccgttgtggaagaaggcgttttcccaagaacaggaagacgcttgtgggaattcgcttgtcgagcttagacaagcacgcctcgctacccttttacctgtctgttctggagttccgtctaataggcgtttcattctcctgttgccgctcctcgaactttgagaggcggcgctgcttctacgtataggcacgcgccagcggagtgtgcgtgtgcgtgtgtcgctgtgcatgtgcgctaccgtcaaggcgggaaa

SEQ ID NO: 3986 - DNA, 1386 bp, Toxoplasma gondii
  source 1..1386: mol_type = genomic DNA
agagatgcaccgctgagctggattgagagctcaggtctccttctcgcttcgtcgcactcgcctgcgaggaccgtcgtgaagcgtcgcttcgcgatgaagagcttcgagacgagtccgaaggacttcttcggtcgcgatgtctccttttccggtcgcgccggtgctttctccggcggtgggatttgtctctcttatgggacgcagaagacgaacgcgaggcagacctgtcactcgaagaccctctttttctcttcttcttccctcgctccttgtcgtctcgccggtggtgcctgtggcgatggtggcggctgcggcctcggcgctcgcagtcctccttcttccggctgtctcttcgctgtttgtcggctctctcgggagattcagtccggcttctctcgaccttctccccttctctggagggagacgcgctgtcgcgactgccactgcgaactgacccagatcttccgcgcttctctctcttctccgctctttccacagtctgggaggcaaggcgcccggagtctcgcctagccgtctccggtccctccgtttcacgactggagcttcgactgggtgccgaggagggccgagaaagcgtccgagagtgggatcggcgagactcggagcggttgttgtctcctcgtttcttgtcctttctttcgtgatgccttcctcgcgagctctttctctccttcgatctgtcccgagacctgcatcgctttcgcttctccgtgcgactatgtctgtcgctcctctcttttgtgtgacgtttgattccctctcctcgagtgtctttctgcgccttcttcccgcgttcttcctcgtccttctctccgcgacgttcctcaatgtgtacgtcctcgccctcgccacccacgagtctcgcactggcaccgtgtctgtgtctcttgtcctcctttctcttgccgcgattcttgtctgtgtctctttctctctgcgtctctgaaggcttttctgagcttccactctcgcaaggtttcttccctttctcatccttcaccttcttggccttctccttcttctccccctccccgccgtccttcccccgcgtcgcctccttggcgtcccgcgactccttgcggtctttctcgcgcttctcctggagatgtttgttctttctgctcccgttcttccgcttttcttctcccttgtccccgccgcccccacctgttgtccgtcgcttgtcgcgcttcgtcgcctcctcctcgtcggcctccgccttcagcaggctggacggcgccatgggggaatgaactcagcggcaaacggcaatttccgaacgggaaaacagacgcgtccctgcctgcggccgagggacgcacaacacacagaaagcagccgtcgggctctggaggctacactgca

SEQ ID NO: 3987 - DNA, 3444 bp, Toxoplasma gondii
  source 1..3444: mol_type = genomic DNA
attgttttgtagaagggaaccgctgtgtctcacggttcgttacgaaggaacggacacgagacaaactcggaggggagattcaggatggcaaaactgttttcttcttcctctcgactgcgtcattcggtgcgcatggaaggtggcacaacaactgcatgcgctgctgaattttccgtgggcaagcaagcgtcgtctctagaaaccacggcagtttcctaaagtgataggcaccatgtgcgaatcttacggcgggccggaatactgggaagagaagctgggaatcggacaagcacggcatacacaaggacgtggtgcgcctttgttgcacaaaagacagacggagggaacgcgggaagctgctcgagaggatcactctgtgcagcttttacgatgtgttttgtatcccgaagagacaaaggctgtttctctgtcccggtgctggccacgtgagagagctgcgcaatgcctagtacgggggaagacgtgtggcacgcagggctttttccgataagtgagcgggtggtcttactttttgtgtacagtgggggagaggcagttttttatcgtccacttcttcgttgagttagccagcaaatgcacggcaaaagtggaaactgtcgtcggtgaggatttcgtgagcaaaatcaagtgtgaaggggtgagttgcgacctcgcatagacactagtcgacacacaggcggaccggtgcccgtaaaagaatctgtcacccaggtcgccgatacactccgttcccagtcacggtcacgtcaatgaaaacgtcagacgacgtgactaggagaaacacaacggcgcccttcctgtcttaccgcgaaacgaatccgaaattcaaaggctgaacattgaaagaaaggcagcataaagaccacggttcacaaaagaactctaaaagtagcgttcacgtagcactactttttgatggtgccggcccgagtcgcgtctgtcgtagtggctcagtccagacttgggtgtttctgctgtagaatagtcgaggaggaaaaacgcagttctcgtggacaggcacgccggctgcacgtgaaggccgtgtctgagcaattcgacctaagcaggagatttcaaacgggaagatggaactgacgggaggaaggctagcagatacacctcagaaatacggttgtggtggagcatcattgatcactgtaagtttcccagagtacagaaagtggcgtatcccgatcaagcttttcgagaccggctgctgttgtacaaggataggcgctgcgtttgtgcttcttgagatatatcgctggtcttcgtgtacctttgtgtccagaaactcgttacgcggaaacattgtcattcgcactggaagcgacgccgtgtcgtatcggttgtcgtttgtagagggaacaccatgtatcgcgacatatcggagctgtgttacgcatcacatcacctggacacctgttcagtcgcctagcacaaacgttgcctgctatacaattctttatgtacccgttgttcgattaaacattaatttggctctctgaacttcaaacgatacactgaaaccttgctgtgcacgcgtcggacacgcccctgtgtagtgggcgtctgcgttcagctcacgggggcgtgcatcttgtggcttcttcatcagggaatagggaaatacatattggctgtgaaaggctgaattttggctggaagtagaaaagagttgatgagtgagtttccgtcaagcggtggccacgcactcgcaagtcctcacgtgcacacaaacagtgacggtgtgtgtgttcgcggaaacaggttgcatcgagggacataagctggtcttcaacacatggcgtgttgcataataaatacaatgttagatcggttagttcagaatgtttcaccaccaagtgcggacgtcatccccgtcatacactcttcagctgttgatctgcgatatcgccgaaatctctagagctgcttcatcccgcccaacgcgtggtagctgcacagacacagaaactgcattgtttgtcatcacggagaagatgttgttgggaaccccccgaagtgtgcagcggaggtgtacggacaccgtgcgactaccgtcaccgcgacgaatggccgcccagttcgcccgtttaatgtggaagcgcagttcgtcaatttcacgaccctatctgcggtcacctgattacccatgggacgtctgtactagggactaactgaatttttgcgtgcacagtgcctacccggactgctttcacagcatctcagcggcagtgtaccatctactcttggcagaccagcattccgcaagtgatagagccaccagccgggacaaagagagtcgttctaaaggcctacgtaaaagcaaccacgggtccgcgtatgtagcgggacaagaatcttttctctactggaacgcccatcaacaaggcgacttacatggaggagaacgcatcacccgaacgactcatcgacccaaatcgacagacataacgaaaacacaacattgagaaaaaggaagatgaagacacgcagtagagcggacccgccctttcgacggcaaaatatgtgccataccggtctccctcacctcctgaagggtgctttgacgttgacattggggcatgcttggcggttgtgaacgagcaaccgaaccggccttgccagcgtgtgagagagcgcatggctgcttcaagagcaacgtcactatgcggctagcagcaggcgaattctgggaatgtggctgtcgtggaagcaaacagcgtgaacatgtcgttgtttattaacatttcgactgccagaaggaaacggatggcactttactgactttagacaggcactgttccatgggagggcatgtcaacgtaaaaagacaccccatgacatggccgtgaggcgagggcactcgggacctgtagtaccccaacccgatgtttaagagaagaatgcagcactaagttagaaggggtatgttctacagagaacgggtggtgcgggcaacgattgataagttcctgtcaattgaggccagcttcatcttgtcatggctcatctctgagagataccgcctcgcaatggaacgccacgttcgacattgaggcattctgtcccccccgcaatctggataatcagtgcaccgtggctggccaatgtaatgtgtatgaggcgacctgggaagcggaagcgtagcattaccgacctgtatttttacgcactcttgcgcaagcactgagggtggctcctgtgccgcgtctctggtgcctctgttcggccttctctccggtcctctctcgtgcgggcgttatttgcaggaataaacgcagttcgtgtagcggcacgacctttccaaagccccgctgttcgtgtactttgtctcagccactctattctattttacggccttctgacgtaaaactggattctggttcaaccgtgagtgtggtaaactacggtacgcga

SEQ ID NO: 3988 - DNA, 2172 bp, Toxoplasma gondii
  source 1..2172: mol_type = genomic DNA
tagaagccgtctcacattcaaaacggaaaaagtacggcgagtctctgagtcccagccaaaaaggagcatgggtcatggtctaggttttttgctatatggattacggatttcattcgaatcaacagagatggagagaagagaatggattgcgagtaaggcgaacttccttcgcttacgaggtgttgttgacgaagtgaatttcacacgacctattcgtagtgatcatcatcttgaagcggggtaaggaggggaaaaagcaacctcacaatgttttccccttccgccgcctccttcgcttcatcctcttcagtgtcccgagctgtaagtacacctcatccacgcgaccaggcgattcgaagcgtctcgggactttctcggagttctcggtttttcttcgcgtaccagaagctgttctctcgatgtggggaggaagaacgtcgcaggttgtggattcagcctcgaaagttaggggcgaaaaacgcagaaaataccaaaattctactctagaaaacgccgtttgaggtcaggtcgtgtcagaacgcggctcgagttcgggacaggcttcgctgataagtaggggaaaaagcacaccaccttggcgagcagagagcactgtttctctagaagaaaaaggacgaagggaaacaaaattccttgcgtgggagaatttgttctgtgtcgtcaaagcgaaaacgtggaaagaagacaatacggaaggttggcagcccgatcgatggcttcagcagaggcgccacggaagaggcgaaattggagcacgaaggttgtgtgtttcggtgcgataaaatcctcatatgtagagtgaaaagtagactcaaagtctaaaagggtcgtggaaagaagtagtcggaaaaacaggcagaagtgacctggccgcctgcacaagaaactggattaagacggtcgtcaacgacgagtctgacacaggaacacgagaaaccgaatgaggaccaggaagaagcaccggagacaatagtgaaagggaaaagttggtcggacttccggtagtgtcgaagatgtctatacactctcgattctgagaggtgacgagaggtcgtagccttcgtgctggagagagggtttgcggtaccacgatcgaagccgaaatttcttttaatgaacgcactcaacaaggattctctgtgcttcaaggaaaaggccttctttgcaggtctcctcgagtgttgtcttactgtcgagagacatgcaggagaaaggcgaaaacagccgacacctcttttctccgcaaaggggcatgatgttccccttggagagaggcaattatgcctttcggtgtgcgagacaacgatgagccaacaaagaacctatcagcaaatccgcgatgcagactctgtacagactccagatccactttttctacacgcctgccacgctttccaggacagaagaactcacattctcggttggcttgctgctaggtcacgtcggcttatattcgtgcaagggaccgaaaacactcttcgagacacacacacacacaacgcctttgttgccactcgcgaggcgggaagcgaccggaaaagcatgggaagatctaaaggtgttgctttctcttgcgtggttcacggaaaacgttttctcacttctaaaaattgcatgtttctcggagaacaggggtgcgttttacgcggcctatgaactcggatatgctgagtccgcttgtcttgagtgccacgcggaaacttgactggcatcgataaacgccattggcactttcaagatctataaaaagcttatcgtgtttatagtgtgcgaaggacttctattttccgggtctgaagggactttccaacatgtacacaacactccttcgacactcgtgaacgttccgactcaagtccgggtactccgtgctaccgggttcaagcctgccaaccgctgccgatatatccgacccattgttacggtctcattcctttgtccggtgacgaaacgctctttacttttctctacaaagcccgatttttctaactttccaacttacatgtgtctgcgtggtcacttgtttcgcgtttccctgcttccgcaactcgcaactcactctatccggacactaccagtggcacgacagcgagtcgaaccccccgacttgtttgacagaaaacgacccttttttctcccctctttttggaa

SEQ ID NO: 3989 - DNA, 2016 bp, Toxoplasma gondii
  source 1..2016: mol_type = genomic DNA
ctgcgcagagacgttctcaatgctcttgacttcagagacatacgaattttctgtctccccgtttggatgtatgcggccgttgtgctcgttttaaactactagatcaaccgtacctcaccgggttgtggttgaagggtgctttttaaggctttcaagggagttcgacagcggcggctctcatctgtatttgacgggcatcgtaatgaccatttttctgtttagattcatgctgctccgtggcaaacgtttctctttcaacctctgccacgcgctgaactgtagagatataccctccgcccacgcgtgtctagaggggtcttctctttatcagaacacagccggaaggacacctttgaagcgacccccgtaaagctgttctgcgcccagatcctctcttaacggccaaggtgcacgcacgggagtgattcctacagtcatatcacggacagcgaaccagaagtccgtgacaggcggtattcaaaaccgactgcaactccagccgacggttttgggtcggcgtcaagccacacacttacaggatccccttttggatgagaaacacggcagattttgacaaacggccaggaaacctgcctccccgtccgcaccacggggagaaagagacacgacgtggcggccggtctttgttttcttgtgagtagaatactcttggcggctctgctgcgtttcgcttcaagatatccgattgctatagttacaacgaacacttcctcgggggaagagagtcacattcttgatatttgaacatctgcctcgagatcacctgcagttcctctacgacaagcactgcccccgcgagtacattccaacagttcatttcttgtcaacgggaagaagccacacttgaatctgctgcctgtcaggccactgtcctgagacacgtttcgcacttcaacaacacacactcgaaacgtgaacatggtttatggagacccccgcggcattcaagttgcctgtgggtatcatgctacaggactcaggaagatgacgcctcctcgctgttcttttggaatctaagtgtcacagaactcatagaggaagcgagagttttcgtatcctgtgtgacgtagcccaaccggacagaatcacacacggcttctctctctttcacccttggccccgctcgcgtgtctgtctttccacaaacgtgtgttcttgactcctcatcgctaaaaggccttccgccctgtttattcgaaagcccgctgcttctcgaggatctttctacttgacagaaaaaacaaacagtcagctgtacatacacatacggacaacgtctttcttcgaaacctctgcagtaggagcagcagtatctcgagttaatatttctgcctgaccggggtggagtctgtggaacctttttcctcttgtcgcaatgcccacgtttcctctcgtctgtctcccagatcaccgtctcgactgtaaacggctgcgattctgtcgtgttttatcaggaaacacgtttttttttcgcaaggctgccagtcccacctctgtggtctcttgagcgaaaacgaagaaattcgccacacatcttgttttcgaagcgttgccccctaacgcaaaacttttgtaagagtgttcctccgctcgtgtgcttcgggagccgtgtaactgtggcgagtccggcactctgcgcccatgccgtcggttcgcgcgttctttttccttccaggacacgcactttcttcaccaaaaaatgaattttcctccgggaagatcggcttccctcgtcagggatcgctttactaagttgacgccagcaggtagaaaccggcggtgcacgtccgaagagacaccaggtttttgacagcgttttcgcacacccagcgtccagacaaacatcgtcgtccttttgctgcaggggaggaacgggaacggccctgctagggcgaacgaccgagcgagtaaagcgatcgacactgagaacgtgggctcgagtgtctaggaagaaaagcgcgacgtttctccctttccggaagaacaaccgaaaca

SEQ ID NO: 3990 - DNA, 2349 bp, Toxoplasma gondii
  source 1..2349: mol_type = genomic DNA
aaccgatcctctgcctgtctcctgttcttcgagaaagaagacacacgcagactacagaagactgtctcctttccttcttcgtctcaccaatatcggggttgtcgtaaggatttcctttcacagcaatgaggaccttgctcttcttcttcttctcctcctcctcctcttcgcctcccgaactcttctcgtctccctcctctcgcttctcgacgtgtacaaagagtgactcgatcgtccaccttcccgtcgctccatcttcttcttctttttcttcttcgtctccttcttcttctccttcgtttccttttccgtcttttttcctcgagctggacgtccctctggaccgtttcacatcttcgtaggcttcccccgaggcaacactcacgagggcgagatgcactgcgcgaatgcggtcgcgcagccagagtttgaggaggaaaggtcgctcgcgcagagcgcgccagtcgagctcatctcctgcaaagagactctgcgaagagagaagcagaacagaactgacgctcgagagtctactcggttgaaactgccggagtcgcgcgagcgaagcggggcgcgttctggactggcaaccacacgcgtcaaaggaaaaaaggaacagatggaaatgagagaaaacgaggcacttgcgtgagaggaagcgagagaacatccacacacaaacacagttcctcgaaagcggcaaacgaggtcgagaggtcgctcgggcatggcggcgagagcgaacccacgggggagaggcgctcgccaagggagaaggaaaggaaagagggaaagacagttgcgagactcgacagttaggaaaatccttctgcggagaagaaccgcgccctccaacagagcacagatggttgggggggacgacggggacatgcgagagagaacaagacaaggaaggcccccgtgtctcccatgccctagtggcgcaatggatagcgcgttggacttctaatccaaaggttgtgggttcgagtcccacctggggtggattcatttttcgaggaaaaatggataaaaaactattttttaacaaatccctttttaaaaaaatcaatttaagaaccattgtaattcgtcccctcgagaaatcagcggatttaaacttccagattccgcgtcaactcctcctctccctcctctttctcctcttctctcccgagccattcttcgcgtttcctgagatgcgtgtgaccttcctggaaggcgagagaaaaggggaggctcaggcacaagaagaagactggaagggaacggttctctctggcgcgcggtctcagagaaggacggcgagtctttcgcctttgacgcatcgcccaggggatgagacaccatcccttttcttctccccgactgctgtccatcatcgggactcggagacgcgcggaggaggcgtcgcgtccacacacccgcaaaaaagcagtttcacctgctttcttgttctgttgaaaaatgcacgcccgcagaacagaaggcaagagcgccacagactgcctctcttctctctcgactttcttcgtgaattgaaacgcacaaacctcacaccggcgactccccttttggtgtctctcgcgacgttgcggcgccacgacaggcactggggggggaattcgctttcgtctgtgcatgcgtttgaacagatgtttgttttcacatgaagaaaaaccgggcgaggaacaaaaaccctcgagaaagaggacatcttcactctcgtcaagctcccgcagcagcctgccgggagccaccgcgagcagagctgcttggaccctgcgcctactagccagggtatgtctcatcttgtctcgactcccgccacaggccggcgcgaggaaatccgagctcatgcgaagtgaacatttccggtcctttcgttcactcatggagcgacctcacagactgccgctcttggaccatcatttgaatggacggaaaccaaggaaacgccgcgtctgcaggggcgagtcgacattttcgacggttccttctccaggaagcgaaacgtccacacaagacaaagacgacatccactcttctcgactttttgagagagaaaggcaaagctctcctggcgtccccctctccctcgccttgtcttgcctcttcgcgcccgggggatgcgagaagcctgtgcagatggagaaaactcgcggtttttgtgcgacccaatatgctcacgaagatcagcggaacgagccgttcctccgcggcgaatgcggagtgaacttgttcttgctgaaggaaccgcggcatgcaagaaacgccgccgagaccgagcagtggcggagactcacgatgcaaaatttcagaaaagaaataaaaaaaattcaatcacca

SEQ ID NO: 3991 - DNA, 1347 bp, Toxoplasma gondii
  source 1..1347: mol_type = genomic DNA
acggtgtattttcttcctaccttctgtgggtttcaagtcaatcaagagaaactgttcaaagagtccccagttcagctgagagcctccgggacggcctccggggcctggcgactctgtgtggtctgagggattcatctcgcgtttcaattcgaagaggaggctcctgcgaagagcagcgagagctggatcgagaagaaagccacaggctggaagtcagtggctttcgccgcgtttctgagtcggtgcatgcgtggggcgcctcagcgacagaaactcagaaactcggagacacgcggaaagcagtcgagccgcctcgctgtctcggctgaagcgtcgatgtcggtgttcgaggagcagcagtgacagaggagataacgactgtcagaatccacgctttaccacgaagtgcgtttccgccaacagaaggcccccaaacacctccgagcgaagtatcgagttccctcgttctgccagacggacagagacctgattcagtgcttagggagtttctggaggctgaaaaacgtaaaaggaacgagccgtctttgctgcctcgagaaaagcgatgggctttgccttgcctccaggtccagaaaagtcagaagactgcggtcttcgtagagaaagagagaagggtgtcacaaatcctcgacccaaaaaagctgggcaaaaagcgcctggtcccgcgtgaactcgaaagagaaaaagccgtttaagtcacggacgccgcaacggctgagacggcaccatcggcctcaggggcacggaggcaaaagcattttcgtctgagagacgccgctgggagaaccaagtccgagaaccagacttgccgactcgagagtgggcgatctagaggcctctgaaaaatccacttcgctccgaaacacgaagtcactctctgctcgcggcgaagcctcggactttcctggcactcagatgcacaggtgagcatcactacaggttgtgcggtttacctcaagtccccacgtcgacgcgcgaagtgtttccactgtgcagcgtgcaacattcacgagcgttcggcagcgagccacctgcgttttcatggattgataagcgtgtcaagaagggagcgtggaaacagctgtttctgtccgcaggagcggaacgagcgacggaaacgacgaagaaatggaccaagttggcgaaaaggtggacgagaagcggattcgatacgcgaacaaatccagaaggaacttgcgcaccgagccagggaaaagagtcgcagtagagcgaccaaggcgggcgccgccgagtaacaaatgaaactgtacacctttcccgcgagagactctcgcagtgactttgcaacggaagcgggctagcaga

SEQ ID NO: 3992 - DNA, 1465 bp, Toxoplasma gondii
  source 1..1465: mol_type = genomic DNA
agctgagctggagtcaagccagaaacaaaacgagtcggagccaaatacctccttgaacaacgtgaagtagtcaatattgcgtttcacctgtggttcttgtcctccacatgcactcagacagagatcgacagaggctatgttgatgcaccactgtcgatcaacgtttgacgcactgggcccgttgcccgttcgtttcgcggaatagggcacctggttctggacaatgttcttgggtatcagacacgccaactccgaaccgcgctctgcccaccacgaaatggtcatgtctcggaagttctcgagaatcttgtagccagcaattgtccctattgattcggggtgaaactggacgccatgcagtggcagttctcggtggcgaacgcccatcagcacgttatcctcgtctgtggtccagcaagttggctcgaggcatttcggcaggctgcatccgcacaggatcacacgggataactttcaaaaccagaactgcatgcaccagtaattgaccgtggtgaacaaaagctgactgtgcttacctgtctttgtccacctgaagagaatggtagcgtacaaccggagtttcactctccacgccctcgaatagcttgtagcccctgatgaaactaatagggcttcgccttccgtgtaccggtcgcggtgtcctctgaatctgacgcgacaggaacacatgctcaaaagcaggttagcagagcatatttgtatcttcggaacgactgtcatttgtctacggctcgacaacagttgcaccgttacagttttcgcagagtcgggtattcttacctttcccccataaacatgaccaagaccctggtgaccaaggcagattccgaggattgggacggcagcttccctcagcgcttcactgcacaccccgaaatcatgttcgttttcgacagttccagggcctggagagatgacgatgttatgcacagggccgacgcttgcctttgcctctctccagctggagaattcatcgttccggatgacagttggagccacaccattgatcgttgcaaggtactgaaacacgttatacgtgtaggaatcatggttgtcaatcaacaacgtgcgcacagcagcggacgacgggcttggcagccctcctctctccttggggggcagtggccgtgggaggtccccgcctgcgacgacactgtggttcatgctgatttaattacaacggtgacacgaaactctattattgccaagatatgagtcgggaaacggcgtgctggagcaggcgttacggtcataattccagcctgcacggcagcgttgcatgtcaaagcctcgctgtatgccacgttcgagcccgttgcactgccgcatgtcgtttacatgcgcacgctgctgtacagacacgcaagacacgtagacgaactcaacagcttcatccggatttttacccagttctccgaacatttagtcgcaagctgccaaacaa

SEQ ID NO: 3993 - DNA, 4672 bp, Toxoplasma gondii
  source 1..4672: mol_type = genomic DNA
gcgtaccggagctatccacaattgtgtccaagttgaacaagaaaagaatcaaaagaatgctgagggaaaacgcgatgcaagcagcagacgaacgctcttcctgccctggaggaccagggagggcttcagctcctctgcgaagccagttgcgcgctcctcccccttccccggccgtcgaggttcgtcccgaatttcctccgccctgaccagaaggggagggtctctgcccatcccctccgccgccgttcgagaacggcaggtgcattgccctgacttcttgcccatccactatatctacaggcacctacggacagcagattcgtatctccaccggaaagcaagtgtcttcgaggcttcatcacgaagtctgagagaccatggaggcgcagacagcattcggagcggaggcacatcaaagaaaacatgcaagaaactgagcaagggcttccatgagaatgcctccacagcagagcgaccagcgaagccttgtagcagtagggttcgcagtttaagtggccccgcctatttgcatggaggacgtacgttgataaagtgagttgatttccgaaaaaaaaacagaaaacgatcctcagtcgcgtcgtagtgaaaggatcctgaccaggggggaaatatcatctagaacagcaataccattgatgacaagaaacagaaagggtagacttcttgaaaaattaattgaggatcagagggaacacagaaaagctgatgcggagaaatgatggactagggcgaaggacgataggaaagagagtgtttcagcggcaacgctgtattaagcattcgccggaaaaagaatgagttttcgagagaaataaatcctattcatggagacaggtcattccttagtagcactacgaattgagatcgagacggaggagctccttcgggtttcgttagtgaccgtaactggcctagacaggtccaactccagactctcgggggtgctccgttctccacgggatatgaacagcaaaggccggagcctgaacgaaaatcgcactaccagcaaacgcgagcgtctgagaagattatgagactttcaagcggtcagaatgcaactaacgttatgctttcacctgttggaaaacaacaccggcagaaacaatcacacaacaaaaaaacgtcgatccacgcattgctccaaacgtaattcgcaggtaggacgacagtaagctgcattctgacgacatgggatttaaaactttacgttagaaaattttcgtttttcaggtttggtgaaaagggcaccttcaagaagagaacacggggagggaaaacctagcagacacagtgacaccttcgctgtcaccggcgaaaaccagcacaagccacccacttccgacttgctgagcaagtattttccaacccgaatttatcgaaaggaattcatgcacatttttgattttccgaagaaaactccttccagaaaactggcaactcggatgagtcagctgacacctacctaagcctgtttaagcatgcatagctttttaaattgagtagggtggtatgtcgtagatccacactgccatcgacaggcagcgtaccactcgggcgagacagctccattctgtgtgagaagatcgtaatgctattttatagggattcgccaggggcatggaacagccactcaacggcagccaatacagaagcttgtccttcagtgtttcgtgcttcgtcggacctttcttgcgatcgacgaaaggggggtctggcgagcgcacggctgcagttgtatctttgcgcgaatcgctagttgggacacgggtcaagcaccacgcaaccgggagtagtttttctgtcaaatcactgaaacggccatgctttaaatgtatccattcgcagtctctcttgttgatcactaggataagcacggggcggaaaagctgagaaaaggagaatgctcccgtgtgtgttggttccaccagattctcgtgaatccgaacctttagatcgaatgcgtcatagaatttccagttacggatcacctgtaatgaacgctgaagcaaaatgaccgagcgcgagtagttgttgctgtctaggcacacaaaaatctactggggatggtgtgcgttgcgtttggtgtttgtcggtgttagaaattgacggacgcaactgaagggtcgtcaagtatactgacttgtttgcagaatttatcctcctactaatggtgggctaaattgattcctggggccatttaagatataagtgacaagagacacgctggttcaactcgtgtctgatcaatgggataaactggaagaaggttattgaatagctccagccattttgtcctcgaacaatgtggtacccaacagaccaccgtgccgggtaactcctgtttgcatcgataaatgggagcccaagtcactcctcgtcagcgaccactatgaagattctgaccacagagttgtataattaagttattttctcgttaactgcggcgttctgaagcctgctcacggttcgtcgcaaaccatgctctggccctgtcgatagcgtctgtgccattgagttgagatggaccagaaaaacaggaaaaagccaatgctgaagtggcatgcaatatcactttgtgtgctatacactgtagtgtccgcacgcatgaaattctacagaagtatacccagtgggcactatggcatcagcaaataatttgatggtgtgctgccttgcctgatcccactgcagtcaagaaatacatgaaaacaggttgttttttgtaagagtcactttggggagacaaactcctaacgcgtaacaacgcagtgtcagtgtcttagtcgtgcactgtcgcgctatcgctacactaccaatccagcgggggtaaaaaaacgtcatgagcgggaactgggtagtgagagatgctccaggagcaagccccatcgatatgcagttacatgtggagcttacgatttcaggatcagaactatttttcgtaccggtaagcgcctgggcccttcagcatttgaacatcgattaagatcataggtgtacagccataactagacacgagaaaaactaattcacggtccgatgtgccgatactcattggtctctgaaggaaggttttatttggctgagctgcatccaatatttgaagaaggatttaggcttctgcctcatcgttaggttcgaggcaagcgtcctgatcccacgacgcaacaatgaatgcatccccacggtgttactgctagagttcccggataggtgttgacgcccctgcagttacggcgtgaacattacactgtgattgtacttccatattcgttgttggcttttagaactgagacgaacggggtttcagatgccgtggcgccgaagtgaaagagagcgcccgtaaaggtgacttccgtgctggcgcaagtggtgcctccgtgacgctctacagagagccagagtgacatgcctgtacgtcatcctgtgattcgtggtgccctaccactcagagatctttacaaaagagagcagctgtgacgtgtattctttttgtcactttcaccgacaggacgttgcgagtgcttcagatttgcagccgggtctgatagggaaagtggcgaatgtttcgacttccgttgcagtcctttggatctgctcttttttctcgacagcatctactctttagcggagatgtccacattgctacacttgctgccagagcaaggatctgcagacctaaagcgcaagacgagtgagaacccacacgcgcggaccagctaaccgaagaccacaagacagtaaaaagtccgagttctagttctccatcatttgaacagagtagaaaagcacattttggagttttctaaaattgaattccctgataaatagttgctccatcacctgagtatctaaaggcacagtgcacaatcggtacttctggtgcaacgactgcggcaaggtggtcacgatgagtcactcgagtgggtagacaatttcgatgattccggtgcgcccagccattttaaaccttgcttcaaaaacgtgacatttcgtggcaatatttgtggcatctttcactgtggtagtctcgaagaggacatgagctgccattttctgccattttccctagaagcaatccaagaagtcattcatggtgaacgttggcaggcaaaagaccgattgactgcttgtctgtttccaggagcatcgatgccagctgtcgccggcgaatacgaaatgaaggagcagttgctggacatggcaccacgttatccttcttctgatttctgtgtggtcttgaacagtgcggaattacatgacagtgcaacgttgtaggagacctacacattaaatcgccggtgggatttcttgtgtcttgacgcggcgtggcttgcaccacctcgctgcgcagctgatggcatggggtcttgtatatggttcatgcaacaacgcaccaatttttcctgtaaggtgttctatgtgtgtatttacatggcgcatatcatcaggattacataacctctgctaccacaagagactgtcgctcgtgtagacttcctagtgactcagcgttgaccgtctcagtaaagttgcccggctggtagttctagcctagaggacggcagttttccttcgtcgatttgctatcgtcatacagacaagtacttcgtctgcatctctatacggactattctgacgcagcacacctcaa

SEQ ID NO: 3994 - DNA, 1827 bp, Toxoplasma gondii
  source 1..1827: mol_type = genomic DNA
tcactttctccatgaacttttcctgacaaggatacggctggaaaggaaagtccacctccacagagtcttctcgcttctccccgaacctcacgctgccgacccagccatcggctttcccggaagtctcgatgcgccagacactctcagagtcccctccctgcgcagaaggtttatgcgaggaagaagacgaagagactgaaggaggacgaggacagtgcggagaggagagagaagagagacgagtctgcgtcgccatggttgcgaggagagttgcttcgaggtcgaagggtgtttgctgtctcgtttcggactcggatggctgggaacgcacaatacagatttcactttccggcggttgccgctctcggctacaggcaggcgacgcctcaaaggtcctgctgtctcctcgctgcatgcgtttgtagcgtcttcgcctccattcgcagcgcggctggaggcagaagagaaggatacatctgctattttcagtcttcgatcgcctgtccactgggcgggaaggtcgcggtaaatccactggtcgagtacaggtgcatggctggatgagaagactagccgccgctgcctgagaggagacacagcactgtttcacacgcttccaccgcaatgtttttctccgaagttgtccagagatgggcgaaacgcgaatgcaaacgcggccggtgggggcaagaccgccctgggagggtgaagagaacgaacggcgcggaggacttcaacggccggcagcattgaacggattcgacgtcgacgccgttctgctcgtccgcatcgactcctgtcatcagttgactttgccgcgggattggaaggcggctgcatgcaagcgctccaaagtaaaaaagacaaacgctcttccttggagtcgacgcacggtcgaggctccgcagaccggagaggaggcagaggtcgagagtcctcgaagaaaggaggaaaaggaaaggacgaacgggagagccacagacagcgagggcagaggaacgactcacaccgaggggaagggagaggggaagggatgcgcagacggagagaaaaagcgaagaaggaaggaaagagggagaaggagacaggaagagcgcagacagcgacggcagacgacgggtggaggcagccagaagccgcaaaatcgctaggaagcacaagtgagatggaaaagaggctctcgacagatttcgtggacctcgaaagactgaagaaaagaagaaacaggcgacaagacacccgggaagaagggagggagacggcggccggcgcagtgtcgcgcgcgcagacagtttcgcctttctgagaggagtcgtgagaaggtcggcttctgagaaaaaaagagacagtggcggccggcgcttttctgcttttcatctgacggacccagagagagagcctcgtcttgtcgccccccagaggcacacggaaaatgggtgaaaagagcgacagcagcgctgcatgcacgcggcgtgcattgcatgcatgcaagcatgactcgacttgcgaaagaaatcaaaagatgcacaagaagttcgtttcttctcagccgtccgtgacgattcttctcacagcaagattacgagggtctttctttgcctcgccggtggtctctcgctcgttgctcgccgctttccttgctcgacgtccgtcgcgtcttcttttccctgtccgtctctcactgtatcgctctcctctgtccattcgtttgcttcctttctgtctctctccttcctcgtctgtcgctctccactgccgcagtctcttctctgcctttttcggttttttccgacgcctccctctctgcagagacggctgctgtcacca

SEQ ID NO: 3995 - DNA, 3361 bp, Toxoplasma gondii
  source 1..3361: mol_type = genomic DNA
gttctcgacagatcactcgacttacctacgagctcgccgggagagctgcaccagccgcatgcctcgtcgacatgcggcgccggcgatttggcccactcgcgaagcacccgaaacgcaggaaggcgacaagagagctgggtgcgagatccgcttctctgaagcgactttgtggttttccctcgaagttctggagcctcgccagcgtcggctctcgtcccccgacgacgaggactccagagcttcgtaatagtgacactccttgaggacatgcactcgaccgtgcgtcgtctctgtcgaaagaaggtcccgcgatctcttctcccttctcgcgacgtcttctgcatgctctccgtcttcgcgccactcgcccgcttcgtctctgctgcagtcttcaggggagcgtgtgcctggactcctcgcttgtgctcgctgcgcgtcgcgtccgagttttccttggtcaggtctccggctttgacgtctgggagttcgcacggaggcggagcctctcctccgtccccatgcgtctccacgacctcgacgagccgccgacaggcgcggagagtcgtcgcctcctggtcctaggtccgtccaaggcctcacgccttccttcgcatttcccactccggcggtgatgcatgctgcctgcgccagcgaaaaccgctgaaatacggaggctgccgcacaggtacgcagcgatctcgctttctttctgcgctccccttgctctcctcgtgggacggtctcgtttcttcggagacagttgcggccccgcacacggctcctgcccgcctctgccagtctctcgtccgcgacgtctgaggcttcaccggcttcgccgtggcgcccagctgcgtttcggctgccggcggccgcgcgcggcgctgtctcctgagtcgtcagtcccctccccgacttcttccgcgtgagctgagaactcgaggcagacgagagagaacgcacctgacagcgctggggggacggagaagagcggcgccgcccagacagagacgcaagcgcatgtgaaggaatgagaccacaagagacagcaggatgagagacagcaggatgagagacagcaggatgagagggtggagaggcagagaaggtatgctgggaagcgagacgagaagaccggcggcgggtgagttcattcggcggcactccaaccgcgcaactgcatgcgacagatgtcgcgccgaatcgtgtgctctggcgcagtctgcctcttcgtgggttgtcgccgtcagaggctccagcgccgcgtccagcttcatagtcttcgaggaagagcgaatgaagtggacagactcggtttctgttgctgtacggattttgagtcttgcgtggagccccagcgccgagacgccgcgccggcgtggagggggaacgacgaggagacgacgaaggggaggtagaggaaaagacagaagaagaagagaaggatgacgacgcagaggaagatggagaggaggaaggagaggaagaaggatgccggcgtctctgacgggtcattgtggggagagaaggccatcgaggacgagggacgacacggcagctggagaggctcaggaagaagaggacgcagaaaaaaaaacaagacctcgttttgcctgcaaggcaagaagaagcgagaggcgaagaacacacagaaaaaagcggcgcgacggtaggtcgctcgcggggccttggagaggaaagcgcagaagccaggagcacagagtcgaagatttgaggacaaggaagagggtgaaggagagaccgcgcgagtgagagaacgcagtgtcacgaaagggaactgcgctagaagaaagggaagagcaaagaaaaaccgacgaggagttggcaggaacagcggataaagggggcgaaacgacgactggtcgacaacgcagctttcctcctctgagaggaagtctcggctctcgacttctttctttcgtacacatatgcgtatcgagagtcctcctttttccagcagcgaagcctgtgacgaaaccacccccgcgtggaggagccgtttcagcagaaaaagcgacttcgacttctcgacgacttccggttgtgtgtcgcttcttcgtctcccttttggattttctgtgtcgcggtttcccgagcatttctccttgtcgatttatccgtcgcagctcctctctcctctcgcgttcggctccacctgatgcctctccggttctccttcaaaccgtcccccgctttctcccctggctgggtggcttgtttgccttctcagtcgagttcgtctccatcgcacagaggcctcgagaggcgcctcgcgcgagtctctcagaactcggcgaggaaactggagaaaatgccggtttgggtgggtggaacgcagggagtgctccattcgcggagagcagagaaaacaggaggaaaacctccctttccttcctcaaaaaataaggcgcaagcgacaagcaaacgatccgcgcgggagttccacgcttctgcagactgcagggaccgcgtctagacgcttttcacacatttttagggagctgggaaacctcagcacattgacgcatttcctttggcggttttctctcctgtttctcgttgcgttgttgcgtagcttttcccccctttccatgagcgaagccgacgtccgatcggatctgcctctctctctctgacgagaaggcgttttctcgcgtttatctccttccccttcacgctagcttcctctgctcgcgctctttgctctctcggctgctcttttccgggcgtcttgtctcctggcgcccggggggtagtcgagacgcgaacgcgtccggcctgcaggccggggattctatcgcagagtccccttgaaacgtttcggaaaacgtcagggtacggttgccatatcctgaaaggaaaacctgtcgcagcgaggaacgcgaaaagcgcggaagagtctccgttcctccgcgacagagtgcccgaaaaattgtctcccgttctgtctcctgtctcgagaagactcgcgggccgcgcatgtgtgcgcagcctccccagcgcgtcagccagagacagagacacagtccttcgcctcccgacctcctttcctctttcctcacggcggtgtcttcagtttgttcatgcgaaaccaatccgactccccgttgttttttccgctttttcgaaacgcaagtctgctgtcgcgccccggagacaaagagccacccgtcgggccagatttctctgcacacagcaaaagtcgccgcgcctgcctctctgccgtgcggcgcagggctctccggtgtcttccccttcttcgtctgcgcgttgtttttcctgcacactctgcctcgcgagaccttctcgcttccctgaactcgtccaaactcccaagccgcaa

SEQ ID NO: 3996 - DNA, 2503 bp, Toxoplasma gondii
  source 1..2503: mol_type = genomic DNA
tacttggaggagcgaagctgacatacttttccactcaaaaagacatcgagatattcataaatacttggacaacaagcatatatacacatgcagagttacataatgcatgtatacatatgtatatatatatatatatataattgtatgtttgtgcacaagtggaggagtggggagacagcttcccgctacatggcttgactggctttctgtttgtcggaatcgctttctggagagaacgaagaaagttcgaaatcacatgttacggaaagcagagtttccacttgttcgaacgcgcatgtcgagccgcagacgcgagagcctcccatgtccacccgctgaggcgtatgtacaccccgtgcagagggacgttgagggacgaaagaggtcgcaggagattccggaaggcgagtctttctctctcctttggacgttcgtaccttttcagacttcttggatgcatccatggcggtcgcagggctagaagaagagacggtagaacttgtttggaagcctgcaacagcagagaggaaacagctctgcgagaagagtgaatgagcactggtcgacaagtgtggagacagcgtcctctctgtctccccctgaagaacgtttctctctctaacgaagcaagcaaagagacgagactgtgaagcggcggaagaaaaacgacggtgagaaatgcggctttcgcggcgcggacaccccacagcggcagggacagagagaccggctggcagttgtcagaagcgaggaaagagagacttgcttcgaccggaaaactgggcgaggagcagagggtctcgagtcatctcgcagtccagagaggaaaggaaggcgcgtccacagaaggctcagcgccgagtctccttccgaccgctcaaggaacagaagacgcgaggcaagaaagtccgcagacaagaacgaggcaagaacagggcaagaaggagacaaatacgtagcaagaacgagacaaatacggagcaagaacgagacaaaaacggagagaagagtcgcttttctctccgtgctgcttgattcctccaaaacgaagaacttcccctctctcagacaccacgggacgacgatgtcgagaggcgtcgccgcttgcagcagcctcttgcaggtccatgaataaagcgagaagagatctgccctcgcagttcctctcgcccagaccgccggaagtcttctggacaggaagacgcgtttgaaccagacactctcgctcctcgctcctcgctccacggcctggcttttcctaccacccacctaccttgcggcatcggcgtcgaacgtggaacgcgactgtcggcaagaagaagagagaaaatcggaaaggacagtgccggagaagcggacaggtcgacagagcgaagaagacgatgaagacactttgaggagagacacagcgagaagaaatacatgcaaaagcttcccctcaaagcgctgtctccatggccggaacggcctctttccagtcggcttaaagaggaggaccttcttcggagacacaacgacgcgaacaccgcaccggcggtgaagaagagaagaaggaagactcccgccagtccttgacacagagacacccgaaagagttagacgggaagtttccacagagaagaagagtgtgagatgaaggaacaaggtctcccagaacgcgttcgaccctctccctgagttaagaatacgcgcgctggggacagtttccaagcacagcaaaaaggagactcgagaaaggacaagtccgcagtttttctgcttagaaaaacgcctctcgtcttcgagccgctcttcgttcgtatctgatgcgcaaaacagtcgaaagagtgaatttccgtagggtctcgacgcgtctgtaccacggcaaagcaggcaggcaaaactggaaagaaacgcgcggccgcgcctctctctgcaactccgagaacgcgaaaaagaaacatcagcttggtctggggtctgtcgttgttgccgatgtacatactcctggcgatcgacaccctcacgcgcctccggctttctcataggaaattcgcttccacgcgattgtgccgctgaggccatcgcctctttcttctctcttcttggcctcccttgtttccttctcttgttctcctcttttgttgtccactcgtttttttcctgcggtgttctcttccctcgtttctctgtcttgtcctccagtcttgttttcgtttatctttttcccctcttctcttgttttctcttcttcttttccgtcgaattttcccttgcttctgcctttccgcgtgtgccggcttgcgacctgcttcttctcgttcgtttctgcgaatcttcagtcgccgccgctgactgctccgttgaggatttctccgttccttgtggcagttgtgctctcggggaaagccgtctttgtttgtctgccatcggcctcttgattcgctcttgaaaggcatcggttcgcgcctcagttgctcttctcctcggactgctttctcctctccttatcctgcctccaaaa

SEQ ID NO: 3997 - DNA, 2581 bp, Toxoplasma gondii
  source 1..2581: mol_type = genomic DNA
cgactctgcactaccgcggtctgaagagttcgaaattccgtctgtcgccccgtgcgaccgcctcccccccactcgggtgtctgtacacccggcgtgcacaccccgaggacccccaggccaggctgcgtcggcgccgttttgcggtcggagctggaccgtcggcctccacatcggcgagcagagtggcgggaagcagccgaaacatcttccgggagggatgggcgttgtggtggggaacccgacgccgggcctgcgcagcttgtctcctgccaacctgggcgcagcggaagggcacaccctggaagtcgggatgggggaagaacggagcaagcggaaggaggcagaaaccgttgaggtggcggagggcaagctgacgcgtctggaacctggaaaggaggccccgaggtccggaaggcgggatctgcttgtttttcaccggcgttgccaaatcggctgcttcgcttccaagctgtggcacagtggtgggtgcatggggaagcggatcggagtctaggaggacgaccattctcccgcgaagcgctcggtccttccgtgcatgcgcccttccgtgcaggccactggcgggcctggaagtcgggacgggcacgagtccacaatggtggcatggcggtgcgactcccagtggcaaacccagcaagaatcggtcgccaggcgcaaatcgcccggcaggcgcccccggtccgtaggcgttcgaccgcaaggttgccgtcgccggtaagacagaggatgagaagctgaaacaaatggtgtgtgctcgccgccttcgaatgcttgctttcagtcggcagtcggccataactgtccgcgaaaaaaatcggcaatgaagcggcttttgcatccgtcgcagtcaccaagtgcccagggtcctgtgctgcttgggccggcaaaccagtacggagaagagccagaggctctctcggggacgctagagaaatacctgaagcaaatgagtgagcgagctacaagtcggccggcaaacggcagccgccttcaagtttcacgtgacataaaattaccgacggacactgcggcctcggcctcgctggccagacacgtgccgcgggaaatcacagacaaaccaattcggccgagtcacttcggagcggaaccggtgacgcggacatgtgagagtggcgggaaaaagttcttttcctcaaagaaagagcggaaatctagctgctccgctcgccgtgaaaaagtcgcccagtgtggcggcctctgctgcggtgtacatacggcggatggtcaaatgtaggttacctgctgttcgtcaaatttcgcatttgcgcagaactgtcactgcgcggactttcaacagtcatcggatccgtgtctcgcgctgcgaaagggattcaccgggtgttctgtgagatcctaagccgcttctggtcaggaacaactcgtggaaaacgaaggacgccgcgcagctgtccattctgcacctaagaggcgccgctgctgcatcttggatcgatgttgcatcggaaatgcatgtcagttaagaaaaccgaacatgtatacctggctagtgtgcttgcgcgttggcgagcaagacagaaagatcacaagtcaggagagtgcatcgtcgaaataccgccattcaagaggagaagtccgagggaaaaaaatctttgagaaggtccaaactgcaacggttcagctgcgcagctggaattcgtcagccagtccagatgttccttgcagagaatctgtgcgaaaaaaaggtcgggaacgacctcatggcataaatggaatccaacacatattgcatcggccggagcagtttgcggcttcacgacaagagtaataaattttcgtacagcgtttctcatgtcatttataccgcctcctcgcggaaaatcagagtcgtttcttcgtcttcctgctgaaaaagcgcgaacattgtgtcgccggccagcagtcgatgctgcctgctgcatgtgcatgcagaagcaaaccagctgccatacagtccttgttccttgacttctttcactcgaatttccactctgaaaaatgcgtagggaattttcaggtcgctttccggccgttcacgtcgcctggctactcatttcgtgacggcgttcgcgaggaatcgccgtggacaacgctcgccgcatcgaccagccccgcgggtttgcgaatttttgaaatcctgttgccgtccagactcagagtcccaggaaaagcagtcgcagacactctcatctaacgcctgtttcttcacgcagctgagctgagcacctacgcgcatgctaaggatatccttagatctgcttctgtcatttcttacttacgcaggacatcctcagttcaaatacgcttgctccttcattacgctgctggaggcacatccacccagctggaaagccgtccttcgtctgtattctctttgtgactgcctaacgcatccgccgcttcacgtctgttgcttttcctcattccgatgccacctcgtccgcaggttttcctgcgtgtcgtcggtccatcggtcgcgccccccccccccttgtatcctgcctgcgttgcctagaacgcgaaggcgagcacaaatgaacaa

SEQ ID NO: 3998 - DNA, 1200 bp, Toxoplasma gondii
  source 1..1200: mol_type = genomic DNA
tttttcgggagtctgctgtgtgggaacgacctacttttgatagtcttctcgatcttgaatgaggtagcgtcgaagaactttcacctctcggacattctgttccttcttccagttgtagaagtcgacttttttcagcagtcgcttctcatggaacttcagttgcctcattgtggcgcgcggtgttctgaaatgcctcagggaaaagcgcctgcagccgcatgcagagtttcttctctctgtcagtacttgaaccccaatttcacccttcttaacccatgtcccttacacaggcatccgtcacttctcatatacaatatacatacatatatatatatatatatatatatatatacatatatatacatatatatatgtatatacaggggtgatatccttgatatatgtagatctgtggggaaggagaaaaggaagaagagacgtggaagacagaaagcgttttctcttttagttgagggacgagggcctagaaactctttccgacaagagtggtggcgaacggaactctgccgtctcatccggggctgtcgtcgctggagtcgaaaggtcgttttcagttggagaagtactcttgcgactggaaaggagaaggctccacagtgggaactcaatgagtcaagaaatcttaaaaaaagcctttttctcaaacttggaagcgcgcatcgaccatttcgtcgccctgcgtggttcctctctcctcgaatcgcggcggtgcttccgtcgttcttccgtcgcgctccgagaggcacaaacagaagaaagcggagaccccacaaagggcgcttgcgaggaagcggataggagacaggtgctctcgatccaggagagcgacttgagagaaaatgagtcttcgttgcatggagaatcgatctgttggcgatacttttctctccgcctccggggaacgcatgcatgtgccgacgctgagacgaaggcgacttttctcagaaaggaaagagattcggaggacgacggtgtaagcgggagagaaaagaatatcacactttcgtctttatgcgcagtttgtctcgtcttttcttcgctgtccacggccgttgttcctccatttctccagggagtctccccaaagtccgagagctcccctcgcactgagaatacacctcccggtttttctttctgcgaggagaaagcagacttttcaggttgaccgcgtcgcaaaaa

SEQ ID NO: 3999 - DNA, 2491 bp, Toxoplasma gondii
  source 1..2491: mol_type = genomic DNA
ctcttgccgctgctgtgcttgaacggaggctccggcgtccttgattttttttatatatctatatatatatatatatctatatatatatatatattgcgtgtggatgtgcatgtttatcaaaaaccacacgtgactggtttcgattcgtttctcagtcgtagccacttcgttccacgttctgatgtctgcaagaagtgtctgcattgctccgcacgaacgtcgctctgtcactggaacttcccggctaagtaccccttttctctgaaacacagttcccttctcgccgttagtatgacctcaaagttactaaaaaccatttaagcacagatgtggggcagggcacttctgagatggaaacagactgctcgctatattcgagtgtttggatcacttttagacattcatttcttgcttgccaacggagtttttctttgcatattcataggaagccgattttcgtcacaagaaacagtttctgcccgggaagaaacactatcgagcaccagtcagcactatgcctttgcttgtccaagaccctgcccatgggaagctagaaggccttgggaccaggaagtgaagtttcttcctacagggaaatttctcgtgcggaattctgttcgtttcactgggaaacgtactggcaaatagcactgaagttatacacgtatagcttgtcaagggtgcaacagaaaaacacactgacacgcaactgcttacttgcatggctcaggtgtctgttctctatgcggtacatcttgcggtggcttctgtctgtcttgtataaccgagtagcagatgcacagatgggcctaattaatccgtgtacggcttgtgcctagttgtctcttgagcttcagcagaaccgtagttcagcggcactggagttagtttaatttaagaaaataatagacaggttgctaaacatgtccgttcttcgaaacgcacttgccttctcgccgtgagtatggtcttactgtactggaagcaccgggtttttctgcaatttgctgttgttgcaaagaagcggcttcgcttgccctacggtttcaaccccttccgcaaaagttttcctttaacgtgtctctctgacgctgttgagaagcatatataatggaagacatttaactgagtctaccagacaaaacgcgctagagtatgtatggagagaaagccgcggacgtgacagacacaacaggactcgtctagttttttgtgaccgcgaatttgagggaatgcatgtcatgtacttgcggtcgtactatcgcgcttattccaaagacggtttgcggaagaaacgaaattagagcctgtggcatttagctgattttaacacacggctttatgactccgcattcgataccgttgcacaaaatgatgaattggcgcagttagtatccggaaactcatccctctgcacagacacgtgagacaccatttttcagtgcgttgcttgggccagaaattaggacccctcggcgtcaagatcggcaagaaagaaagggtttcagtgcttctttcgcacagaacttgtcgaggaaagaataaaccctgcaagggaaagaaggaaatacaggaacgcggctgttggcgcgtcgctagttgaccccgttgcgtactgtcggtgtggcggctggcggcacggtcgcctttttcgttttttccaatttcccgtcactcaagttttcagtcagcttcgttttccctgctgcgatttcgaggctctatcgcccagcttgcaaactgaacggagacggcagacgaggaaaagctgcgttcccgtttctaaagaagcgaccggaaaccgtgtgcctaggaagacgttgcacgtttgtatcgagatatctcgaatgcattttttccggctgctctgggctccatttttcgttggcgagcagcgctttttcgtgtcaaggtgtcattttttcaggctggcaatcccagatgtcactggtggtgtacttggtgtctttgtgagaactcgtttccttgacgtgagcctctggctgttgtgtcgtgccaggtttctgcgtgcttcttcttagctgccgacgcgtttttgcacggtgttcccttcaggtgtttcctgtccaatcgaacgcaaaaggcgtatttaatgcagttccgcatggcgttaagtgagagccgttttgctgtctggggtcacgaaccggttcttgtgcgctcccccagagttgttcgcttcagtgacccaaaggataagtttacccgctcgtttgtgtgttcacttcaccattaaagatgcactgactgctgacttccttcatcagatgcgtgcgggggacgactttttcggtaccgattttatggaaaccaaagctgcctcacgaaatttacggcaggcaggatgggacagcattctttggccgtggagttgtgctagacccagaactaggttccagaaaccactcacgtttatgccagccgagacggagatgcaagtgtgcgaagggaagtggagattcttcgggaa

SEQ ID NO: 4000 - DNA, 3135 bp, Toxoplasma gondii
  source 1..3135: mol_type = genomic DNA
ggtatgcatttgtcattaacagtgaggagggaaggcaactttaagtgcgatatcgatacttgcagggttgccctatccaccggagtgggtccatcagaaggaaatcaggttcatgacaacggttcaaccacatcaggaggttcttctgctactgcgctggaaggagttagagctggtgtggagcattttgactctgggccatttaaacgtagttggaagaaacttccgtagctcctgcagcaggtgtcaccagtcataaatttgaaacggtatttacgagcatagggcagacatatgagcccctctacaaatatgcaaagtgaatattcagcatttgggatagcggttgtcgaggcggagcaagaattgtgtttggacacagacgatgtgtcagctctggtgatcaccgcgagtacggaagctcgaggtttcggttacggtaaaggagaactgtccagcgctagatccgtacgtggctcgaatcgagcagttacaagcacaacatctgagcatgaacgttttgtctagtcaacacaagttttgctattgtgggcttaaatagactactgccgagtttgatgttcgactgaaacacgatggattagtggattcagcgcaagaggctagcaaacgctgcacagcagaacaaacaacgccaaaggacctgctgcaattaatataaagttctttccacagccattctctaatggccatgcaagacgccgggggtagcctcgactaccgcgcacttacatatattatgcataaaattgtatgtgtgtgtgaggccattcgcttagcaggtggcgtttgttttactggacagacatgggaactgccagaggtacggtttagtacttagtagttgtgagtctgaaaaaggattttcttagtttcgcggtgtggcacatgaagaccgtagtttgacgagttctggacacatcgttgctaacgccagtgccgctgttattgcctatgaagtttaggcgcttgcgttgccgacacagaggtgcatcccttctggttcatttgcgtaatcgccgatcgatcgatacgcaggcacacatgcctatgattcctcccagtacaactgattccgtgaggtagaactgtactgtactcgggaattaagttcgcctgatcaagtagaaggtttgttcagccactggttcaccatcaactgccttgtttcgacttcgtaccgactgtgttattggagcgcatatattacccttctaagagggagttgttcccaaactgtggacaccgttttccgctccggttatacaaatatgacattcacaaatgccacatatagaacgggcgatgtacaggctcattcgtagcagcgaagccgaattatttatggcgtcatattcaggggttccgtgtgacgcacgtgctcaccactaccaagtctttgttgtctggcgtcacgaagtgacataccgacagtgccgcacagaacgcatttgttaaattgctcaatctgtaggaatagtatcgcttgtcgtcttctctagagcatatgtcgctaccgtacacggaatggctagcgacgaatagctgtgcttcctcagtgactttcaactgtgtcttcaactcgacgtgaacattattttgacaaccttaatgcgagggccgttgtcctgtcctgtggtcagagtcaccatcccttcagaagatcgtcccctacggttccagttttgcttagcaccccatccatgatccacgctactttcactcaacacatgagaagtatttttcttcctttctcgaagcaacttcaagaaccgccggagcagctagctcgaaacgtggttatcctgtgctgggcgtgcgatcggagccggctgaagtccacattgcgacgagaaacgtcggtggaggcaagtctgtggcacgaaggctaatgaccgggaggacgaggaaaattaacaccgataagcttttcacgatgtgtgtttctggacgaagacaatgaacggttttctccttactttgaacggttgcaatatcgagtatgcgatgccgcgctcgagtagcttcgttcagtacacagcttgctggtgggccagcctacactgagatgtttgactggattctgccgatgtttgttgaggcgttgttgctcacccaaaaatttcgtacgtagtcctcactgtccatggttatgactagtcatgtgacaagaagatagcattacgaagataacagatgtttcttcaatgttggcatgtatcggctgcttggttaccagttacatagcgcgccttttgtcagctttttcatctcttttcctcatgtgtgagaacacgaatccgaagcgaaactagggcgtgccgttgatttttctcgctgtcggaacactctccccacacatttcctatcgtccttccagatgcttacttcctcaccgtcgatagtggttgcggttgcctttgacttcactcccctttgctgttcacattgcgtctttctccgtcgcgttccgtttggtctgcttcattgtcaagaagtaagtctgaaagcacctccattgttgcctgtctgcagtagagcccagattgacacgcaggaggtccgcgatacaaactgcaggcatgccggcaggaaagtgacttcgatagaagttgttcagttactattgtcaacaaacactgctttttgtggctgcgtttctcaaggaaagggggttgcgctcgtaactcacctttcaggcaccattttcaagcaaagctaattctgcaatcatgaacagctgccagttataaagtcattgtaatgagcgtcgaaaaattctcgaggcgctccaagacgtggccacaccgacttggttcgcggtatctagttgaaaaggaactcacgaacgtagggaagttgtttttcggggcgcgttactgttcttcgtgcgaaccttaaccacttcacgaagacatttggagcacattgccaaacacatcaggggatttgttggtgaaaccagtgcgaaggtatttcgggactcgaaaaattgtcctgcgcgttcgtatctgaagagtatctaccagcatcccggtgtggaagcaagaagagtgtgaaactctgtgagagctctattggagttattttcgtgtgccgcagcgaacccccaaa

SEQ ID NO: 4001 - DNA, 2058 bp, Toxoplasma gondii
  source 1..2058: mol_type = genomic DNA
gtaaagtacacaatcatagttgcagtttcttgtggtgaacgcctgtgcaccgtatctctcatttctctcgcatacgtatagaggcccattgtagcggttagttttcgatcgacactgcttcaccgaaagatctcttcaagtgcattgtaacgcacccctcagcgtgtacatctggtagcgatgctaggtgaaaacagagaaatagtgacaatgtgcagcgcagaaccttgcgtcttatacaagaacctcattcatggggtttagcgaaggtgtcaacgtgtttgaaggctagacaaatagttaacgttacttttgtctgtagaggggagtcgactaccagtggattcgtacttccacgccgtccacacgaaccttaaaacgcagttcgagagaaccagcaacactgccgtggatttttcaaatcgcgagagcgattcttttgtatgtgtaccggtggccgtagacggaagctgtctggccctagaatcttgcacccctcccgccaagcaaacgtaaccccgacaaggtgcgcctcgccaccattttcaacttgagacaattatgcaatcaatcaaaggggcagtacgtttgtaaaactcaatcacttagccagtgtccgtcctccacaggactatgcccttcactacagcttcggctgtcctacactttattcaccgaagaaatacccaggaagtaggtagacacgattttacgctagtccttcctacacggagagattctaccttctggacacaccattcgtccgacgaatttatgtatgcgggtggcaatcttgattcattatgtatcgtccaaggaatggaaccgaaacctcgtgtgtttgcactgagaatacccgcctctggttgcagcattttggcttcgtgactttaatatggagcagactgtaatacttcgaaagctcaaacggttcctgtgaaagaatgaacatgcgttctgcctcatgttgtgctgccctaaactggaactggaatcttacggggtaccttgacaatgtacaggatggcccgcgatccactcagtgcgctggaaatgatacgaaacagagtggaaaatgatgatgtgcagagtcttagcttcaggcgacgtgctttcagccacttggctaaacgaaaagatgtccggagtgcgagcatgcacccgaaaaatgacacacgcagtcaacgcgggacaaacgtgaaactattgcgagacgccggactacagcgacgctaatcgtcttcgtttactatgtgcctcgggaaaccagctcccttcgctgaggttgtcctgggaaaaatcgaaagtagctagcctacactcattaagtgaatcatttccttcgttcctaaccgccaaaggattgtctcgcaagtctttttttttgcggacagtaccccctgccttcccattttctcccgtccttttgttagctggcttcctccgcgcgctgcctcgaaacgaaagagacgagaatgggtctttctccagtgaagtgatgccttcacacattcgtctgtgtgcagcacgaatatatattcgacaaattgctccgaaacaccacctgatacacgtcgaatatttctgccattttttcctctgtcagttcctgaagttcatgatatggaaacacttgggcgctcgtacgaattcacgctacatggcgagcagagcagtatacgtactttagaaaacatgtatgctaaaatacagccaattattagcatgtatgaaaattgtattacacgtgtctgagcctccctgtgttcgcatgccacacgaccgtatgtaccgagtggctaccaatttttcttccacccgctggcgaatcgcagttttctagggctcgattttttccgtttgtctttgcagtcgtcgtcggcggcactgaaaaaataacttgttctcggattctcgggacagaagactcgatttgttttttgcgcgtctagagccgaatcggactcgggagtcgtgacccagtgtttgaattatttttccctttctttgtgatatttctactcctcggcgttccgtcggttgtgtgaagaacgacta

SEQ ID NO: 4002 - DNA, 3768 bp, Toxoplasma gondii
  source 1..3768: mol_type = genomic DNA
acctgttgccgatcctctcaagtaaggctcaaatctatggctgaatctgaagcgctttgttgtcggctgaagttggagacttccgctgggcttctgtctttgccaaagctgacgcctcggtttcgctgcccaatttctgctttgtgcgatccacgcaggtgcacggaccgtggcgttccactggaagttcctctatggtgctttgtcggcaaatgtttccagcgtaggtttaccttttacacaggagcactcgtagagaatatctcgcgtcgtttggcgcttgctctctcccgtgaaaaatccgtgctctcttcgggtcgcacggacaggctttcggtctctgtcgcttgcttccgtgtagaggcgagaagcagttctaacgttttctggcgtgtgtgtaatgactgcagccacgggggtaaaacgacggactgtcgcctcccatctggtggtttgaaaggggctagagacccgctgaacagggggttgtgtcttcacttccagcgtctattcactcccggtgtctgataaactcatacagttggtgtccgtcagggaactgtgagagccggtcacgctcttcgccgcggaaatgaagttgggctatacagtccatctcctaaaacaaaggttttaacactctgtactggaccagctggtttgagcatgaagccaggcgacgcgtacggtcctacgccaccgtcacgcgcaaagaccatgcttttccacacattgcatttctcatcccttttccattccacaggtttctctgctgaccttgacagcgctcgttttcctcgcgacgcggcgtaagcagccgcgcgcagcagccaccacaccaggtattctggcagcagtcctcctgctcctcccgtttgtcaccaggtacgtacagctcgagaatctcgaactgcagaggtggacagtcatttgtagcaaaagtcgctgttgtttcgtgctcagggaagcagtgatgtgggatacgtgaacaagcgtgtgcgttcgtacgtggacactgaaggctacagcatgtattccacggaggtgaaactgtatcccagttcggcaatgtgcggctgtttccctcttggccccgtgtgtaactggagggatttactgtgaaacctgattgttttcgttagcttttagagaaacgcctgcttgatgagaccgcttttcgacgggactgagtgatgcagcgtctcgcgtcgcttctcgtttccgtaagggccggcgttttcccgcggttgtttctgcgtttcttcagccggattattgtcggcggcaccccgtctaccggccctgctgaaagtccagcgtggtggatacaactcgtgcttcatgcagccgtcagtgcttctgttgcactctttacgtggcagctgtatcgctctcgtgcagctaaaggcacaagctcccagtctgcctccacttcgcaacagcaaggagggggaaatggttccacgtatcccaagcgggagtgatacgaatctgagtatcaagctgttgaagatgtcgaggtcaatgggccagtgtcaccatctcgtggacaggtagaagatgtcacgacacagtgtgcgcgggacgctgacaagggaaggcaacgcgcctcggcgacacaagcatcttctggcagtccactgagtcctgaagtacagattcgcgaatccttcgaagcgttcttatatggaatgcgccggagcaacttcacaaaccattgccatgttggcatccattttaattcgttcttccgtttgtcgcatgtgccgggcagcagccaatcgatgactgcgcaacttagtgaaagccagttcatccgtctcgtttaaagggagttgcctacatttcttgaacggtggtcttagtttccgttggttgctgctctttcacgagtatgcatgcacgctctagcaaagtagcgacaaaagtggaggccccatttcatccgggtcgcacgtaccgggcgtccagcgagtttgtgaggtggagtctgagtggcggaggcggacaagttcggggcgcgccgccaacggcactttacacaagatttcccgtccatctgcagggaagtatctgttgtatcgtaagtcgtaagtggcaatatgtacaaggttgccggctaccggccgtggtcgggcggcagtctcaccttcccgcatggtggtttgcacacaaaaacggtgtcgcctcgcgttgtcaaagttctgaaacgccccgcgcttggcattcttggtgcacatggaattttatcgccgcggccacgtatcgcactgcttccttcgcctgcaagtcgacatccctctgctcctttgcatatgtacaaggaagtggggatagactcggtaggagccagcgaagtccacttcagtgtgtgaatccagtaaatcagtctgtcaagaatcgagggactctgagcaggtgcgcttccgctgtttgcacagtacgggcacttcgggccaatttcgcgactgccaaacacgtggacggcgcgactttccgtaatcagacacgactcgtggaataatcatccgggctcgcgtgtactgagttgctgccgacagctgtcaaaggcagcatgcgaccaacggtcattcgctcggtgtgtcgtagctactttcggaaagggaagaagcaattcgtatttgatcggttggctaggaaacgcaacaccctcaacgatcattcgttagttcgtactgacaaagagcatcagaccggatctgaaggtctcccacacactcacagttgtcacttatctttcgtttcccaagagtaaacgttgtttccctgcgccgccccgtatgctgacgcgaaagtgttgtggtttgtaatgacatactgtgagacacgagacgcagatacgtgagatgcgctggcaggtgagctgcgcgcacttgggatccgatgcagtagctgtccgccccagtaattctatcaccctgatctgccgcggcctttgcggtccgtctctgatccaaggcgagcaaactcagcagtgcctggacggttcagaacaatttagtcaacgacgattccttcgtatttgtttggtatgtagcgccctccgtcccggtaatgtttgatcagtggctcatggctgcgatcgcggctcccccttctgtctctcagggctcctgaaatgctgttcttccgcacgtccagtactgttgtggtctggcggaattcacaagcgtctccgcgacggtgtttatttgatgtaagacacaacccaagtgttcaatgcgtttgaattacatatgtctggcatctctttttacgaaaagaattggcatgtttgcaaagctcaggcacgagagctccgagctcgagtcaaattcaccttgagcctttttcccccttgtgactgcttcgtagatacgcgagtgtgcggaaagcggtggtcgctcgtcaacaagcagattgtcaccgatgacagcagacacagtttcgttggcttgagtgtgctgacttgggaatttcagtgtccgtgggcgtgtttgtgtggtaaatactgggcggctgtccaatcataaagctggaggtaaaacgccttaaaacggtgggtttagccatcgcatacgcgtcgcggtgagacacacctacgtaggaaggaagaaaccgtcggcaagttgctaatcctgaaacctaaactcctgtaagtgacatgacggccacaaatcaatattctcaaattgacggcacacatggtctgggactggcttctcttcgttcaagtcaggtatgactagctgacagtgaaagtgccga

SEQ ID NO: 4003 - DNA, 3545 bp, Toxoplasma gondii
  source 1..3545: mol_type = genomic DNA
cacagcagagaggacttgcgagatgtaagaggaactgcggcgacaagggtgcagggaaaacgcaagaacacaaagtcctctcgcggtgctctctgcagagagaggtcagtggcgttttcgtaccctggcgtccttagtggaaggcggaagttcctgaatcggcagctggatttcttggtcgtcttcgcacggttcctcgtcgtcgctgtgccgtcttccttcctcgtcgaatcgggagaacgcctcttcctctctcgccagcgcctcctcgcctttcgccgctgcgtcgtctggctgggcgtccgccgtcggatctgtcggactgagggcgtctcgcgccttctgtcgagagacctcgagttcgtcgtcttcttcaccgaagaggtcttcgtctctgccctctccaaacaagtcgtcctccgcttcgacggcctccggctcgaggtcctgcgcttccggtctcctctgcgtctgcggagagtcgtcagaagtcgcttcctcctcgcctgtgtgttcagcgacagcaggccatgcaccgccgtcgagaacctctggagacgcatgcgccgcctcttccatcctgccgcaggttcccggagagcgacgcgggccttgccgggggtgtacgtacaccccagcctcagtgcggctggcggcgagcgtctggtttcgcgggtgacggcggctgaacttccgtcgcgcaagcagtggtgagtgccgcgatcccctcaggtttgctcttcttctatctctgcgcagagctgtgcggccgtcgacgcaaggtcgcttcacggcgatgggcagcgttgagtctccggatgccgttgacgcgtgtaataagtaaactccatggagaaacggcctcttcgcggcgaagcgtctgcggaacagaccacgaagcacagttggaaagaagagagccagtcgggagacgcgtctcctccgccgtcggcgccggtcgcggaacagagaagttcgcgtcgaccaggtgaggaagcagcggcgacgtaacaccagaaagagttcactgggtggatgcctgaacgctaggacgaagccggaaaacgccttaaagcgttcgtggcttcttccgaggaaaacgcgagaaagtcgcgcgttgctcagagacttttttctctctgtgcatgtgcgagaagccgacccgctcgccggggaagaattgctggaaaaagcatctctcgagagtccaagagtgtgcaagaagttgttgtgtacgcttcagcagaaaatcggtcaaaatggagtcttggagaacaaaggtgaaacccccgaaggtctgcaacaagcagtcgagcactgcatgcaaagactgtcgctctgctccttccagggcgctggtgtggcgcccggcgcttcgtcgtggagaaaagatgatttttgtcacttacaaagaccgtgtctagttctcactttctctcccttcgaaaaaatctagcttataggcagaaaatcgactcgcaaagaactccatcagcggtcgcggacgtccgcagaaattctccgagtttcgagtctccgcccgccgcggacatcgcctcccctccctggagtccggtcgccggccctcgcgaaagcgtcgcacagtcttcttgattgctggcgttcgtcgtccccagtttctctctgttgttcgactgttccctctctttcaagtttggcgaagacacgggtgacagagagttccctacggtgcggagagctgcacacagcagctccccaggcgccgagtctctgataaacgagagaaggcgagagagaagggagaggagcgcagagaaagaaaggacggggaagacaaagagagtttacctcggatacgtccggcatttcgcgccaaccaccgatcagaaatgcagtgtactaaaagcagttctgccgacctttgaaatttgattcgtaataacccccttcgacgagtacgcgggatgccgttttcgcggacagcccgtgaacaaacgccctcacacgcaccgggcgcttctcagcaattccagatatttcgttaattctctcgagactgcctccttttcatccttgcacaagcgtcgctatcgtcgcaaaaaacagagctagcgggcttttttttctagacggcctcgtctcgtcctgcggagttgctgctggggtatttgtggtcttcgtcggttacgtgaatccagaaatgcttgtcctgtctcttgtatctctatagctcgcgacgtacttttaggatcagagcgaaagagttcactcatggcactaggacgcagaagaccgcgttagtttggaaaggctttcaaggtcctttctcttcttccttaggagcatctaaaccacaattctccagatacatccaagacctttagcggactccttacctccgtttacctcgtaataaaagactttcaaatgataggttccgagaaagacttcctccagcggttcaaagactatataattacctttccctcttaattaaagactttcaagtgctaggttccgagaaaaacttcctccagcggttcaatgactatataattacctttccctcttaattaaagactttcaaatggtattgttcctggtggacaatcaaagatttcacgtttatggctcgtggtagcgacactggagagtgtgcgccgtgagacttttcacctaaaattcagatgcagatatgtctcgattcggaggggagaaaaggaggccttttccggggagagtcaaggcatggcaccttcgttggtggattcatgttcagagatttcagggtgctcccgatttcctcgcgaacgtagcctgcgaggggaagagacaaacgaagaaacgccttagccgcatgcagcaggactggagacgcgtgccgctagcgtgaaagaggagacagaaggagggagacgaaaaaggaacgaactgcacttttttgcaagcgtcaagagaataaggttgtgcgcggtttttttaaaatccttttcggtgtgtcaggggattacatgatttcaaaagagcaacgaagtcgaagagtccacgcgcttctgagctgcaaagaggcaatttctttgtctgcctgtacatctgagtctccgcgagtctgctgtctcctgtttcttgagaattcaacggcgaatagaaatacaaatgaaaaagcgtacgttttccctggagaaaaaccggacagagaagggcgtttgcctcgtcacagcatgcccggtcgcgtccgcgcgacaagctgtctccttttcgcgtatagagaagtcactgttcaaaagaaattttttcctccgtggaaggagctttttctctcttgggtaccgtctctcggactgctggtctcggcggaaaggcaccttccttgtcggtttgagggcgtcggacgtctgcactcgagaaaagaagtttggtctacagcagcgacgcctgctgttagtgtttcttttcttcggctcttttctgtgagagttctgcagcagagatgcaatgcgacctgcatgtttctgcagttttcctgcctcgcggatgttgaacagttttcgactcctcgtcga

SEQ ID NO: 4004 - DNA, 1932 bp, Toxoplasma gondii
  source 1..1932: mol_type = genomic DNA
ggcgagaggaagttctttgagagagctcaacagaggagaacttttccctctctgagtctttcttcgtgtcttcacaagagttttcacacgagggtaaacagggaaggccgatgacagagaagacaggatcttcgacgagagcagaagacattctggtctttgtgtcgaaagaacagacgctctcagaccactgcagttcttttaaagtgtgtttcgcaacttttcggagtggaagtcacgtctgttcttcttctgttgttttgattcgagaagccctgtgaagccttttttgacgagaaactcctccagcagtgtactttcacaggcttgggatcagagctgaatgtacacagactaggaaggcgggaggttttcaagttgaaagatgaattccgatccaggacttgttgaaatataaagtggaagggcaactgtcgggagtactcctttattccagccgaagcacagaagcgcgaccggagtggagagacgaggactcgcctacggcgaagctcacggaacagctctgcttttctccttttctggagtccgtacagatgcctgtgaaacgtcatcacaactttttcttgacagggtatctcgttgttcgccgctcttcccctcaagctctccacgcttgttcctcccagccaggtccttctgtgtttctctcgtactctcctattcagtcaccctgtgaaactgtttctcgacacggagaagcgtcgctgccaagtgacaaagaggattcgttgactttctcctcgtattgccgctgcacaggagaaaccgactgtgaggaccatttccagcgagaaaactggggaatttctgcgcgttctggacccgcagtctccagcgagcatagcgcaatttggttgcacacctcttcttgttcgtggtgaacttgttctttttctcgtttttctcgtcctcccgtctcaacagcgacgctgtaaattggaggtccacaggcttcctggctggcgcgacacagtggctcttgcctgggacttctgcgctttctgcggggaaattgcttccttcttcttcgagaaagggcgcggctcgtttcgttcattgcctcgaaaacagaaagcgtttaacgcgaaaaaaagaggaggagagagtcgttgaactgctgcatctgcggcctttctctcgagagggtcacacacgcacagcgagacgctgaatcgctgtcgtttgagacaagcgaggatgaactttcaattgcttctttcccccggactctgcgatttctttctttttgcggcacagtcacctgagaaagtcgagaagaaagccactgccaccttgaaaaacgtctctgttttccgttacagagaatcgatttctctctgctggctgtgtcgctcttttcgcatgctcaacctgctttccccgcggtttcccccttgccgtattgcgacagttttcttcttctttcttcgtctttcttcgtctttcttcttcttttcctcctcctttccgtcttgtgtctgctcttcgagaggaaataactcgaaagaaagcgctgggcctcttcttcgctgctttttttctctggtcgtctttcttttctccagatcctgtctccgctcgtttctcctgacacacatctctcctgctttttctctccctactctctctcccaatatatatatatgtaaacgcatatatctcctccggcttttcttcctcctctgtttcggctctctccttcctctcctttcttgcttcttcttctcctctgtctgtttccgaaactcgtactcaacttatcgctgttggcgtctgcttcctcttcttcctcttttcgtcccgcctctcccctcgccttctgtcttgtctcctgtctcgttttctgtctcgtcttcttcgttttcttgcccttttttctggccttcttggaggccacagcagacaaga

SEQ ID NO: 4005 - DNA, 3734 bp, Toxoplasma gondii
  source 1..3734: mol_type = genomic DNA
agcatctgcaacgaactgctgttgattcgacgctattcctttggttcgtcgtgtaataaactccactcctcgctagtagtcaagttaggttgtactgaaagcccgagagcaaatacatacatgacatcgctgctctgttcctgaatagcgacaaatttgtgacttcgtgaactgtacctgcgttgaccgaccatgaaatatgtgacagaatatgttcaggctcgtgaagcggctgcgtgttggataactctgacccggaatgacgcagcgactgccggctgacggacaggctaacagaagtttgagctgagccgggtcatacacctacaggtggctgttgtgtcgtttatggatgcatgtggtctgtattgatgaaataataattcagaatttgtaactcaactgcttggaaactcaacatcccacttgcggcagggagaccgtcacagtactatgtttaaccgcagtttctggttattgtcgtcacaacagattttttgtggtgattatgtgaaaacattgctcgaaatgattcggcatataaatgtccttcccggccatgcccgtagtctgaaaagggattagtgcgtcttccctggcacctctcttctaaggcaagtccatgctcttccagctcgaaagaggctttttgtgcatccagtcctcaaaacaggtagccatgtgtcgtaagcatggtcgcagttcattcagacaccttccatgctgttcctttttaagaatcaggtgtcactgcagcataaagctgtgcctttcgctggcattgcggatcctgctgcgactagagatgtcccgagagaaagctttcgagcaacctgatatcctccaatgtacaactccagtttgtctggaagaagcaaaagctacatgaaaacggaaaacggaaaacgcgaaagccctaccacaaagatggtaaccatccggacacgctgttgaggcttcgtctttgctgaaacccaaaaacggacagtcacagtcagcacaacaatactgacgagcttggcgcttacttgcaatcgaaacagccaatgtgaatgaatgacggttcaacccccgctagcgatattgaagctggtcttgcaggtaggtttgtctcgttctactacaacactgtcgtctcgttgcttaccctcagcctggatactatcccttcctagtgcctgcatgtggtcagagacatgcggaagcagttaagaaagaagcgctgaaggtgcttacgtaggaaaacactttcagttcatctataaggagcggtacatcgcaaacatcctcagcgtacggagctgatccgatgtacattggcaagtcatttgttcgcgcgagacctgttccagcagcatcgtattagagtattttctgcatgaaaaacatcgtcgcgagccttaccttgcgtcaccattgtacagtctaaaataccatcaacgtaaaggtagacacggttcatgcggcggaccactatgtccaacgcattcttatgccgatgaatggatagataagaagaaaaggcgatatcttaccagcgatgtgataccactgatgaggcttcagtctcgagttgctcatcatctcctctcccgctgcacaaacagcattaccgcgtcctcacgacaaacgaatctgtcaaaggtgcctacgagtgtccgggttttgtgatgtagcgacaacaaccttgattctgccttcctgttcacaacatagcgcacttcatcagctgcttctactgcgtgggagtgccagcacctgtcagcatacccttgggttgacgagaatcgcaggagccgcctcctggacattctccctcatgacaccctggaaacgtgacagtcatttcaaagcaagagaaacctggggcggcgtcattgacgacacggctgttaccttgtggagcaacgggcagaactggtcatggagaaggttgttggctctacagatgaaatgaactggctttttatttgtgtgatcatcggggaaaggataccacgcaccgcgactctgcgtcctcaagtaagtacgcgaagaatgtgtagctaaaatctgcagtctgtaggccgtctgcacttgagacgtagatatagttccgtcggaaaagacccgagctgcctgatcctcctattcctgttgccgccatcacctcccccgaggcatgatttcttttgccactttcgtcgagcggcctcacactatcaaatgtgatgtgcagttcaagtcctgaaagacacgcattctgaatggagataatatcaaggaggtttctttaaacttaccatacggctgcgcgctgggaagcagaactttctgctccccgtgcaggcaaagggcagactcaacggccacatcacaaactgggtatgatgtgaaagtttgctctgctctgccgcgtccaacaacagcgatgccgtaggaggcaacagcaacaaaaaagcacaccctcatcgtcgtatgctacagaccgcctcagtatacagtgtggttgagacgaagggaggtctagtgtcgaccagaggcatccaatttgttgtttaactggagctcttggccacaagcgtctgtccatacaccagaacgaacatgcggctgatagggagcattgcaccgaaaatggacagcgtcatttctctggctctcttaatataagactttatttccgtcgtgagccgaaatgcttcttcgcttagcggtttgactacgaggttctctcgaggcaaaacaataatgcccgctcctgatacactgctaaatacaccactgttccttatctgccatactatttgaaaacgaatctttcccaatactgtgccggatagctactaacaaccagctgcagcctcggttacagaaaccgtttttcaacgtggaggatgctgattaatgcgttattccgcttgctgctctgtcagtactacaccgtctcctgtgcaactcaaagcaaccaaattgaattatattcatggttgttcgtccggtatccgtcaagagaccactgtcattatctatgagcatcgatcatacattcaccgtatcatgccttttttcgcgctgcggaaaatcaagcaattcagctagttgaacgacatcacaggtaggctgtctaatccagcaccccccggtgaagacacctccgatgagagcgagcgcatgctggaacggacgacgtcgatgcatgcgactccgtttcacactgggtccacgtccattttttccgactcacgctaaatattaccactttgttcttgttgaacggtggcgatgctggtatgcacttaaaaattcgtccttaggagtcctctgagagtgggaagcggggtcagtgacagttgcgttgtcgttctagcttctttcagcccggctgttcgacagctgcccttggaatgcgagccagacagtgtcctttaccagtactgcgttgcagaactgccgaaggacaaaagcgtctactggacaagcagacggcgattaagtcgaagtttttttttcagcaactgagaaatgatgtctaaagggtggccgtgccgtcttccatttccttattggcccgtcgaatagtacgtctgatatggtggtaaaacggcaatcccggaaacggtcttgagtgactaggtcgtctggttgcgtacattcttttggcaccggtagccttgtgttacggcgacgggttacggttatagactcgaccgtggacaacatgctaatctgagatctcaactcggcgttcaaaa

SEQ ID NO: 4006 - DNA, 4000 bp, Toxoplasma gondii
  source 1..4000: mol_type = genomic DNA
cagaagagagagcagagatcccgagaagagcaagggacgttatccccctggaagggaggaggaggaagaggacgaatcagaaacggcgatgtttacaggaggttccagaagggcaacattgccgtcgagaaaggattgcccgcaaacgcccttgtttgtattctggaaaatgaactctctctgttctcgccgctcagcgcgagtcggcggagagctgcgatggcgaccgcttgatcgcggacagcagctgtggcctcccattcccccaaaatgtcgatctttgcatgcactgaaattcaacgttgtgtcaacaaggaccacagatgaatcgtgtgctcttccttctagcactacgtggactcccctggcttctgcctccacagtaatgttcactttgagttgccaactcagcagtcttcacctccgtcctgggtcatgttcactttgagttgccaactcagcagtcttcacctccgtcctgggtcctgcaaacacagtggctccgagtgctgccgcgcgacgcggatctgctggccctccaaaaacgacgcaggacaaaaaaaaagcatctccggtcaaagagaaggaagatgtacctgcgcggacagcccctctaagactgcatatatgcagatatatcttggatggttcttcctgcaaggcgcttgtaccaccaagatgagtcagcgaaaacacaaggaacgatatagacgtcgtacgcttcgtctacacacgcatacctaaatatggagatatccacagattaataggtagataagtaggtaggtgggtaggtagagtggcgatgcatgctcatctaccgattcatggtcacaaccagggacggcggtgaaagagagtagacgaaagaagctgggagaaggcgcgtgcgagtgaaaaaccttttttcgcgaggccatggccagcggaactggaagagctctcgcaaagagaagcagagaaacgcacactttgtggtggaaagagagtacaatagagagcattcatttgcatgaagtctggaagaaataaatgcaaccgaagaaattttaaacagattcgtccttgcgatttgaaacgcagtgtgcaactgctctccccctgcatatcccgttccttgactgacctagcggcgcgttttaggctttctcaagggaggaatgcatgaagcgaaaaggagtggcatgcgaaagaggagctgattaaatttaagtataaatattgctaaattcactcggtggtgccacaaacggggctgcagctcgtaggaggtcccgaacgcgctggacgctgaagaaaagcaggcgggcgggcaggtagctgacgtctccactgaaacaaaggttcgggggctgagtctttcaagagtatctttagaaacgcttaataacaatcaaaaacaagggatgaattcctcaaggagacaacggaagcgcacgaccgcaagagtccgtcaatgctaggggcggctcatctagccgctacaccagaaacggcacagtgacactggtaaggattggtgaggtcaaaggccactgcagaactgaaaacgcaaaatttcaaagtgaaatcggatttacagcatactgaatccgtccgaaactatgtagagagggaagactgcctcctcgtgaatgtctgcatggaggggtgtgtctgtgtggactcctcctctaagtctgtgtcatgtactgaggagaaactggaaaggaatcccagcccaagtcatcctaattcaagcggaaaacgtagaaagtcgacctgcgtggagttgagcagggttctagtttggtagatgatgaagcggcgttatatgtggatgcagatgctcggggccctggagataaaaacagatgaggaaatggaaacgcataccgcagggaggcagtgctgaagaaccgtaggtgttttgtctggcgaggctggaacaacgaggaccaggtgaacggatgttgaaagaactgctggaaatgcgtgcagttcacagcctccgaattgggtgtgtctgtcgtttaaactagccaagcgcccgggaggctcacacttcaagaagcaaggaggaagtcatatatacccggcagattttttcatgttcgtgcttgccctctaagagggcttcagagcaatgactgggctacagcttgagtgaatgtaagataagttgaatctgcgaacagaggctgccgtacagagtggtccgtcatttcttcggatggaatgactttttggtgtgtgtcataagcgcattgtggaacgaagcgactcggacgggctgtcagtctctatcaaggccgttcacgtatatgtgtgtagggcagaaaagccgaaatctcaatgttgtgtcgttttaaagttaggaatggagcatccccaggggagaccgaacagcccggtttcatcaaaagagggtcacggagttcctcaccaggggaatcatgatcctaaagatgacatgtctcaaccttttccggcgcaagtcttaatgttttctattcagtctgttgccagagaaccactccaacgccagctgcctcctccatggaggcagagagtgcggaacggggcttccctttactctttctaggcagcacgctccagcttaaggaatgcacattcggtgcgatgcctacttcgaagatacgacggactggatgtgatgttgaaacgattcttctcattttccactgtagcttgcatcagtgtccgttatatcaggacagctgtacaacacaacctcgacttaggtttttgcaaccctgcagttgcagatacggtccttgaaactaccttatactatcacaggctaatgacgaatgccgaatgtgtatgtgtgcggggtagaggaaaatgacggatcgtatcgttttcgcttttcacagactgccgcggcctctgcgagacgagcggagatctgcaacttgccacagtcctcaacaataaaaattgctgtcgattatctaaaaacatagtgtagcatgcagatgtaaaaagaatcggtagacgcacgtttcagcacaagacaaaattgaacttggaaaacacatcacttgcgggagaagtcgccactgtggcaaacgcgctacacaccatgtgacagcagtctattcaatggcaacgtggaacagcaaccctggagttcccacacacaaagaagagcaatccctcgtcgtgtggatttctagaaaaagacaaaaagtagtgaaggaatattcaaagagagaaaaccacgtggagagtcgcgcctcccctctcttctcgacgaacgatcggggttggcttccctcacctcaacaacgtaacagaatgatccgccttcctttccttctttcggctgcggaagagtttagggcagcatcggtttcacgctgaaaccccagaaatggcgttttatgcaagctcctgtggcttccctagcacagccgataggcggttcttgcatgcaacctgcacatgcatcgactctccacacgtgtcttcccgtttgtttcccgggaaagtccggagatgcttacctgtttcctgttattaagatgatttcaagacaagcatttcgtgttcattccacagtgtttgttggtttttctttccggagacggcttcctgtcccagcagtctttcgtttgaactcaattcttgtggagcacaatttcgtcgccgttgtgctgcgggttcccccgtggtttttgcccgtttttctctttgaacaaagagcaagatttcccctttgaactgcagcggagttcacgtcccccgtcggccgcattcagttcacttccagacgacgcccccgactccaagtccttgtctctcggctttcagtcggcatttcagtcggcatcgcccgccgcgcgtcgtcacctggtgtctctttcccgacccgtcgacaatttcgctaaatcctcccgctgtttgcaagggtatcggtaacctgcgcaaattcctgagcaacccccacgccggttcgagttggaagtcgatttcttccatagcctgtgcaaga

SEQ ID NO: 4007 - DNA, 2521 bp, Toxoplasma gondii
  source 1..2521: mol_type = genomic DNA
atcccgagacaaaagcgcagacgaacgatgtcctcttctgttgcagggccttcctttcgatcgcgaactgcacgatgaatcgcctccgaaattcgatgataagccgctgactttttgtcctccaggtgagaattgcacttgctccacgggctcgtgtagctctctgagtgaaaaaagggaacacgaggggggggggcgcttgactttccgcagactacaaacacctcttaataatgcatgtaacacagtggccacggcgggctttgtacggcaggcatggtgacttcgttgtaaacacccgtgattgggggttcggaagtcgtttttcgagagtaaatgcgatcttcgttccagaaacagtaggttcagtggtagtgactcaaggtatctgttctgcattcagcagcggtctcggtccaggagagcttcggttccgcgtggccacacgaagaaccgtcacacacgaaggaagaggcacgaaacacagcgtcgcaattgagaacgcgggcgcaaggacctcgaggagctgtctgtcgctagacgggcccaaacgttacgagatagaaacaagttagacgactctgaggaaacaacaacagaggagaaaggtcgcccaatgcagtcagacgtcagcgccgaggaataccagactacatttgatctccgcagctacggaaatatgtggagacaacaatgcaaagacgctgacgcattacgtgtcttttaatacatctgagcatgaacaattgcgcgcatgtgcctccctagatatttccacctatgtatggctacatacacatcctttttagaaagaggatgcttgcactacacggaatgcatcaacaccgcatttgcacatcttcgggcatctttttctgtgcttcagaaatttccagtgcgagatgcccatagctatggcactgacctcctgtgatcgcgctgagaagcaggatgcaaagaactacaaacagaaacatttttggttttcgagaattcccaatccttccttcaaggccacgcactgaaaccgatgccctgttacggagtgcacctcgcaacatcactttggaggacgggaggaggcgacgtcgatcatggcctctttgttttgcttgcttggacgctagcagaggattcagctactagcagatgtactatgttttacgaaatacacgaaaccactttatttacagacacgtgcatcttcctgcatggagaaatacggcgaactgacaacgtgcaagtcgcatcccaacagaactttctgcgcgtttggaacacgggaacacttgagttgtcacagtaacggtggtatttctcgagggacggagaggctgacaccagttaaagacagtgcataacgatgtcgtgaggacgccgagaaggagaagtctcgttttcggaaagaagtctgccgttttggtcatatgcgaacgacgcaaggggcgtttctgtgcgtgtgtcgtggcgcatgcatgggttcgtcaggaaagcgggcgcgtgtctcgtcaattgcggcaaatcttggcttgttggcgagtctcagcgatggtcctcaggtctctcttgccgatcatctatttaacacactttatgttttttaggaaatgtgtaaatgaaagcgaagcaaaaaaggtgacagactgggtctacatagtagagtcaaaagtttgggaacatagtgacgggatgcaactgctggactcgctgctgtcgtcctagccgtttgatgcgacgaagcctctaattcgtcggggaatttggaacccaaaaatctttccgacatgaagaaaaacgaagccgaagaattccgccaaagtcttcctaatatcggatcatgcaagtttctccctgcggtccgggccacgccaggctcaggactggtgtgttgatttgaggacaaactctaacaggacaagctctacattcagatttcctcatccttcgcttgcattcagaacggactccacgctcgctttttcgccagagttaccgctgttgctccctctttttcgccactttcgcttccactccttccgagattttctcccagaactgaccaaagaaagacggagagtgcgtgttgtgtttatgcatatacatatatatctatatacgtgacagtgtagtgcacgatgctatcaacaaaaaaccagctatacgttttgctgagtgcaacggagtatcttttcttgtcatgtctttagttgccttttccactttcaaaacgaaatgtccacgacatctgcgtttgcgagtgctacgttcccaattatctctatacacgtctcccgatgtattcactcaaaaatatctgtccacacgtgaggagagcatctgaagtgaagctcatgacggacctgccgttttttgcgagggaacgctttcgagacctccaaccgcatgttcctctgtgaatcatgttatgggtagcgcgcggcgtgtgctgtgtgttaatcgtaggagaggtttctcttcgcctgtctaggacggcagggcttctggtgagaccctgccacca

SEQ ID NO: 4008 - DNA, 2773 bp, Toxoplasma gondii
  source 1..2773: mol_type = genomic DNA
aaggcattgactgacgttgattcaacgcagaacaaggaattgtgagtgcttgtagtgggtcacttgcacagaagtaattggcgagcattgtcgtctgcaggcctgtggcgacagccgttcgacacacgtcagtgcactctagataagcaatatcccatcggaactttcagccttggacagttgggtatttgaagcatcgctggtgatcaaggagaacatgtgtcgtatctaggagagatagcatcgcgcaggcgtgtggccctctgttgccgattctgaaacatacttcagttacgccataagaagagatggtaaccaacaccggtcgtacctcctgcaaaggaactctgtcagattctcctcggctggcttggcatgtcttccgtctacttcgatccacgggacatactcatatccaacagtcttggagtaagcagcgacagccttcctgatcgtttcagcagatgtgtgttatcacttcagccgcatgacctgtgcgctgcttacataagttttgaacctttcacggaggtgacacagtctgcatacggcagctgatgctgtatatcattaaggcggaataaggagccactttctaccttgtatggttgcctttttaccaccggcttcagtcaggcattgtcgccattgggtgtcgggacttcctgcgatgctctcgaggctaaaaaaatacggcacatgaatgagaaagcagcaaattactttagcctaccatgtgagaacgttcgtgatctgatgagagtcagtgtgcaactccctgattgcacaagcggacaccttattcctataaacaccacagtctcttcctggctttaaagcggcttggagtttcgtcgtacagcaagcattccgcaggaccatgctggcatgcgatctcgccgccgcgttcgagtgcgttgcctaagacatttggcgaatgccgcgcagcagagtatccggatttattcgagcatctacgcttaccatacggatacaggcgtaggtcgatgtagtcagcaatatcactcttcataatgtgcgacagttgttgtgtgataagctgtggccgtatagtttgcaactcaaaaatgtcggttgctgctcacaaagcttactctctgacagaaggggcacatggactcatacctaattgcacaaatgccgaattcgaatataggcggtttgtaatgaaaataacaccttacatgatgtcaacctttactctgtcgtttttccgattgttatgttgtgagtggttgtgtcgaggctcgactctaattgaagctgcgcagactccagtacaagagccggtggccgtagcccaaataggaagccaagaaagtttcatgatattcgctatatcaaaacagagttttcgtgccaacgtgactatcaacacaaatcacaggtgatgggagcggttcatatctcaatcacatgtgaaggaagcactgtcattacagtcacggtgtgcgtccgatgagcatcgtaccgccagcggtgctctcacttcatctgtagtaccaggatgactgcgcccacgctgctccgtaaagtatcttctgaacggatattgtttaataaacacaggtctccggtaagaaattaaaactgtttgatcgttcaagcagcgggcagtgaggaagacgccagcgttcccacggcacaaaccgaacgtgttcttctgtggtttgagccatgagtagagccagatcggccaaagtgtacagctacttcatcggtaactcggttctacgagggaacggccgagttcaggaagccatatacttgcttgtttcgagcgtgtgagaagagtgcacaggcggttaccttgtactatacgctgaaccgcggttgctcgacttctggttgggaagcccttttatgattgctttgatttattgacgtatacggaagaactgacccgtggcgcactcatccttgaacatgacaaatgacctggatgctgcacgtcacggggaagacagacacacatcacgatgttctctcaaatgattgcatccgagtcactggcagtgctcagaagcggcggcgcggcgggcgtctcattgttctcaaaaatcaccacctgcaagtgacagcttatgcagcctacgtcgaggagattgttgagatacttcgaaaattttgggtgtgacgctatctcttcctgcgaccaaggaaaaatatcggatttgctaacactgtcgcgcgaatgtgttcgcttgtacttcctggcattttcaattgcactctcctaacctagcggacccacactgcatgcgtacgaaatctagtcgtaagctgttgccgaatcgaagggtctgcttcaggttaggatttaaaatcgatgtaatcagtccttcatcacgttccacattcgactgtgatttactgtcacttggggttctgcaagtaacgcgcactgcacagctgttctaaactatgttcccacacgaacagccacacatgctctggcgggctatggcttccgattgccagcatatgctacaggtcactcatcacttcctcaaggcgagggttcgtcattgttttgactgttttacgctcgtactgcgtggcctattgccccgaccatgtatgggaagacgccccacgaactgaagcagctaggcgtctactggatctacactgttcattatctaaagctgagtgacgtttctggaagctgacggaagtcgcatggagggcttcgttggtcgcattactgctgggcaagcgtaaagaactgcaactgatccttgtgttacca

SEQ ID NO: 4009 - DNA, 3061 bp, Toxoplasma gondii
  source 1..3061: mol_type = genomic DNA
acctgagacgcgcttgggcactacttgagacctcaagacgattcgggcaccggtgtggctctctgcacggcaggaaacagcccaaagggacactcatgtgaagacgagggtcagatataatgtacgcacgggtgccctagagcaagactgcggttttctcctgatacacctctagaggtacagggtccctgggagacacgaaagaaagaacagcgtcccacgatatccatggcgacatccacgtacctaagcggagagagcaactccagcgacggatcgatgcgaaagaaggcaccactccaacgcttgctgcgccacaccacttaaacatttgaagaagagtttgttcatgaggtgaaactttcatcgagattggtttcatcattgtaagccccaactgccttcttgcaccgcctcgcgaggatggacttgtggcatgggtcaaagggaaaaaaggattttagggatagtcttcctcaaaccgcactcaacgtgatcggcaagatctgcttctgcaagggagctcagacctcatacagatacttagacagcaaagggtcagatagcctgtggtattgacagggacacgtgcgttcctgcagtcctgcagcgtcaaagaagagctccaaagtttaggggcgtcgaatgacccggttcgttgtttttacgtgtagggacggtgtagcgtccttctggttcctgaagtttaaaaaagttggccccaaactgatattactcatagctatggaacagtgaatttaaacatgtgtgataacggcatccttggagtgaagcagccgtctccgcttgtttaccaagtaggagcggaagctggagtttcccacatccacaaacactgtttggaaaccggtccctgttcgtgggattctatcgacgaaattggtttgaatgtgcaacttaaattaagataataggtacggaggtttgaacgaaaacttccaagacacactgacgaccactttgttgtgcttcaattactgctgtcccggcacgcatacgtcaccaacatgatttatgctcagcttcatggggacatgcgagagcacatccaataacttagtcggatacgtggctgttcggatgtgtataccctgctatacacgtagacactgaaagagaaatgggtggtttgtctctgcctaccactttgggagtttagctattgcatgcgtcgcgatgctcctcgagcccgagctcagaaatatcgttccccagttctgcggcatcgacactttgtataacaacacgtcactcctgcacgatcgcgcatactctgtttcgtgatggggaatcccctgaatagcagaaaaacaaaagtgcttcgttacatgttcctcctggatataccagaagcggacattgggacttggtgtcttcatagcatatgctcactcgcatacggtgatgcttcacgccatagacaatgtctactatattgtttgtctgcgtgctagccccttgtctcgcgtcgaatgtccacattgtttgtctgcttgctatcgccttgtctcgcgtcgaatgtccacacagtttacctcatgtagtagattagtgctacctggtcaggcaagtagagtgtgacggacacgcactagaagtgccgtcttcttgccgacgagaacgtaaaactgaagtgcgatccgatatcgttgtcggcagaatcgacactgcaccaaaagagacagtgaacccgatttggttgtgggttgttgcgaacatccgtgacacacctgtctagtgtttatgctgatgctccagctgatcatttgtattcaacacgaagcctatatgagcaaatacaagaagcaagtagcagttttggtattgcgggcagtgttgtctaaaggtgtggaacacttctgcaacaacggtgcccctgtcacggcccgcgcctcgcaaacccagaggcggcatcgctcaccctgggccacccgtggccagtaagtgcagtttgctttagtgctgcatccacggccgatttcatgaccatgatgggagtgagtgagaaactgctggtctgcagcggtgtgaaacctcgcccaccagggctacccactttcggcacatcggagaaggaaccatagccgttggagactgtccagtatttcgacatggttcaaggcaaatggaacaagcacgaacacacctgcctcacagctggacatctgagtgtccagtcaccgtgcgtagctgccgtgatggttgggttgacactggccccgtttcgataaatgagagatcgacgtctttttgagtctgccatgccttcaaatcaccatgtcacatttcgtgccagaagtatatgtgtcgagatgtatcagaccctttcgcgctatgccgtccattatgttctgcgatgtgtttgaaaagacagtactgactgcattcggcggcttatcgggtggccgtggcagaagggcaggcggtggagggcttacggggcatcctctctcgcatgtgccagtagagctaacttattgaagatttgtcttcttgctttcctgtagacaacgtacccgaacgtcatgttggtactgaaagccgagaggtgattgcgcagagagtcttcacgctttgcgttgtgacgcttctgttcggatgcaggaaaaccacacgctttgtagatatcaaacatttggacttggaggctgatctatcgagtgaaattcacgcttcatgcccttttcgttgtttccacgtcgctgtggatccgatgcctgcaagtgagacgctgtctggcggtcccgtgttcctactagccgcggaagtggggggaggggtacgggccacaatatcgacttcccgtttgctgttgacatttcattgggtgttctcccccctctgcttccaccaccggagcagttccacttttgagacaagtagcgtaaagaaaaccgaactctcttcaagaccacgtttgttttttgtggtagtacagacactgtgagccgtcctggggctcgcgtgttccatgcacggtgtgcgcgcaaatcggcgctgtcgcgtgccccttcgtgacgtcatcaagcaataacggtga

SEQ ID NO: 4010 - DNA, 2003 bp, Toxoplasma gondii
  source 1..2003: mol_type = genomic DNA
cgcggttctggtgctactttcaaaagaagtgtttgttcccggttcttccgtctctcgccagggagaggccgaaggtgccgctgcaagaactaggttgtaacaggacacggctctgcataggcgcaatgccgtcacaagtctatctggcgcgagaaaggagttgtgggcttcgtcgttgccgaagaaaaggaaacacaagtgatccatatagctggagatattggtgcgcatacactaaatatagttttgataagtcatgctttgcgcccttgtcaccgggaatcgctggcgacaaaacaactgggactaacaatgataggcttatacgagaatgccgagtatgtgtctcacgccttagctgcgttagcggagaagctctctgtagctgcgcgaatctactttcttttcgagcacgtcgggacagggaaatctcgcagtcatgctgatgagttcacagttgcctcagtgcccctgcacgcctatctggctttgtgatgaacccaccaaatagttttatttactgttaacatacggatcggggtcgtcttgactttttggtttgtgggacaccatgattccaagtctaagatatcatccgagttttcgtggcgccgcggttacgattaggcgtctgacgtgtcgaaatccacactcgacgggccacgctttaattgcgcgctctccatgagatgagggtggcactacaccagttgaaagtgacttcattcttcgatgcaccctatgtagaaaaccacaccgtcactacaaccaccaacaccgaaccaagcacacatggaggcaccatgacaattcagaagcaagggggatgcttttctgaaaccggcttgtggtacagggtgaatggtatagagtggttcctgaggatctcaaaagactgactaacgaagaatgagtttgcgtgccccgaaatatgctacgggagtgccgaaagagggcacaatagccttttttcgccacggaacaaaaagagcttctcctttaagaagcccttatccacaaccgtactgtgcgggatagtgatagcacttgggcgtgatcggaataacctatccccttcacagaaatgtgcccacccatttcacgtgaccgctgtagacaatcacactgtgaaacaacctttcgaaagatatgccgttttcatacataatattggcaggcactgccagttctcatggtcgagtcgttcggcgtatacagttacacggaaatagtccggttcaccgctgccccagcataaaacttgtgacacacatgactgattgaaataagaagctctcacacgtaaagtgttcgtttctccggaaaaagtcgcggcgacgtacgtgactcacacgtcggggaagcgagacggaggcgaactgtttcaaattggcgtggaagagacgaaaaggaatgctatatcgtcgcttgttgctatatgtgtgacttcaaactgaagagaacatcaatgctgtagctggcttcggatatttcataaagcttctttctcggatcctcccctcgtggcagaacgttgctcttctgacatcctcccgagaagccggtttctcattttcggcgcgcatacagagggaggcccacatcccgcccccctgacataatcactccagtctaaattgacaatttgatgagtacaaccttaagctgttttgtttgattttttctccacaaaggaatactaccatccttgaatggaaagtcgtgctgcttcgttttgacataaaatgtagttacctacgagcgaagtgctccgtggtcgtgtgcaagtacagttttccatattcaactagtagacatgagagatcgggtattcaggttatcctgaaatgcgtttctttcacttccagagcttcaagtcgaggtggttgtgaagagacgacagaggtcttcggtgcagcagcatcgcaggcttgtcacatgcagctgttttgactcgcactgactttttatcaggcgtcagtttttttctttcctcgagacta

SEQ ID NO: 4011 - DNA, 1130 bp, Toxoplasma gondii
  source 1..1130: mol_type = genomic DNA
tgttgtctggtaacatatacgtatagggaactccatattttctacaaaactacctgcatatgcataggcacacatatgcatatatatatatatatacagggtttacggtgtattcatatgcacatgcatatatatatatatatatatatatatatatgcatgtaggtgtgtggagtagctctgtttgatgtgtgcattggggtggatcgctggctgtccgcagaacgtcgtttcgcgcagagacgtttgcctcggaaaaggttcgtttttttccgttttacccttcctgcgaaccgccatgagaagcggcaggagcagcaggtttcgccagccatggcgccgagagcggcgctgacgacttcctgcacactgttgacgtcgtagaacgcgaaggcgtatcgatggtcttcgaaaacatagtgtctcaacgcatatttgtacttgaagggagacttcagatacgtcactcgccactgccgccgcccaacgcgccgcggcacaggccagggcggagaccatgaagaagacggagcagaagaaggagcagaagaaggagcagaagaaggagaggaagactcggaaggagacgtccaacggagagcgttcttcaggttctcgatggtagcgttcattgaagatctgttacgggagttgtacgtgactatgagcgaacggagcgaatacgccgagagcgccatggtgagttcttgaagcgtagacctcacgagcagaggaagaacaagcagaggaagagcgagcagaggaagaacaagcagaggaagaagacagagacgacgaaggtgcgtcagcgaaggcgcgacaggacaggagacgaagaggagagaggaacgtgagatgggggcagagacagaatcgaagagacactgacgaggaagagcgagaaggtatgtgcgaccaagtgattgtcatctttcccccggcagtggacccaacttcaaggcatttgagatagtgagaaatgcaagaccatttgacacacttttgccttccgcgtttcaactctttccttcgtctccggcgctccgggcgactttgtcctgctttcttccccgcctctctcttctcgcgttttctcgtcactcagaggtagtctctgagaggcgcgtcga

SEQ ID NO: 4012 - DNA, 853 bp, Toxoplasma gondii
  source 1..853: mol_type = genomic DNA
cgcatcgtatgcaggtcggtcgatgaagttctacacattctcgaacaagtccgtggatggcctcggtcttgttatttccaaactacggcagagttacgcgaccgtcgggaatctctacaaagccatacagaacgctctgagcaggagatcgggacgtttaggctggtcgttgtggaaagagctcctctacggtgcatgagctgatgttgtgtgtcttgatttgaacaacgtgtgaatgtcatctttagttggccgaatatcggcgcgtcccgtcagcacctgatggccaacaacagctgctgctgtacagtggtactttcccgtagtgtaatacaagtggaagctgtaatgttgcttgtgtgatgtaataaaatcgatttatcagagcaacgtgggtagtgaccgatcacagagattgatcttgtgatggtcaacgcaatcacagctgggaatggccatgacggagccgaaccattggaacgcttaattgcattgttgcatgtgtctgacaattgttgcagaggatacttcagattgataacatgaaacttccctgctcatcaatctgacaacttagaggatgtcagttgtcactcttgtgtttggtaattacagatccaactaagtcattccatcattaccgcgggtttacgtttataacagatctgagactgtttccacacggcgactcagaggtcgtcgtgctctctcagtggggatggtatgctgagcacgctggcttatttttttcgctagaggtggcacagcaactcatatgtatgatcgaaccagcgtagtaagttgtctcggtgcacactgaagtacttccttcttgaagaaacttcccggctaa

SEQ ID NO: 4013 - DNA, 3957 bp, Toxoplasma gondii
  source 1..3957: mol_type = genomic DNA
aaacccatatctaacggctaaaacgcaagagacgcgagcttaccagagatctctctgaagagcggacgaagccttcccctcccgagtcagagcccgcgcaatgaagcgaagtcggagcgacgctgccgggctgtttgtacacggtcccgactgcgaataggaacggggaaaccgtttcttcttgaccctcatgtgcgaagagcgagctggaaagcgaagcaaggccgagaataaagaacacaaacagaatctgagtcagtcttccgattctccgactcggctgcaccccaccctccagtgcaggagcggtgtacgtacacccgagaggaacgcctcgagacgcaggcgtcatttcgtttttcgtgatttcgacgtcggagagagagggtcgtttggggacttgtgagggatccttcggccgagggacgtgtcccgtccacggacaaatcgcccgtcgtttcagcaggagagaaacccgtcaaaagaaaagcgaaaggactttgcacgagacaccggtgaagcagcgtgggaaagcgcgcctttcaaacgcgttcaccgcctcgtagaggatgctggccagttaggaaacccacccaacttctcggaacaaagatagggatgcgcagacgtccatgggaagctgaggccagcggtgggaatggatagtttccagcagaaaactgtgtagagtgttcagacaggccgtgaagactctcagaggatcggagaatgatttctcccgttgcgagcgaatcgcgtgcggaacggggacgccttctctccctgttgcaaggtcacacggtggctgcggtccgacagagtcggcacaactcggcgcgaaaaaattggtcaaagagaagagtaatggcttctagcagctggcctgtcacgcgaatgaacttgccggccgaacaccctgcgatgaggaacgggaaatcagcagcaagctggaagctgttcaagagaaaaaatcaatcgggaaagcgtagacaaggaatgaaacttcgacggctgtgcacacggcagggagaaaaggggaaaaagccggacgctgcgcgcacaaaaccatcaagacttccttcaacagccttctgagacacaaaaaaaccgatcactcgactccgtctctccctgcagcgtttcacttccacgatgctgaattccttcaaaatgttggcacccctttaaggcgaacattttcttcagcgtttcggcagagcggcgtctcgcaatgcagttgacacactgcatgtgcggggtaccctgtctctctgaccggagacgggcgagcgcctagacttcgttcaagtctcgctccgaatataagcgagaaaaagatagcgaacgatttgccgtaagttgcttcgaaactgtgtccagtctgcttacaacaaccgaagatttctgtgggtccgtctggatcttcacacgactgggagccggagcgcacggaaggaagggaaagattcgatgggggattcaagctgaagcagtctgcggtggttttcttccaacgtctttgtccaaactccctcgcctgtttagttgtctaaagttccagtttcaaggctcttagtgccttttcatagttttgcttgttcatagttttgctttcgtccctgcttcaaggctggtttcatcttaatgacaaaaatgaccccacgagttcagatcgtaggtcctgtcgagttgctcaaggaagatttgctttcagaactggtgacggcagcgctaaacatgcgtgaggatgaaacagagctgagacttccgttaggtgtgaaaaaaaaaaccattcccttgcgcggaatgccccccagttctgtagcagtacgtcgtaatttgcggtgaggctgacgagctacgaaattcgaagccattctcggtgttggtatttcttacagatcctcgagatcgaacgcgactcatctgtttgttactatcagcagcgtcggttcttgacccagagaaataccgtctttctagtaggaagggaaacttgctgtagcgtacagctggagttctcaccgcttgcacgagatcccatgtaaacacatcaccagcacgttaatagagcacgcgacgactgcgtgagccggtccggagcaaatcttttcgtgaacagagctagacaaatctctcgacttctgtggagcggccctacagaggtaggcatgacttcgacacccggcataccacacgactgccaagaaagcagaggaaagtacgtctacagccactgccgcattcaggaccgtgaaggcacacacctcgccaatccctaactcgagtaaactgtctgtttaaagcgttctgtgagggcccggctcccaaaattcctgctgtcgcgaagaaaccggcgcagagcctcctggatagcaagtgctcaacatcgctcgaggaaccccaacagcgtgcatctgaggaagacagtttctcggattagacaacaaaaattcaaaagaccgtcttccacgaccctcctccacttctgagtggctggagttgtcgttccttactgcatccgaaaacggtcgacaatgtaagaaagaatctgcacgcctacagatgccttcagactttactttaccgcccaaaccgaacttttttgtaaagaacgctgttgagcacgtgttttgaatcccccggcagcggcacgtgaatcctaactgtgtaggcatccatcttcacggcacacgagggaaaattctttggaatgagtgtcgtcaatgtagaacgtctgcacatccggcttctcaacaatatcggaagtcgcgcagagtcacaccgccctgacaaacactccctcgattaggtttcctctcgtctctccccggacgtagatatagttgttcccgacttgattttctcggaacgtccgacaaacagcaaacatctaatagttctgcaatcgatccaagacacgagacggcgcgaaagctcccctgttcacggtacgtcgcacttttccgccagcgcgaaagcggcggaaaaaagaaggccttcgaagcagcgtcaattataacagttttcgaggactggagcatttctacgaatgttcagggtatggccgtgtagagggatttgctgcaacgcagaaaactcgacaagcagacaaaacccgcctcccgggatacgcgttggcaagctaacgggaaccctcatccctattgtctcgttgttcaccacgaagccgtcgttctcccttggtaatgagttttcttctttctaaatatttttgtttataccttttcgggtggcgtgcatttagcgccactttgatgctgtctacctgttttcgcgacaccgctgcttgttgtgtcttgttcgttgtcgtggcaagccgcggtcgcggcaacttcacacaaagggttaaggttcacctccgcctctgtgcattggaaaagtgccatttaatcgtttatacagcggcaagtccagatctgttagtcccttctgacgaataagaactttatggggctggttgtgccattgtcgggattcgggcattgcgagccattgcatgtccgtttcggctggcattccatggcggcgctggggtcttctgcatttcctcagcaagatctgttcaggcgaaaatcctcgagagaaatagccaattgatcggagggcggaaaagatgtgtcatttcaatgaatttttcggatcatcgaaatcgatgctcggcaaccggttcacccactacccgtcgccgctaccttgtttgagtgctttcgctcgcagcaaagagcttctacgacgtcattcttcgatatttgtgccctgcatttcatatgcagactcgcagtgctgttggcggcaagtggtcgtgtgctaggcccgcgtccccgtcgtttcccctccttttggcctccatgtagacaaggactcctgcccggattttatcccggaagggagaggtcggtcctgctctctgtttcgcttgcctttttctcccaa

SEQ ID NO: 4014 - DNA, 2098 bp, Toxoplasma gondii
  source 1..2098: mol_type = genomic DNA
gaactcaatacgtataatgtgcacaaactttagcggttctgtcaaaaagaggcaagtgaaatcacaaatagcgacgaaggcaaccctgtcttcgtttatgacatgcaaataaaagtatctgcatggaacaccggataggcgctgtagagctgcctgtgcacttctgcgtattgacgtggtgcgggtgttgcctgggcatgtttttccgcactgtttgtccgtgcatatactttgaaaaggtttggaccagattaccctgattgtctttgttgtaataataccaggtgttaagttcatacactggaacccaatgattatcgctgagcttggcggcagtcgctgcagggcacatcggacatcaagtgaaagtcgtgcagtggcaagcttgttccgaattcatacgtttgttgtgtgagtggaagcgttcagtgaacagaggagcagggaagacgaatgcgacgatgtagttgttgtcagtcacctattgagtgaagaccgggggaagtcatttgttgggagctgatattggaaatgtagacataaacgcgttttacgagacgcgcatctccaagagagaactgcaatcttgcagcatgccttcttggaatccctttttaagattgtctctaaagtttgctgaaacagaaacactgtggatactgatacacgttgcgttctatctctaaagtgtctaccagtcgcagggatgccggggacagcagggcagatctctccggaaacagagcaagatagcggagacgagcggctttttgcggattgtcagaatctgtggaagctcgtctaaacttgttctacgaagatgagagtcctcaaagtgcagaataaggtggaaaagtcatgacgatcacactttggctttcttagcagtctggtggggacggggtgcacagcacctcttaagaacttggttcatgtaccacgtaactagagtcacagtcggtatcacaggtttagagagactggataacaatgtttcagtttttcacttgaaagtgaagatcatccgtaactctgtcggaaattagaagcacgtttatctcgtgtgttgtgagcggtcagtgaggtcatgcctttcctctgaacgacaaacgcaaccagctaaaaatggaaaaactattctgtccgtcgtatctctgcaacagaaatgcatataaacttttgtggggccgatccatgtattccgtacggacaaacattgagaagaaacacgaaaaggtgtgtgtgcactttccgctttaaaaaaacagggaatgcaccctataatagcctgacaggtagtgtcgaacacagggatcttgtagtgaacaataaaggcacacgaaacggaatcaatggcgtgagcctgcactctccagaaaggcggtgtatatagtcttttggaaaccgatacttttaactgtcttcaacaaccgagagagataggatggtgtacagcagtctaatcaagaaccagcgattttggtgaagcaaacacgtaccacgtcgtgtacgttgtgcatctgctgtacattttctcttttggacaaaaaccacctaccaaaacaacaaagtccgactgtctgactgccgagatgcttccttcccgtaggccagtgtctcgtcgctctgtcgccccggagtagttttccgttaatgggcataatcaacgggatcttccaactatttgtatctagagagaacgggatgaacgctgacggtttgagctgtagtcgattcgatgggcattttaattcacgatccggtgccatcctacccttcgaagagtgttgttcacgacataaaattggaaatgacacaaagagcacggtagcagaataacctgtttccacaaagcttcccgaaaacatgaagaaaacatgtagtttcgcgcgtctcttgctcgccggtagctctaccacctcggcgtctctcgcgctgggatagccacagtccacatggaattttcgggcaaggaacggggattctccttgggttactcgctatatcctagtgatttcctcctttccgtggctcggttgcccctccgctttgtttttacaccacgcccttgctttacctacgaatcgctgtcggacca

SEQ ID NO: 4015 - DNA, 3909 bp, Toxoplasma gondii
  source 1..3909: mol_type = genomic DNA
gcagaagaagtgcgcgagacccacagggcggcgacaaagaaaaaggagaagaggaagagcacgagcagccgaccgcggaggagagagaaacgagtgtgcaggcctcgggtgcatcatacgaagacgcgtttccttctttgctttcctctccaactcgacagcgactcgagctgcaccatcggggcgaagaggcgcatgcgcgggtctgacaggaggggaagaaacggtggaaacagcaagcgtttaacgcagacaagccgcggggacaaggaaggctgcgatccttgtcttgccccgaaaaacattcttcctctgcctccccgtgttttgagaaagggccggcggaagcgaacagagcagagaagccttcggagtagaccgcgagcaactcatcttccgacggctctggatgcgcagcagatgctgaatggcacccagccggaccccccctcaagtcgccgcttgcgctggcctcttcccacactctgcgagacgccagacctgacgcctctccgtcggcagctcgcgcccagccgcaagaagaagaaggagagcatgtggatggtgagaaagaagccgcgactgaaaatgagtgatggtcattcgggtaaggcgcatcgcgacaagtccggcgagttcgcttcctgtcttgcggtcgagagaagccttgttcctctgctgggtcttcaccggatccgcgaagacagccgttgatgaaaaaaatgatcgcgaggtcgtctaaacgtttttcgagggcaagaggtacaggccgctgtccacgcagcggcaggtgcagcgcctcacctctccctccacctcctaggtagctttgacagacacgacagcacctggaatgctccgcagcagaggaagaagatgagcaagaggagaaagacgaagaggaagaagagactcgagaagaggaagaaggcgacgcaggggaagcgcgccgagcgacacgggggcgaagacagggccgatgatgaggactaacgagggcaggttgaatccaggatgaggcagcaggaagggcgcgagtttgcagccgaggcagctctgcgtcgaactggagttccatttttagtggcagagcagtggaaaaggagacaggaggcgcatgcgtcacgttggaaagaaacggcacgcaagcaatcggggagaaagagcagaaacgtatgtagaaggcggaggaaagtgtgtgttggagcccgggaggatcgacagcgccgggagcagcaggaagaagagcagagacacgcagaagaagacgcaccgtgagttgaggtcagaggcgttggctgtgatgacgcggcagccatattgactcccgcgatgtttctcgcccgttcactcttcctcgtcccttcggcgtttttttcgactcagtcaaagctttcctttaatctcttctctactctgctctctttgcagagcagcgaggaggagacctttgcgcctgggggtctcctgcctctgtatacctctccctcctagcacacgagttcggaccgacgaccacagcaaaagcgccaccccgatatttccaaccaaaaaactattttgaagtctgcatcgtggatcaggaagaaacgactgcaggttctttccttcagctcctctgcgtaaagttgctccgccgcgctgcgccttgtcggtccagtttttccgcagagtcggttctcgcccgctccccctgcgccgcgccgcgcgctcgaccgctgcggagaagctcgcgctactctttgtttaaaagagcagccgcagttactcccaacacgagaaagtgttaagcgcgggctctggcttcttttctgcgattatcgtgctctcgaggtgcccggcagacgtcttgaagcgcggcgtcctttgcggtctaggctgtcctagacgacggagagtccccgacagtctggtttttgctctttgtccgttcactgtttgtcttccgcactcatttccgtgatcttccgagctgttcggagcgcgaagaagtgcctagctaaaaggcaacacagagagaatgaaaggcggcaacgtgtcttgtcgcgaaacctccagatgtcccgctgccgtcacgctcgagcctgcggcgcggatttaggttcgagtgtgcctgcgcgcgaggcttcttctccgtgcgttttgatctgcgtcgcagtttcttccttctttctgtcttttaaggcaaactgaagcagagagaccgtctcgctgcttcttgcttcccgaagaacgcctccaaaaagtttccctgccttccttgttactctgtctcccccctcgcgcccgagtgcgcgcgggaacctcaagagtcaagcgcgctctgcctttctcgtggttctttctcgggttcctcgtcgctgcggaaaatccagagagcgagaaaattgatctgttctctggaaagctgctttctgcgcttgggagaggaaactcccaaagagagacttcttgtctcaccggttttttactgaaaagacccgcgtcgaaaccgggacgatgtttttggtcgatggtcgtggcaaaagggctagcttcccagcggttcttcagagcggcttcctataggattcctactctcgctgcgtccgtgcctgcgttttccgtcgtttaagaggtcttgcattctctcttttgtcgtgtttactcactagggattgtgtgcgtggaaatcgtcaatattattcgcctcaatgcgccagtttcccagggaacgaaacgccgggaagagccgtcctcaatcgacaactgtctactacgtatctctctggtcgccgctggaaacaaaccgtcgcagcctcgttttcgagaagaaagagagcacacccagtaaagctctgacagggaaaaggcgaaaaatatttgcgcggattctcatttgatgacgcagagagaaattccggtggtcggtttatccatgccgccatctagctggcccaacatgctttcgaggcgctccagaagcagaaaccttttccgtgttttcatcggttgttggtccgcctctttccctctcgcgtctctgccttttctttggtgtgttttcctcagggtttgcccccgcctgtcggtgtgtttcttcggtctaaccgactcgcgaagtcacgcgcatctgaaacgcgtttgacgctctagtttcgtgcctctttttctctttctctcctaagatttccaaaggttctcgctgcttttttgtcgcctctttgactctcttcttttgtgtgccgtctttctcgtcccgtgctcgcctttctcttcgccgctgcgtttcagccccgtcctcaaccggactttatagtgtctacgaagggtttccctcgaactttctcctgtacctcctctgggggtttcctcactttcttcccttttgccggtgtggaggcttcagcgtcaacgcttgacctccaccttgttcccaagtcgtcccgccttctcacgcccactgaatctttgcctggaagagtctgccgcgtctcttgttatattctctgtagaagcgctattttagaattcaaattgtgcaccttaaatcctagtcgactggacatactgagagcgagaggaaacgaaacagtttctcgtttgtcatagccatatatatatatatatatatatgtatatccttgcatcgtttttctgcggcgacggatgacgggtaattccgtttgattggggtagctctttcactcgcacatttttgtataggcaagccgcgtttttgcttcttctaacttcctttgtcagcgatgtattcgcctcagtggcctaccactgtggagtcccgaggtcgggaccgggagcgcatgcatcgtggggaaagggccagtcgtccttccgtagtttcttctgttcctccgcactgcgtggggagctcttccacatgttggccaggtcagtcttactcgccta

SEQ ID NO: 4016 - DNA, 4540 bp, Toxoplasma gondii
  source 1..4540: mol_type = genomic DNA
caaacacacgtaaccttcgaaatgcctgcgtcgagatttctcgaatttttcgcagataaaccggcgtcgtcatgggcagacgagaacggaggcgacgcacagtgcgatgtacgccgacactgacttcgctctacaagaccggagccgttctggaccagctgctgtgtccgggctctcgcctccagagcgaatccggagtcacgctgtgtgccttgcgaagtccgaatgccccggaaatacgccccagggggaaccggcgaagaagcgaatcgacagtcgctgcggccactgaccaagtctgttcccgccgttcggcccatcaactgctctgcaccccggcttggactttgccaagaggaacaacggtggatgtctgtctggcacagggccttttctccgcagtaggactggaagaaagaagcatgaagatggggatccgtttcatcgtcccctgacactcctgtgtggtggaagccgggaggaagtccagggtattttccttgcgacagaaatagtgctggagtggcacaaggttgccgcgatggcccgacacagtgacgatggtcgggagaatccgctttgaagtcgtggtttttctgcttgccatcccgagacttgacattgtccactcccgcgcgtacgtagcccggagaaaacgcgttcgaaacagcaacagcagactctggcggtaaagaacacgccccaagaccccgcgagggaacctcaaaaaaggcagactcgtagcgcaacatctcaataagatatagtggcactgagtgggaggagctagtcgctgcaacggcagaattgcttccgtcaagtgcaaagccatgtgcctagcaaaaagcacatggaaagagcttctgccagagcgcatccgcccgtcgatgaacggtgtgaactcccgcgacctcccgcggatcagaattgacaggaaatgcggcaaaggaaaaaaaggacaccataacacgcccccctcccatcaccagcatatcataaccgccctgacaaaacaaacgactagggttaaggcaaggagagaggggcaaacctcgtgaaaacgaaccacacaatgaataaaaaacttgcttcaattccgtgccaactggctggcagcggcgggacgactccgacattcgctgggccacccgtgtgtgtccaagctgaggcaagcggagaaacagcgagcaaaaagtttaggagatacagaaatcgcgcagagccacaggcaacactagtgtttcaaagcgacgtcgaccccacctcctgggacaacagtgagacacaacatgacttgtgcagacaaaaagtcagtcgacgaaacatttttccgagcaaccgggaaggttgatgttcgctgtcgcaagcccagaaaccagcagcgcgcaagcctggaaacacgaaaagaaagggtgcaagactaggaagagactttctctataaaaatcgcagcgagaaaaaagacgcgcatgcagccacgcttcggcgctcaattgcaaccgcttgaccgcccgccaccgcttgcaagaaaccgcgtcgattctcagggccgtagagcacgctccttcagagtcatgaagaaatccatgcagaacggaacattgcatggaaacaaagacataaaatacaggaggactgtgaggatacaaagttctgcggaagacaggaggtgcatatcgaggggctgttcaacttcggacactgccattggtgttctgcgctcgtggcatgtcgcgacagacagccagccgacggccggtgggatagccagggagcaggtggatcaggggccagacttgacttagtttaagtgatttctgtcgcagatgacaacgaggaaacgaaccccatttgtgacaggattctacgttgtttgcggagaggagagactccgtacacgttacagagggctcttcttaggtaccacggctggcaccgcggtaatacacgagccaggcgagggagagtttggcattaaatggtggaaccaggacgaagaattcagatatgcagcaagatttctagtgaactgagcaagacgatggacaggcagatgtgtgcgtgtcatatttcgcaataatcgttttgaaacattgtaggaacgcagtacgagatcgaaactaagtgcggccagctgggtgtcgttgaatgacttggcgctgaaactgacgaaggtttgcgtcttgaatgtcgttgtttaccggatccaagctcgactgtgttagcaatgtttctagcagacgcagtatatctcagaggcgattccgggctgtgggggtcgtctttccgggaagcagtgtctgacgcggtgcgtatgggctgggtaactggcgtcaagctcaccaacatattgccttattaatgcttacaaaatgtcggaagtgcaaagaaatcgtaagtgcagagaaagtacggagagaatctggggagtcagctacgcagtcagggaagtgaaagagttctcctttgaggctgttccggaatgagtgtcatcgaagttcttgcttctcggacgactccatagtaactgtggtggaaaagaactcttcctagattccgtcaatcggaactgcactacagttcatgaggttaatcgtgtggccgcaaacggattggagaggctaaactgatgccgcacgaaccgagctgtttgtgtgacgcctccacactcaaagggacgcaactcgatctacagcttggtgtcgagagcccaaaacggttctgtgaaaggacacatttcgcctcccaaattgttgtggatgctgaagcatagccggagctgctttgctgatcctcggatacacagaaaaccgtgtcgacaagcaatacccatttgctggagtctgctcactgcccccaaccatgcatcgacggttgctggaagctagctgtaaaatgccccctgcaagagtcgtaaagcgttaaaccaaaatacgattaagcgtaaacagacttacggccctgtccaaggaaagttgatgcaaattagcatgccgcgtggatctttctaaactggagactaatcagaaaaagtgtgacatatttttctttgttcacagtatgatttgatggctgattaagtaccaacgccggaatcaaccgttcaaagatgcatgtgactatttccaactagcggattttctatcaatcccgcgtgttccttccctaaaaagtagctcgctgccgggagaggttcctccgagtgtacttcccgatgtgtaccgcaacggacaggctgctcctggtctgagtagttctctacggattgtctgcagctcaagccacgcttggtcacacaaatatcatcctgtttactacacatcttatgtgttcgggggccagcttgcggcaagactgccgtcttaaacaaataccacaaaacttgaatcacctgcagactaccctcggtacccgtttttcagtttctacccgctatggtcctggaagaaaataacagctatgcctccgaagggactcttcgtccagcatcattgtggcatttgacatctcagtctctgtaataacacgtcaacggtcatgcttcacgaacgccaacacggaactctcactcaggagcctcagcaggctcacgccagtgaggaagatgcacgcgaaagaacggtgagacggaaacaatatgttccccacatgcgttgaagacgcatttctctttgcggtagagaggcacaagtcggctcaccctaattctacaggtgctgtggtcgcgtttgtaaaaattgctttctgccttctgctggcacagcaccctaaccgagcaaccatgtgaagactgcggatgtcacacggtttccgaaggacagcgaagatacccctcaaaaggtctttggccccatcttttgactggatggtatgggacacgacaacaagttactcgcgggaaccttactgctgactagattgctgacaacaacgcacaggacgccaggtggtcagcgtcggcgtgccctgcgcttccctaccaggatcatcaacgtgccggagaagcctaatcgaagaacgttcacggtgccgaaggtttgcaaagtcccctcgtcgatctgagattgtttatactgcatcactaagcgtttcgcacgtggatagcatcgaaacagggctgatgattttctctgcacagacatctgggctcctcgattcggaaagccgtgcgggcttacacattgtctgaattacagattacttatgtcgcttcatcactgctgctgcggaactagcgtatgagcaacaacttaggaaacaggttgttttggtgcccctcatggttcccctcctaagaaagaaggtgcagagggggttattttgggtcggtgacgtgcgttacttatactgatgttccgtggctacattgactaagcaaactgttcgctagctgcctgctagcttagatgtgaacagaaacatttctctcgcttccttgtcaagatccaggtttccctgattgtgggctctcgaggtctatgcagatgggcggtgtttttcgctaggtcgccttctttcctgtaaaaacgcagcgtcacca

SEQ ID NO: 4017 - DNA, 3744 bp, Toxoplasma gondii
  source 1..3744: mol_type = genomic DNA
tgtatcggtcactgtccttggttcttctgctgtggcatgagcatcctcgccggcataacccaatttatccaccagatctgaatcctctgttcgaccgttcttcagcagcttaacgactgcgaaggcgagggggcagtctaggttctggagaggattgcaacgatgctttctgccgagacacaaaacaagctggcagcgtttcttgcatacgcatgtgtgcgaatcctgaggcgtgattccagttgcctcctccggaacgttagtttgattggagaagaacgaaagaggtgagggagcctccattcttggttcagaaaaaagcgggaaaagcggagacggaaatgtcgcgccgcgcacgtctagccatggcgccataccttcccgatggccttcaattcctccgcaaggcggggaattctggcacccgaccgccgccactgcagacacactggtcttggagaggtttatggaagcacggcttccgtctgtcatacgattcgcttgctgaagatggtgctacagcctgccgcttccttgtccggttctgtgcagggtttgtgttcacttatactcgcaagcgcttctctgttcttctgtgagttctcggcagagtgcacagacccaaggaactagcactggtattaccggcagcggagcaaacctattggggttcctcatccggcgttttcatttgtgttgccacatgcgctgcccgattcgctggtcgtcctcttggggtctccgggcttctcgctagcttcccattgtcgacgctggcgtatgctttccccagtaaaaagaatttcgaagttctggtcgaaccaggttgacgattcttcgagtatttctggtttctcttttggggtgtgaaggcacggcgaaggggtctgctctctgaaagcatgtcgtcaggagagaaccacaagaaaagtgtgacggacgttgatcaagaactgcttcgctcccaatagtcgagtaggtatgtttgaagggaaaaatcactgcggacggccggttcctgatgctcactttatttttcgcaggtccgcttgctacacgcgagatgtgcaaccctaggcaaagaaagcaggttttgtctcacgggtcacctccatgaagaagcggaactttgaaagcacacagagaaatcagaaaacaccttacgatctcttaagcaagacaccacaagacaagctgagaacgatgtcccggcttccttgttaagactgaaattcacaccaaaaatttggaaaccagtacaacttttcgacgtcggccctccagtacactttgctagcttgcagtttcacgggctctgtaacatatcctgaatatattcgcaacgacgcggattcctattagtccgccaaaatacgtggcgaggccctacaatgaacagagacaaaatggtcatgattttcgtggtcaccagatgagcggcacacgttttccaaatggggctcgtggcacagccatgattcaggaaggaagtccatgctcgggatgagttagggttcgttctctctgcctttgcaacttccaagatcgcgtgatagtttgataatgagggagcaactagaaaacattttcgaagttagtagcccttgagactcgtgtctgtcaacatttcccagacacctgcctcggactacaagtgaagagcgcagtcgcacagcggtgtagcctgcggtgacgtggacgagttcgcttgtcaaaagataagcagcccctgaaaaagtcagctcagcttcttctgaagcgtcgtggcagtgccttacacgaggaatgtttgagagcccagcatagggatgtacgtacaccacacagtaggcaccttcgaactggaaacccagcccggctgaggtagcttttgtatatttggctcgcccgcagggcctacgtttctgtggagccgccccgtgacgcaaccatggatattccagatgttcttcccacattagtgaaggggaggaaactcgtggaagacttccactgggatcaacgggaagcagatcttcgacaaacgattagcacgatcgcgagtaagctcgcagagctgcacagagaagacgcccatcttcgacagaaaaaattcattaacgaagagcggcggaaaaggcgattgctcgtaacagactcttctttcccgagctgtctcatagagaggacatctgaagccgcccctgaacaaggtgcttcccacggggtgaaacccctgtccagcagtcggtcatactgcccgtcaacgctgtcccgccgttctatcgaagggctcgaatcgacatctgggagcagtcgctctcttgcaaccaactactgtggaacgcgtgccactgtggcaagtaggggctcacttaggtacgtatgggataagggaagtagagacacaaccctatcaacaacacacgttttaggtccagtcaaagtcagtgtctgaagaaggaacgaagccgcggaaaaagaatgcttgtaccactgcgtaagcgcacgcatttcgtggtctctatcgttgactgttattgtagctcgatagcgcaccgaactggtcgttgcatgtcccgtccgccggcggtctggtccgcaccacagggacggcccaggtgggttttacgtttccagttgtatttctatttcagcttccaagttgtttccaccagtgagctgcaacttgtcaacgagatgagtggcggtgtgaaggagtatccgatgtatgatgacgccgaaatcggtagattcgacggtgcacggaaatgattgtgagtgtggtacagcaggggatcgtttttccaggattggcaaacatcggagaggaaatggacaaagaaatggctgctgttccaaaaagctgccgtgacgatgacgacgtgatgacgacctccgaaatactagaactgtgagctgaatgtgcattttattcaaaacacacaaggctaatagattgctcagtggaaacaaaactgttgaatcataccttgcgcgaacagtcgcgttggctgacagtgccctggagcgcgaccaggcttcgaggatagaacagttccggagaaagttctgtatcccgtgacaagtcctggacgtacgtcatgagtgttcttgctcacggccactagctaaactgaaaaatgtgttcgcatgtgatatacgaaaagaaatcgtccgtgtcggggggaaaactcgggttgtagttacttcaccatatatacaataatgccgctaaaacactagagatgatcacggatttctgcatcgctcaaatgtgcagttgtcctaggaacagcaaaaataatttcatctcttctacgttggcatgatgagctccatgctcttatgatcatctattaaggcagaatgcaacctattgatctgcttggccgcgtccaccgacggaagtggcataagaggcaaacgcaactcaatgtcctcaatggatcctgctctaagttcttcgactctacggatttaccttggctttcgtcttccggcagactactagactgtcttttttcagatttcgccttagtgaagcagcactaccgactacagctagctcgctcgttttctgctggcattcctagaccgcgagcaaggccatcatccgctcgttccacaccgcctgctgcagacgatcacttccagagatccctgtcgagtttattgagactgacgtaatccactcacaaagccgtacaaccttgaaacatacgcatcgagattcagtccagacgagcgaatcttcggacaaca

SEQ ID NO: 4018 - DNA, 3866 bp, Toxoplasma gondii
  source 1..3866: mol_type = genomic DNA
catgtgtctcaagcacatgggcagacctttcccgattcacttcaggacagcaagtgtcgaaacgggtttgcatctgcggttccaaagcctcagccatcacaatcacttcctacactgcagctgtctgtccgaccaccaggcccttttggggtaggccccgagactttaggcgtgacgaataagcagcagattgggactgcagatgatattggtgctgaggggaaaggattttgggatgaggatgatttagatgagtggaacattgacgatgtgcctgttcagcctcgattcgaccgcgacggccccctccaggttcctcagcaggcaccgtcaagccaatcaacaagtagtcaattgcccgtcagccagccttctttagatagttcgtctgctagtccacaggccgctgacagcttcagtatcggtcagatgcattcgaaggattctgagaaaatctgtggcttaggaagtatagtggctagatctggacagggattgccagcaggcatgtggcaggtctcaacacagcaccaacagccacctgaggggtctcacgaaagtcttgtagtgatgccatcggcgcagcaacgcccagccagtgccggacaccgtcctatagaggatctcttcagctgagagacctctcggcgggaaaagtacaaggggttgctgctacatcggagtacacagtggagaggtaaaagtcgcctcccggttctgagaacccaaactgaagatgcgtgcagaccaggtagtgacacgaagacgtttcgttgtaccgttgatctccgacagcgatggcaaggaaccgagtcgataaagatcagtctgcacgaaaaacacccagtaccagatttttcgacgctgtgttcatccggtagacgctgcagcagggcagagaagcaagtgggtatacagttgcttcggcgatgagcagtcgaaccgactgtggctctggtatggaaatgccggtcatcgaagttcttttcagtgtattgtccttcgtgcgattcattaacgaatcaatgacgctcgtcgaggcatggttggcacacgttaaaatgaaaaaggaacattctatgagtttctgtttgtgtacgaggactcgtgtcatgcggccattcagacgtgttcctgtgacgtggagcgcgaagtcttttgtctgagatagttcaatcgggtaccgtgttttgcagttgatgaacgaaaacaagtgaatgtttcggccgagcgcgtgtgtatgacagacagtctaaatggagataagggcactgtccttgaataaagtgtgcgatggagttcactggtcgtgtgaggatggtgttgaaggccagactttcccttgcaagcacgtatgctatctttctaaataatcaaggtctgttgtttcccggggtggtgtagggagccgaatactgagttttccagccatcaaaatggttacacacgaggtactgttctcacgttcgttctgtcctttgtatagtctctagcgcaaaatgtcgatctcagtcgtgcagcggttgtggcgcatcagtaaaggcagttcgatctccctgcttaaatattggttcgtttgtggaaaaataacaaatcaaacgtacagctttgaaccccccctgttagtagtattgggcgatttgtgcagatagtcatgtttacagtggcacaattcaagggttgcgcaagtagccttggtcagtataaacactggaagagacagtctgtaccacggagttggcatactggacaggaatggcaaggcaagcggaaccagtaaagcgaaatgctacagagtttgtcgcttctgttgcgtcggcgacttgctttcttggtatcgtagaagtcgaagcaatttctagtttcgggctcgtgtgtaggacaagtcggggtggcggactaacgccgaacgtagagcgtcatccgacgtttccgcacacagctggggtttggtggacataacatgttctctgttgcaagagtgctgtcgagtaaatcacctaaccgcaggcaggcggttttgacgatgtccaaaggcttcccaatcgcgtttctcacgttctcaaaacttcatcactcctctccccattgtgaggtataggactcgaacaacctgagcggcgggttaccacttgtcttttaaaaattgattgaaacgtaaccccgtgttaccatatgagagatgctccccgcgagacatggcatgcagtgcatatatagagtttagaatttacttggtttcacagtttactgtacgttatgggactgccggaaagtgcaggtgtcggaaggtgcactggcaaatttcaacagcaccgcatgactgtccgtgcctcacgcaccaaccttctcatgctgaaagatgaggcacgaagctctgagtacctcggaatctcaaaaatgtcattcaggttgcaccactatgttggccttttggcatcgctctggcattcttcttgtgagcatacacagttgtcaaactagaatactacgcgtatccttcgggtgagcctttcacggatttaggcaactagtctgcctcaattcaaattccgtttatctctaacaaatcttgggacagaaggaagaaagactgagcaggcgtcatcacaggtgctgcgctgcgtatgtgttgcgtttattgtggtatcgagggacaagacaatcatgggacagctgataatccatataatttctttcgggtgtgattcgcatctggatgctaggaatataaacccggttcgtaacatgctagtggaccaagagcttgtgaggtcggttccgagagttgcataaccggcagtgactaattacttcattctcgggagagacggagctaacaaatgggaggatcttcagctgagtacccgcaacaggtgtgtggcgcatgccagtgccatgatcgactagattccttcgtagttcgtggttggaacacgtaggaacttaatgaatgtactcgttattcttttcatgggcatgcgttaacgatacagcaggatagtgcctgttagaggcagatggtgtgcccgctatccctgtatttgatacaacaccaggagatggcgtcatgcaattctctgatttctcagtgtatgtggaagctcctttagttgttgagtcttacaccttccacttcgccacgcgcatggctgtttggaaatgccagcaaacactgtgtgttctaaactgccagcggcgaaacacagctctgacggcggttgtgtgtctcttcgtgtgtgtgtcacgaacacaagttacacaggaaaacgcaagagcggcggcacgacaaggtcgtttttgggcgtgcttcggttgtgattcgtggtcgctatggctttcgcccgcgaaacaatctcgagtttttttcgtagcactgtttcgtacacactccgcagtatcgccgtctcaatccgagtagcctttagaaatttatgtgtgctcgcttcgaacgtgaatgtgactttctgcgtaatataatgttgttgcggcttccagtagttgtgaataatatctgctagatggatactgaggcggtgcccacccctgttgaccttcaaggagagctgccaagagatttggccctgtacagatatacggattctcggttgtgggttgatgtgcgcgtgtagccgccgttctcccacactttgctcgctgtatccgttttcaggcattttttgttgagtgaacagggaggaactgagaacacgagttttcagacggttcataaacacttcgcaaaattccgcaatggaatctcgacaatctggtccagcggaaaaaaagctggaatgttgtgctttgggggcattattcgttaaggaatacatcggtgcgcggtgtttcgcgtaccttctcgcatg

SEQ ID NO: 4019 - DNA, 2627 bp, Toxoplasma gondii
  source 1..2627: mol_type = genomic DNA
gtagaagctgtggtaccagcgaaacggcatcacgctgcaaccgtattcatttccggttcggggatttttccgtgtaccacggacgacacggttacgctaggcatatggcggatgcccgcaagagtggtgactagctgcacccacagtgtgagattgacatgtgcccgtatgtaactagttaagacgcattcgctcagctgcccggaggtaacaggtgcttcagtaacattaagagtgcctagttctcatgttcaaccggcttcccttggtctgactctcatttgcatttgtgccagacttctcgcaccacctcttcatttgtgttggtcgattttctaacgcgtcaaagcgaccacgtcggttgtttcaaacgctcatacgtgtttctgccaaaagtgtacgcacctttggctaccgaagttaagttggagttgcagcgaacaaggagaaacaggaaaccgctaacactacagcacctgcaactgcaggaaaaaagacctggttgccactggcgttggaaattcggtcttgtcccccccgtttctcgttcttgcaaagatgatccccggttctaaatagtgaggaaccacgggacgccgacgctgcgggctttgtttcatttaggttcgagacgggcgtgtcgtctgtctgcttgtgtcttaccagacctaactcctcgacaactctagtcgacagccccagttcttctaattcttggtgctgtatacgggcgaaatcgttggtgttccattgctttgcttgcggcggttgagtcgatagcccctgtttccgtcttgctgcagcccgctgttccaccacacttgaggatccaagactgtcgcacccttgtttcgaaaacgatctgtcttcttcccttaatcgacgctggaagagcccacaaaaaagtgtcttttcttctggcccgcggccatccgttacaccttcactgttttcatctctatggcgctcgttccagaacgctgctgcttcactctgtcgcagtcgccaccgttgcaaacgtgttgcccggtagctctcgcgtttgtcgggcatcgttggttgttcgctgtctctgtggttcggctgttctttgaaggaatcgcctttcctccaacattcctgtcgccgccacgcttgcggcgtttccagggcagctattgctgcgtcgtatgcccaccgtgcatcatcgattgtcagttttggtggagaaacagctaggtccggatgaagttgcttcacaagtttagcataagcctgtcgcagctcctgcacggttggatctttttttgccaagccaagcaattcaaaggggtcgggcggcagcgtccctcgtggccaagaaggcgggtgcgattcgaggtgcaaacgccctatgtttgccgaccttccgtcggaagacgccgaagacaaacgcgcgatccttccagtgagaggcccgaagttgtctggctgcttcgctgcccctccaaaaaaagctctctttcccgccagctgacgaaaattggcagcaatcgtgaggcgagtggcggcagcaaccaagctgcatcggttcatgctgccgaccctgccatctgattccctgttacgctgtcgctgtacagtggttgtggaagacctggagctggcagactgcaggttggacgtatccttcgaggccagaaacgctttgtgatgaaaaaagagcgaaccgatcacagtttcgtgagccacacgtccgaagcggtgcaccgagcagtgtcggggttgctagcggacatatgcacacgtgccgtttgaatcaccacggcacgaccataaatcacactaaaccgatttacaggagagccaaaaacgcggaaatgtccatgtgagaagtccagcaggcgtgcgtgtcgtgtatgcaagcgtcggagtgacacggagacgttcctaggtaaaagaaggcagcacacgacctttgtggaaaatattcttcgctgagcaagcgggtgtgccaagaagaacagatgcacagaacgtcgtgggacaatgcaaacacatccgaactagagaaagcgcctctcacaagaatggctacgcgaaacggccgcggttgcaagactcggccgccgcacatgcatgcgacaacttcttggcagcatgcatccagtagagtgaatttgaaactctctcgtcgacttgaggacctttccactctacatttcttcacagcgaagcgcttgactgacccttcgtgccgttcgctgcttgttttgagactgtcctggtttctcgagcttctgtctcaccggtggacgtccagagaaaatcacgcgcctcgtccggaagcagagaggtagaactgccagcaacttgctgttctgcgcttcgtacatcgtccccaacagtccagaaaggttttgctgcatcagaaacccgtctgtctgcgcgaccctgctgcatacaaccgtgtcgtgtcttcgatccgttgttgttctttgcccgcctcccgacagaagaaaagtatatccacgcgtcgccggccggcgttttcttttcggaatttctctgagcagtgacacgcatcatctgactccttctgcggacccagcgcaccctctgccaactacttcgcgtttgtggagcctggactccacagagtctgttga

SEQ ID NO: 4020 - DNA, 3080 bp, Toxoplasma gondii
  source 1..3080: mol_type = genomic DNA
aagttctctgcggtgcttgcagatcgcgagctgcttagagaggcctcgcctctcagagaggcagagaagcgcggagaagcagaagcgactgcttgcccttcgggagaaaagagcggcaccgacgagagagtcgggagcggccttttgtggaggtcgaatacagctggcgagacgacgcctgctggcggagacacgtttccgtgagcaagcgacgaagaagtctcctcgtcgtccagcgaaacggattcaaatgcactcaacagatcttccatggtggctgacaaccagcgaaaacgagtcccgtttgaaaagcaagagatcagctaatttaggaactacggaagcgcgaaaatggcgagggggagcgaacgcaggtggaatcagtggcaggaagggcgtctcgcggagaaggaaacgccctcgcaggtgcgaccgggggatctcaagattaacccccacagtccaggaagcctgaggatggaaagcgctccaccgaaagacacaggagaacatgggaaacagaactactaattgcgaactgtcgcaaggaatggcactacccaaacgatttggaactaaaatcgacaggtgcagaacgcagtctgcgccttctacctcgcaagaacttcggcgggcatcctaagcggcgagctccagcaggtggggacgaacaaagcgtttgccagcgatcaggacgcacagaaaaaagcatctgggcaacgataaagaaaagcaaacgatttcccaagaagtcccgagtctaccgaagacgcagtcggtctaacagccagttgatctcgcagtgagatggtctcagaagcagttcgtctagtagggttgcctcgacagattcaaaaaactcgagagcggcaagtcggtcgctctcaccatgagcaagcacgcaggtccggcacggagaactccacgccgagttcgcgcaaaaactggtcgccgagaccggagatttgaaaggcgagccaacgacggcggtatgttggaactatgttagagtgtacacatacgccggagccgggcacacggtgtcgtgttgcttgagaacgtttcagaacatcaactgtgcagaagtcgactcctggtgcatgttggtcgctatctcgacagcgcacggtcgaaggcaccggggagagacagcctaggagaaacagtggggagcgaacggcaaaaaatgacgcgaattcacaaaaactgggaagcaggttcttcgcgagcgggttgccgtcttttcaacgccaggttcacaaaggcattccgctgcagacgtctacggcgtcaacgcgaaaggagagcggcggaacggctgggcacagcagagtgacggaagtaaggaaatgcctcatttcttcggtctgcttcgactcctgcgaacagtagtgaaaaccgaggcgcgggtgcccggggtcacgggaaaagcgtcacggacctcttgaagaagaaggcttttctcctttttcggcggagaaaacagcaaaaaaactggctctctcgcaggcatccaaagcgactcggtgcgacgtcgaaaaggaaccgtggaaaaactcgacagggagaacctgttcccgggaagcttactcgaactctcagcttcctgatcgcattcgtttgcgcagtgtccgcagacccgccacgcaggctacagggcacagttttgctttcgacgtgcgatttgaggatttctcgagcttttctcagcgtcccgattttcccgattttccggctttttgcagggaattgctttcgcagcaggttcagcacgcggaaagaaaaccacaaggggattaaccaagaaagacgcgaagagcggaaccggcacggagtgttgcccccggacacataaagtagaaaaccgaaagccttcgcgcatgcaggcagaggatcgctgccggaacgaactccctctgacagatatctacggaggtcaaagttgacacgaaaacatgttggcgaaattgcattcaaggaagcgaggacgcggaagtgacctcggtacaatcaaggtcactgggtcgcaggctgaccgcgttcggcttatgttggagtgacaccagtcaaaaagtgtgttggcagtagcggcggaaaaacacaggcgtctggagactcccatgtctggatcggcagattgaggacaaagtctccataactgtgagctcacccagtgaattgacctgttctgctcgataagggataaaccaccttggttgcgagaaagcgccctggacaactggctcacctgttgcctcgccagaaaaatcagaccggaacccgactcggactcaaggggaaagagctcgcctgtcaacttatttgtccctaattcaggtccagcattccgattttccggcgtgtgtgtgcccggaacaatccatcaatatagggctgttggtctttgtcgcctcctgtgtgtctgcgtgcgtacgtctcgccacacgtgcgtgtacgggaagcgggtgcctttccactcgaagggaatgcatctgatatgtgcagatctttcgaagtatgtaagtgtatgcggaaaacgacatgcatgtgaaattgtctattcgtacccagaattctgtggactcgggtgcaacgcggtgtctcgtcgggattccgagaggtgcggacggagtgtgctaccaaggtggttccctgcggtcgtaaaatgccatttggagttccaattctcgacagagttttctaacccgagacttcgctgagggatgtggcattctgcgagccacactcttcgccacgcttatcgccagaagaggttcggcttgctggttccgtcccttcgctgcagacaccgagtcgcacgggagcgtgagtgaaagcgaagcgcgcggctcttcggcggcggattcccggaagaggcaggtgacaagacgacagttttcgtgtttttctcaaatgaaaccgagagaaatggcgacgagaatgagaaggtgatgtcgggagagtttcccgcctatcagaaatccccaaagaccgtgaaagatgtgagtgcatgcacgaacgctccgttgtgttcaccccccgcgccgggtgtacatacaccaggatttcgttgggggtta

SEQ ID NO: 4021 - DNA, 4086 bp, Toxoplasma gondii
  source 1..4086: mol_type = genomic DNA
gttgttgataccagttcacgggagcttgctcgttagaattgcaatacggcggttgagaaggcgaagcccctgcacgaaactcgagagccggaatctgagagacagcggccggcgaggtcccgtactgttgcacctgctgctgtggtggagagccggcctgcatgtcgccgttgcaggcaggggcagggtaatggtgtggatacgactgctgcatttttctagaaacgccgcgcttgactgtcgaattgaaggcggaatgtacacctctcttttagcctcttccctgcttgtctgggccggggacccagagatctcacgcaggggttacctcttttaagtgtctgtacagcgggtccgagacgaagtaggttgacgacgcggaaaaggacagagaaacgcttgcaggaaacagaaaggaagttcacaaacgtcagtcacagggcttttttaccgaactccttcttcagggttacacgcgactgggcaaagaatcggcactgtcgaaaaaactggaaccgactcactaccctgtacctgacacagtgcaaaaacgcacactgagaacaagaaacataactccgactcgtgactgctgccgaggacgtcgtgactttcagtcggtccggatgtatccacggaccatctgttgaccacagagaatagattaaggcaaaaaagcgacgaccgagagggaaaacgacaacctagaacagatgcgaacgaagatggagatgttacatcactagtttcgaccccaaggctcacgatttcggctcctccaggcgaagagcttcagacagaagcgcatgtgacacgaatctaagaggctgcatgtggtactccaaacggaaggatcagtatcaaccgtgcggaattcctgagccgcttgtcatgccaacacaagattcgtagtgggtctttacccactgaggacatccgagtggtataggcctctcgattacaggagtcgaatacaacgcgtatgcaaaaccaattcagagtctcacctcgagacacagcaagcagcaaaagtggtgtgacgaccgaaaacggttcgtttgaaggacgaagacaacaaaaagaagagagtttacggcgcccaggctggagataaagaagcaaaaactcgcctcgcgtctccaccgagagtgttcatcaccgagcgccgtagaaatcacagacaggctgcagccgcaagccggtgtagtggcaagagcatagcttagcgaggctggagaattgttgcacaaacagtaaccgacgccttgtcaaaccgggagacagtttggggaaaggaaacgagcagagactggtacagagttcagctctgttaattctgatgcgagtacgaatggagtagagaagtggattacattactggtgtcacacaaacgcacgcttgtcacagctcagtacatctcgctgaatcaatcgggtctagttcatttctctctgtctactctctggtctttttaccagtaacgaatccgatagttttgtaggggtaacaacggaaagcggtgcagataatccgattttctcgcccttcgccggtgcgagcgaaccaaacacacctcttgtctgacagtacgcacgaagatctcgcacagcgttttcgcttgtgaagcggaaacggtttctagtccagggaaaggcagagacacatcagagaccagagagaccaaaaggagagaagaaaacgctacagatggagatcgagcgtccgtggctcggtggccgcaaggttggtgcacagcaacaagaaaaccttaatcgatgtcgccctagtgactttttcccgcggggtgcatgcactagtgttacatagatgcgtgctcgagtgccagcggcgtccgaaccgcgttcgctggatgaaaattgttcacactagtaaacatacagcatccgacaatgagtgaccttctcgagaaacagctcagacggaaagctgcgaaaactcgctccgtcgcagggctgtcgaggggttttgctaaaagtggaaggcaaagggcgacgtcaacgggaaccggaacacacgaaccaggaacccttctgtgttgtccagatgcctaaggccaaagaaccatggttgccgaaggtggcggcactgctaataggaggatggaagtgcggtacacactcgtcagtaggagtgttggggttcttgcgggcatctgtcttgtccataaccagtggccttcgtatgtgcgtgagtgtttttgggttaagaaattctcagacacacaaaaagaactctgtctgtcgtgagccgccaagacactctgctgaccgtttatattgttgtttgtcccagggggacaataacgcggaatgtggacgttaatgatgagagacacgttgagaccctttttgacttcaaaatgatggtgtcgagcctgtctcatcgcgacgacaaccctgccactgtgattgatacccgggggtatctcttcagctaaactgtctatagcagcatgcactgcttctggcaccaatttctgcgtcataaatgttccagaatcagctgatcccagctagtgattgacccgtaatagaggtggggcaggcttgttactgcgtgagtactcaatctatctgccatcatctctactgaatgataggtaagtcgaacatgtctttggccttggaagctttgctcaccccccttctcaaatccgttagcggcagtgtgcatttcaccgaaacgcaggtgcgcacagtggggacactgggacgtggtgcttcaagtgtcagcctgttatataggagatgacaacacctgctaccctctgctcgaatctcagatagagatcctaaacgaatatgttacataagtgctaacaacccacaaacacacgatgttttggtgtgcttagcagtggcattcctgtactctggcagttctaaagacgcctagtcggacattttagctgtcgtacccatgcttgtgtgtgttcacttttataagcttcaattccttccagataccccggtggattgcatcagatgccagtaggtgcttttcagcgatgcaggcatctccctatcactaatacacgtcatacggtgacgaagtatccaacagaaaagaattgtgggaggaaacatgctcatggtatttctggagtacagagacagtgacgcaattctacgcatcgttgcaagagacttcacagcgccgcagtctacgccctgataaccagcgagcgccggcgacacatgtaacttgtcaggttcgagaaagacaaatgaaaaacgtggagcgcccaactgcgagtctgcagatacccttattccctctgatgtctgcctatgacactggcacctttacacgaggcctccacaaccggcatctgcgatgtccgggttgcaacgcatcagagcctagaagcctcagagttatactcctgttccacctcaggagaaatccacctggttcacgaactggaacgcccgccaacacagtaccctcgcaatccatacttggattcaaagcgcttataaactgtcagattcaccagttcaatatatggaagactcactcgcggctgaatcgttccacaacatgatgagcccaggcttctaatcagcttttctcagtagctaaaaaatgttatggtgcaacccaagtccatcgcctgcttccacctgcttctttggaagaggatgtgcctcgcgctctggaaaccgctgggatccggtattcacagtgacttcttcgaaggccggtgaccacttcttgcggagcaccgcacaagccctgcgtggctttgttgccgccacgagcatattaaacggcgcttcggaaaaactcttggagcatcagaaagacatacgcggagaagtggagaaatttcgtcggaggtgccaagtttttttcacatgccctgcatgcattttctcgatgttcctgctacagggtggaggcatgcacatgtgccatcgacgctgtacagcaggagacgacacaacaccaaagcgagaaaaacccaatgtttttccttcagtaaagaaattcctgcatacatacatattccgtcatttgtacttgtttgatcttaggaaagaggaatcgaggaggcaaga

SEQ ID NO: 4022 - DNA, 1405 bp, Toxoplasma gondii
  source 1..1405: mol_type = genomic DNA
gtacttgtcgacatgtgtagtgacataaatgtattattttgtacaacccaaataggtataaatatacatatatatatgcatatatttgaatttctacataaagatatatatatatatatatgtacttatatatatatatatatgtacttatatatatatatatatatgaacacctgcaaaaggtatccaagtggggaagcgttggtaggaggggcgacaggattcctatttcgcgtagaccctagagtcgaggtgtctacagaagagtgcgagcagcgttttctgtctctcaaactcgcatttctactggtcttgcgtgtgagaaagaatagaagtccagaaaccttggcctctctgctccgactttcggagctactcatgcaacaggagaaaaaagcattctcaagcagactcttcccgagattgtgctctgcagtgaggaagcgaaacaattatggggacaagaaagagagttagggcctcatcgacgcccgacaaaacgcggagttgggggtcctctctcacagttacgcgtgtttctttcgtttaaaagcttatggtatatacttcccagagaaagatagcatatacgtccccaggaatcctgtgtaacaatttgtaactggaagtctatcagttctccttcgaagttcaaaggccctgcagcgagactattttgaaacatctgcgtgctcagcctacgacgcctcacggagagtcggcgcctctcaggcagagtttctctcaaaagacggaaggtgacaccgtacgcgcatctgtttccggaggctctttggagtggtatcgaggagatgcatccaaagcgacgtctgacacaaaaaaagagacggagagaaggaaagagaaagagaaaaggccctcgagaccgcttcgcccgattcggatcgacacagagacagaacaacaccagcgagggacgcggtgcgagagaggccgcagctcactgtgcatgcaaagcaagaaagcgtatcttttctctgggttgtgcgttttctctcctctacttcgtcgaagctttcctttcgctttttctctgttttcttgattcactcccttctggatcttgtctcttcctcgatgcggctctccctgctctgacttcgctgtctcttctctcctctcgagtcttcaccgccttcgtcataaaaactccccgcgctcaaccacgaagtcgagactcccaagcaactctcaactttctctttctcttttcttcctctcttttttctctccgtcatcttctgtgaaaggcactgaaatgcagagtgtgtgtgcggcgccatatcactgctttgctctcctctttctctcctccacttctctttttcctgttttttccaagtttgccggtactaagagactcacaccttgacaagtcgcagca

SEQ ID NO: 4023 - DNA, 1351 bp, Toxoplasma gondii
  source 1..1351: mol_type = genomic DNA
gagagatctctagtcatgtgtaatgctttacgtctactagcgaggaaacgacggtatttgagagtctcgtttaaaactccaaaaatgtcataggcagatatggatgcgcacatatctgtgtctgctcagattgacaatttccctacgctgatggagagtttcttttttcgcagagagaaagacaaactgcgtagccgacgacaagttttcctgcaccatgcagagagattcagtgcccagtataagtttcctgtattgataaaaagaggaatgcatcatggtgcatgcttccctggttttcatgtagagagaggcggaatcaaatatgaatgccaagaagaaaaaggtattcgcgcatgcgttccttaggggtggaccgtgagcgagcagggcgactctcccatgtttttcttgttactttcgctaccgtacgccctcggaaaaaagaaactcgcgcctgtgcgcgttccaaccgcaatttcgcagatcttcttctacctggaactctcgattctgcaggcataaatccggtcacgtacgcctctgtctctatcgctttttttactttctgaacatgcgtttatccgcaagagtcttccacgttgggcgcgcctctccttctgtgcacacattccatctctagacatcctcacgtcaggcgccattcatgagtgccattgccgtcactctatgtcaataaaaaaatctacgtcaaggtgcattgcaccgttcttttcaaaagtctcgccagacacattcccatacagctcatatatcctgcatttatgcatatttatatatatatatatatatatttacatatatatacatatatatatttacatatatatacatcacttcagcacttcaggggggcattcaggaatgtaaatccatgtgcatatgcggacggcagttgaaagatgacttcgtctcttgcacagctgggagtccgaggcgcgcggtctgtgaggagatttcttcatgctctggagcggcccggggactcgcgttttcgtttttttcatgcctgttgagttcgtttttcgaaaaatgtggagcgaactcttctgacgcgtcacacaccgaactcgacgactccgaagtgagggaagaaagtggagagcattctgtgtcaagaaagaaagctcgattttcctcgctctcaaaagccggtgcgacgagcacacgcgacagctgagagcgcatgcagttttttgcgcagccaactttttcggaagttatttttctggaccggtttctccgtcacttgtcttgtttcgtttgtctcctttgaaacctttaaaagaacgggacagagaggggaaggctcggagtgcgagagagaaga

SEQ ID NO: 4024 - DNA, 5005 bp, Toxoplasma gondii
  source 1..5005: mol_type = genomic DNA
gagagcgaaaacaattcccactacacaaacactgacgataaggcgttgagttaaatgaagatcgtaggtttctccttcaacgagaaaggacggctgggcttttttgccaaacagctcattggctgtttctttctccttgccactacccgcctcctcctcggtggccacccctacagccgtcacgtcactaggaagtgaccagccggaaagatctctgtctcctgggtcggagttccttttttgcccaatgtatcgaagaggccggggaggtgacacatgaggcagtcggttacctctttcctctagcgtttcagtgttctgcttcggtgaagtgggacaatcaccgtcggagtccccgtgctcgcttccttgcgtctccgcctcatgtgagggccccaacgggtgagtgccacatgttggtcgcatcatttgggccaaggcactgtcgaacaacagaagttacggaaaagaacttaggagcgtaagagatagatatgcacaattttggtttgcgacgaagctcaaataaagggaagaccgaaatgcaatgtttcaaacggaatatatcggccaagaggggaccaaaaatcgagatacctgatataattaacaaaaacatcggggagagggaagaagacagagaaaacgaagacagcagaaagatgacacaatctacgatgacgaaggtagacaataaaatgagaagaagacgagagaaatacctgcaagagaatatccagtggtagaaggcaaatcttcacccgacaacgaatggataccgacccaggggcattgagcatcgaccaaacgagaaacgatgctcgaaatgacgagcaaacaaaaaagaataggccctaatccctatgccgggatgataccttagagattgagaaggccggagatgaagaccaccacaagcgtgaagaaatagagacagttgagacatgccgctaacacagtctgtcttttgtatgaaaaaactatcagagtgggcacctgtcgagtcaggcacacgccacaagcaagaaggctacccgactgatactatgacctgactatcaaacacaaagtcataacgcgaaaaaagggatctcgagtgtacgggcacagaggtacgcaaacgcagacaaactgtcgaaaaaaaccggaaggcagtgtgatcgaccgacgaacaagtccgcttggcattcgcacttatgcagtacgaggtaacttgctgtgtgtcgcaaaaaataccggaaaagatcaattcagaaagaaagctcaagaaaccgccaacaggtattcgccccgtttcttgagtgtatagcgctgtgggatattaacatgatcagaaaactgatgtgtgagcgaaaatcccggatgaaaaccacatgacaatttactggaaatagaaacgaaccagtgttttcgttcccgctggcgaagtgtttcagtcgaacgtcgtcgcgctacctcggcactcaaataaaccacgatcacatcgacgcccaggtcaaagcgttggagtttttagtacaatgcctaccgaatagtccctcctgaaagccacccgatactttctggtagctcgcggccatacggtagctagcatcaaaaacaacagggacaaaaacgtagctcgcagaaaccttgaattcgtcagtcagcccgccaaacgccaaatcgacgaagacctcaacaagaggaaggagatcctggacactgtgaagtacgtaccgtttcatccgggaaaaaactgaacactgatagaaacaccgtgcaactcccacagcttgttgtatacagacacgtgtagacattaggttcaactgtaaatatatgcacatacataattgtgtacatgtagaagtcaaaggtactcagagtgttgtttcgaaggaaagagcccgccagtaaagcatacagtaaagcgagatatttcacctacgagtccgcctgtccgccccgccaggcgcggcagtctcaggtgaaacagatacccggtgacgcaagagtattacgttctcattaccggggaggagcagtcgattcttccgctatggaagacaaacagcgagaacaaaatagacagcaacgttgttgtcaaagaggagacaacatttctcattctccagacgcggatctacccattcttactcgtgttcggcacgaaactagcttcattatcgttccaaaccatgttgaaagagacgggtatgtcagggtggctcccgcgagccgctcgcagcggctcctccgaagcgttcgctggcgcgcgcttgttggcaaggagattgagaaaacatggcacagacacgatcccgactagatggaggatgtcacacgagtgatacaagctaccacaaatgcttcaacttagtctaccagagcgttcgactttttggaagcatgcgccacagaaaccctccaaaggggaatcttctgtccttctatgctacatcactcgcctgcttcaacacgccgatacacgcacccggcagcagggtggttacacaacggtgagggaatactgctgccacgtgacgcttagttgtatggaaacatgatggcgaatacactgtcactgttttttcgccagagaatgcaggcgaggaaactcaagaaggagcagggacactagggggcttcttaaaggtaacgcaacaacctatgctgcgtaatccaggcagagagatgcagttcatcgttttccagctttgcgaactggtgatttttccaactgcagagtcattcaaaaacagttacgctctacagcaagttggtgaagaaacacagtagtgtggcgtgtacactacgacacctcgccactcgctcttcctctctcgacgatgcgtatccacgcgtttactacatgatgcttcgaattcgaaaagcgatgttctcgttgaactggagttctgagtgtttccctctcgcttcaaagagtaaaatggaagcaaatcagttgcactaaaggacatgtacaggatgaccagggcctggtgtctttatcaggcgacaagccgtcctgttaagcaacgcaaataatccccttcgcgaggattagcggattggaacggtttagcagaacgcaggcagagatgtggcggcgctgcgggcgggaaccgttttgggtcgcagcgtgttcttgtgtaccgtcgtaagcacaagttcctattcgtttcacgttgtcgtatgatcaaggcctccgctgatcataccagtccgttttctatcatcgtcttcattcggcttcgttggtagccatgtacacggcgaatgagtgactctaatgcttcggcgttgttgagacttaaggcgggaggagcgagcagtctcacgttccgctgatcgctgacccatcgagtataaagtcgacctctctactacaaaatgaaaaggcgcgatgtgatgtgaaactcgagggtgtgttatgtatgcatactcccgaggagaggttgggatggtttaccgctcgcacacccccctagaactgcctgtaagcgcaaatccactgcgaattggtcacaagagtgtgcttcaggcaatgcagtcacatatcattttctgctttatttctccccttctgtagcatgtgtccgtttctgcgtgtgccacatagacctgcttatcccactcccttcgtagaaaccgcatcggtaccctatattttgcccaaggggcatggcacatcggcagatacacccgaaagcatcaattttatccagcattgaactggatgaagacggagggctgatcatttatcatccgcctccgccaagtgtcgacattcattttgttctccctgtttttgtgtgaaaacgacatagcggaggccccccttttctcactattttgaaaggattatccgggaggaagacgacaccccccccttcccttctgccccccgcccccccaaccaacctttccgttcttagaggttttcacaatgtaacccactgcgtctttctgggcaagtatgggtgacatcggtgttcttccttctgcttttcctcgcgtaaccgattcttcgtgtttcgctcgtcgaaatcgcttttccgcccccccttttgcaagggtcgctcctgtgcaggacgctgcacacacgctgtcggggtcgccattgtctgagatatccggattccttggtggttaagtgcgtagattttttcatcaagggattgacgtctgttgcttcccgtgcttctcttctctttcccgctacacagtccactttctgaatttcatgtgtttgtcatactccctctctcgtcaccacacttgctacgctcccgtcaggaaaaatacctgcaacgaacaaaccgctgtcgtgagctgctggtggcccccctccaaggtttgtggtgcatcacaccgcagtgtgtgttacgtgtcgcttgtcaaggtttactcgaacccattcacctctattgttttccttgttgaacgcgggaatacaggagtgcttttgtaatcaagagggcggaaacgtcggcagcaaacgggagataacccgctgcgacttcaagtgcagttctgtccatcctgggatcagttaacgaagttcttgtctgtaaacctgaggaactagagaagcatcgtcggcgaggtcagttttccttcatcaaggagtgggctgtcgaggtttcgactctgtatcttttacctccgcgagaaaacgaacagctcccgctggttcgttgtcaggatgtctctccttcctcggacgaacgcacagatcgctcgaacacccatttgtcaatttcctgccttcgcatcagttcagcggaatcggtgtctctggaagtctgtgcaaatcccctcgcgcggcagcagcagctaagtcttctcaagagaagcgacagagctttcgtctcgggcgcagcaacctgcaacacaccaagattgtcagccctccgctgagacggcttcgcgcctctcgcttcctctgcgcttcctctcctgctttccgcgtcttatcttcctctgctttcccaaaaattttccgttttctccacgtcga

SEQ ID NO: 4025 - DNA, 2921 bp, Toxoplasma gondii
  source 1..2921: mol_type = genomic DNA
cctcttcgcagtccacaaagtgaaacgcgtctgacgaagaaaagaggaagagcgacgcgaagaccgcgggtccggaggcgaaggttaaaaagctacagggctgatacgcagattccgtggctagacaaaagaagacgagagctggacgggtgcagagagacagttttcataaaaacgataaatccgcgcaggggagatctctgcgatcgcgggtcttctttgatcgggatcttaagatccacaagaaaactttttccgtgtggaagccaagaggagacagacagagcacacacgcaagagctgcgggaaagggcgagaaaagttgtgaatcgcggttaacaaaagggaaggaaagagaggaagggaggcacactgacgatgagaaagagaaaagaggcgcttcgcggacgcaaagttgacgggaggaaatgtccagaacagcttccacttttccttccttgaccgacggaaaagaagcaaaaaaaattctcatgcgctgtcgactttgcaccaggggaccggaaccgtttgcagatgtgcgtgcattttaacgtatggatgcgacttcgcattcaaacgatatgcatcagtacggatatagagcgtagggaaaaaaagaaacgggagaaatgtgcatagttggacatgcaagcagagagagccctggtgcaacacggggcagtctggaaacgcggcagacggagatcagggggaactggcgcgagaaaacggcaattgacaggcagagaacagacaacgaaagaaaggaaagaacgaaagtgctgagacttttttgaagccagcgagaaaaagggtgcttgacatgtccaaaggctctgctctgtaggccccctcaaaagacagaagcgaagggtggttggaggcgcacgacgcggccggagagaaaatgcgtttgccgcaaaaggcggggaaaaggtggaaaggaagccgcacactcctttagtggaagtgatcttgaatcacaaggaaaacgcggaaaatatgacgtacaaggagagtaaaaacaacacggccgggactcatgtacagaaccgtctgtcaaatgttcgattctgtcggtctagcgaaggcgaacctaagtccgcacattgaagcacattttgcgcatctgcgcgtgaatgagctcctcgaaatacacacagtttctgaaaaattccacagcggtacacatctgcttacggaaaaggattacagaacacgcacaaacccggcagagtgcacagtagggcggtcacaaaaggagtaacagtaggcgcctgccagcgaaaagaagcttccctcccggcgaaaggcgttttgcatcaacggacaagacgagaaagcgaagggaaagaccaaaaagtgactgggaaagagagcgacggatgcaaaaacgtcgcctcgtcgtgtctcacatccgggcactcgcctcgcgctcgtcgcctacacgcaatatggtcgcagaaactgggagttgtttgcaaccaagaaaaaggggaaagttcacacttcccggcgcctctggcgacgtcacacacctgaaagatttctgctgactcagggggaagtctgcctttccgcgagtagggggaaatgatatcgggagaggcgaggcggcctcaaagtgtatcgccctctatgtcgtccccttgggtacaaatgttccagaagaagaaaacgaaagaggaagcgactgcagtacaggcagacaaagaggagggcatccgcaactggacgcgttccataaaataccaagcccttgaggggcggcagtggagactccggttcccggtcttgcgcctgctagttggtttgatgtctcccgcgtcgtcgaggccgcacggaaatgtgtgcttgctgctcacgaaacgagaaagatactaggcaggcacggggaagaacgcaacacttgagctggtcagatacgcgtaagaaaaaaggtttcgggtgtctgacggtagcagaaccccgcagaatccccacgcttacagccgtctccctactagccgctctctcggcgtctcaatccctgtgtggtatcgttagctttttgcttcggattagaaaacagttggtcctggggatctgaaacctttgcgcttggcgaaagcaaagagatactcattctttccttaccctgtccatttcggtctttttcttattcaacgggcgtttttgtctggtagcttttgctagaaagtcatcgtagggggagaatgtatttccagtcccgttgtgctcacgcgttacagacaccggcgactgacgcaaacggattccaaggaatctagaggtggcattttgaaagcgcatgtaaacaggggagatttacactgtagtcagtgtatgctgcgttcgcctgcatatctctggaagtttatctacgggtgtgaatagctttgtaaggcaaagtggaaacacgtattcagacagcgtggatgttttttagacagatccttgctccgctgtgaaggcttagaaaatgtggattttcaagcacaaattcttacgcagctgaaatcagtgaacttgaagaaccgtcatgccatcacccgcgtctcgtctccaagaacatagcatctccgtagtagtttcttctggttgttagtacaagtgaaacactaagctctgtatcatggctacagcatagtcggtatggtatgagaacggcgactggagatcatcctgtttcgtatatctgtttttggctccccagtgagaagctctgagaagcgtggttcgacatcgggaggctgtggctggacgatttcttcctgcagttccgttggatgtgaagatgtgcctaaatcccgcatagacaggaaattgtgtatgtgtttatttatgcgcgtatgtattcacggtcggatccactttgtcggcttcatgctagcgtgcaagcacttgtatagatcttcgga

SEQ ID NO: 4026 - DNA, 1579 bp, Toxoplasma gondii
  source 1..1579: mol_type = genomic DNA
atgaaattctaacatgctcagcctttagcggaaatcatcgagcatgcaaatccgtttttagaaatcacagcagcgttcacaccacctgtggactcggtcgaggaagctttcgcgccgcgttttttgcgatggacggggagcgaaggttctcgtctacctgccgggccatttcgagtcttagattcaatggaaattctttttgagaattttaggtggacgagaggtcggaaccgaccactgaagagaagtggagacgcgcacagaacaagcggtctactggtaatttagaatttacgatcgagataccaaacgtttcggtttgttcatgtcggaggcgcagcagagagaggaagttcacacgggcggaaacggtagagaaggcagggattctgtgacagctccaggtttctctcgttcgttctcgctgaaaagagcgaaggtttccggtcacttagcgaaggcagacgacgtgcatttcacctaaaaatgtgtatcgtctttgttagaatcctacacctgagcactgatctgtaaagagcctgaatctactcgagagcatcccctctataaataagaaccgacatcctttttgtgcgagtcacatctgcaagtaggcagagaggaagacgaatcgcatgtgtaaggagaagtacgttttcagttcagtctaccaaagagcatggctcggtgaaagttgcaggttcgaacaaaagcggtgctttcaaccaggttattccatagagagatggacttgggtgtgcacaacatcaagaggaggttttctgcgcaacatccgttcttgcagatagacaagaatgggggacaggggcacgtttttttaacggaaatcaaagaaatgtgtgagaattcgaaagttacgtcgaaaggccgattggttgtgacaaactcgagcggcgtccgcgaagtctttcttgcatgcgcgcatgcaccgccctgaggaaaaaagggcccaccttggacgtccgccgttttggaaaagatttcgcccgtaaaacgcccgtttctcctcggtaatgagaggcctcctaaaaatcgattcttgcgtctgcaaatgtcaggcgacaaagagagaggacatgatctgagcagacgaacgcgttttcgtcggcgcgagcatgcatcgtcgtctcagaaaaagaaaagatttctccttcgcaggcgtagcgcgttcttgctctcctgccctcaacagtccctccgttttctctttttccgtcgcagttcttcgctcgccttcccggatcctcgctcttgctgcttgcatggctctgtctgtgctgtccaggaaacgcgaaaggcaggaagttgcctcagcagacgagaagtctttctttctgagaagccgaggaactctcgaacttgctctcttctcttcgcgtctgtctttgcctccaacgcaaagtcggcctgcttctgctgcggagtttcttctctgcagggtgacaagcagcgaacgaaacgtcggctgtgcatgcatttcgtccacatttaattaccgattcgttctcttctccttcgcgcgccaggcggttttattgcctctgcgttcttccgaaga

SEQ ID NO: 4027 - DNA, 2332 bp, Toxoplasma gondii
  source 1..2332: mol_type = genomic DNA
taggaatgcgttactaagataccttaccgtttggtggcgaacgaattgattctgaccggctacaccggcggaactggaacctcctgtagcgtgtgtatggcgctgcagaccgtgagcagcagtctgctgaaaactctgattgcctgaccttgtgtatcaggtctttcggtactgcccatttctcaaacgtgtctgttttggcacaactatcggacggacacagaacagcgtcctctattatctgcaggtgtgtttgactgggtgggtttttcagcaggggaccacgcatgctaacacttcaagtcaaataacatgtttgcggcgctacgcctgcctgcacctttggttcacgaatatgctatgttgccgccagccgtggggatcgttcacacaaacgcatttctgccttgatcgtttgagaacgttgcagtgtgcggtctgagctgagcagccggctaacgggtgtgttgccttgcactccggggtacgaaggaaagccaaacgaaaggtgtcacagatttttatgaaaatatagaagtggatctaggtggtgggtccccaaaagcgcgcctctccctgtagtatggatatctgcggtagcatcactggtgttgctaccatgtaagagtgctgagtctcaaattctgtttcggtcaagcatgaggactgggggcgttctagcacttacctcagtgacagataggctacgtcttcttttgagataaagcaccctgtttctcgtgtgatcattcaaggagaaaaatcgagcaaacttgttcgcaccacggcgaacttcctctattaacagagtcacatttacattggatgcatgacgtgcactagttgcgacccgcggtagcttaggcatgagcaacacgcctgcgccatatggtagcgccgaagcagttgccattaccgtgaaatggttatctgttcgtttcaataatggaggggttccgttgctgcttattaggctgtggccgcggcaggatcagtcactgtctcgtaccacatgggcagtaccctttcactggaatttcgtcgtccctttactggcgaaactcctcttcctcccgcttttcagcccttacctactttttccatcctttgtgccctccagtctttttcggcatgtgctcttcatgcgcaatactttgcgtgatgcatgcgagtcgcgctcagttccctggggaagcaactgatggctggtgtcataccaggtgctaactcgaatgctgtcttatctattcttgctgaacagatagttatcacagttccactgtgtcaagccgatattttcatctacgttggtgtcggcaaacaatctcatgttttcgtagccattatctgccactctgaaccggacggtgacgcaggccgtctgcagcaatttgccgtagacctagggtaaatagacattcccgatcttgatccccatcaaacactcgttttctgtacatcaattttttcaaattctggcattttgatgcattgcagcgtggtaacacatcaacattcgtagcaatggtggacttggcagacttttcattgattgtgcgtaggactcattcgaccaatgcatgaggtgcaacccctagcaacgaccgagtattcactggtctgccccaccgagtggcttgtccagtgtcggatcaacccacgaacagctctcggtttctttctggaaaatttttggagtggactcatgcaatggcgactccgcgaaagtctgccatccatgctatgaaaacaatcaccccaaagacactgctgagcaagcgcgctgtttgcttgtcttagatgtagttggcgacttgcacgaatctcgcaacagcgaacgccacgttgttcccagcgagtacccgaagctcagggtgcgattttgctcgtctgagtcttcctcactcctttaaagagctctgttcatagtcgaccaagttcgtttttctatttgcgggaaacttctgacctctctgatgcctcctacgcgcgctcctcccttgctgccattctgaggtctgtctgggtgacctctctactccttcatttgtatagtcttttctcgaagtatctttcctatatgtcggggacatcgtggtgtacgtattggctttgtccttgatctctggaacaacttcggctgtgatgctttgcgactcgtagcgcgcgcgaaattccccttttccggctcctcgtgcgtttgcccgccacttgcaatctatcgtacggttaccgaatcttcttgctcatttcgctctgctggaaggattaattccggcactttttcactagaaaccttctccccttgagggaacaaaacccgtgtccaaaa

SEQ ID NO: 4028 - DNA, 2318 bp, Toxoplasma gondii
  source 1..2318: mol_type = genomic DNA
cacgagggaggtatacacaagcatcttgtaatgcatgtgagtttttagagtcttgttccagattcgggacacgagtgaagagtttgtgttcaaaatactagaacttctacggaggaacagaaaccaaacgtctgaaaaaggagacgaaggagaagaaaaggaagtccatcgcggcttggtttttccaggtcaacggaggaaaaaggaaagaacacaagtcccggagtcgagccgcagtttagaagcagcggcagtgtatcttgtgttttgattcccgttgagagtttctttcatttccttctcgcgtctgtcgaaccaagagtagccggcaatatcttgccgttctagcgcacaaaaaaataagagaggctcttgacacctgaggaaaaaggcacgccaaggaacggtgaaaccattttagaagtttgaggaaacccaccgcgtatgcagcacacactgagaaaagacggttgctcatctggagtgaatgacaaacagaacagcagttggaattcaactaaatcgcgtaccagcagtcaacatcatacagcgcgtgatgaactgatgttggtagacgggatttcagaaagtccgcggcgaagaatgtgatatcaagtgtctggtagggaaacaggtgcaaacacgacccgcatgtccggttgaaaacgcggcaacaaaaaagaccagcagagacccgactggcaacaaaaaagaccagcagggatgcagaagcagtgggctaattattgtcacgcgtatagccagagttttggaggcgatgtggtcgttttctgtccgtgactacgggttgattttagtgatctgggttatgtttctctctccacgacattttgtacaatagcaggcgaaatcgtttcccaccggctgtccgagggatctttccgcgaccttgtcgagattcacaaaagttaggagcgcaagctgccacgtgctgaggtagttatgccgatcctttgtcatttagatctcactaaggagtgtcctaaagaccacatgttgctctcaaacgtcgaaaacgcgccagaactgctgcatttttcgtagggccacaagggatttcgccatgcgatacctctgtggagtcgagtttcttcattctgtaggtagtttcacaatgtgcctctgtcttcagtatacacacgctctgcgttcctggaacccgggagccttcctctcctttttcggatttgagctgttccctcttggtgggtggtatatgttctgctctctttattggctgttatgttctttgaaacaatgttcgacacctctgcgtatcctggcaataaccgtgacctgggttcccccagtgcggccctaactcgctttctacagcgtgatgccgctcgagttcccttcttggtcctgcgtttacacagtcagagacagatctgaggcactggtttactgcgtgatccacttcaatttgtctgaaatttcctacatatcttcactgcaaatagagccgcgccaggaataagtcagctttgttccggaattgcaggtcaaccaactgttctgcagtcgggattcacatgttttggcgcgtaagatgcaagctggcttcatcgctcgtgacttggagccgaaatggtggaatataaggctctgaaaaaagcggggaactgtagcacactactactgacggacaaatccagacctcgggggctctgacagatgatagtattttgctctcgttcatctgaatggaattcatcaggctggtctcacataaggcattgctttttttcaagctctcccggtgttcgtgataccgccttaccagttctggtgtggggtctttcgtcaccatatctctctccaacgtacattttccttcagtatcagcctctgggacagctgcgctcgactttcgctccgcagtttttctccacaccaaaacgaggcatcgatgtgtcttgtttttttcgaaaaagagaacttgaatcaaagggagaaacagcttttttcatggtccatcttttcgttgagctgcctgagccgctccccctgaaccaacgtaggtcaaaagatgtgcgtgtacgagactgatctataacctgcgtgcttcttttctctgctttgtcgctggcatggtttcagattgctctttctcgtgcttgtcactaaacttgtgcgatccaactctgtattcatttttcattcattgtctggtccttgcaaatgcgtatgcgcggcgctttctctcttacatcatttcaaaacaaaccatccaaaacatcctgttcatgtctcacttttgtcctgcctgctccacgctgaaaaaacagtcagga

SEQ ID NO: 4029 - DNA, 2590 bp, Toxoplasma gondii
  source 1..2590: mol_type = genomic DNA
tttcgaactctttcgcgggaagcggcatgcctttgggagtcgggaacccctcgactttggtgttgacgaggaaggtccccatgagtttcttcgcgtccttcaaactcaagtacctgaagcgaagggagacctccggctcccatgtgtgtccagcaccttctcctgtttttcctgcttgtttttccatctttcttttgatgagtgcgacggccgcattcgagctggcggggcgactttcccagaagacgtcttcgccagtctctttcagcgccttcttcaggtcgccggggtcccggcccgcttcgtccgcctgctctgacggaaaagctttctcggagacgagaaccgaatctcgcacgatgtgacgcatgctgtgggtgaggtgccgaaagaaattcgccttccacagctccatgtcttcgctgtcagccagcaggaggcggagcagttcccctgcatcttctgggtgaccacgcaaagtgcctccgtcggatcgtcgctctggcgcggaatcgcggtcccgcggcgcgctttctgtcaggttgccggaggtagcgactacctgctctgcaacgatgctggcaaacaacgactccacggactctggagaaacaaacgcgttcaggacgtcctccgcgctgaaggactcgcgaggatccacggatgtgtcttcagaaagcggaaacaacgagtcgtccggggtgcctgcggctcgtgtgtacatacacccgagaagaaggattgccgcgagcgcggcgacgggcagcggggtgcccagaacgcgaaaagactttcgcccctccattttttccatggtgaaaaaaagctgatggtgcaggactgatattccgtcaatcttgtttttgaagacgcaaaacctctgggttttcgccgtccgtaaaagcaagggaggaaggatgtatggagggcctagaacaagtcacgttgccgcgcgtgccgttgacagacaccgaaaaaaaaactcacgaccccattcaaaaagagagtttggatgccagaatcctacgagattctggaagtgtctgtttctctgtttctgacaggagagcgaaagcacggcgtccgcgcttggtgccacaagaccagcctgaaacaaacgggaaacatcaagaagccaaggaagcgcagaattgcaaatcaaacaaacgaccatgtgagcaacaaagaggaaacgcttgcgccacggtctctcttcactggccacacaagaacggctgtacctctgagaacactaaaccgcgccacttaaaaactgtggattttttggcaggctcttcgctctttccgccaactgtctcaatgctcacgccagttgtcttggcggctttccgtccagcagcagtcgttgcgagtgttacctaacttgatgctagcgcgaaacaaaacggacagcgtgaggttgaaagtgtgtgtgtctcaacggcaaacagcggctcaacggcaggcgattccctcgaacgttgactttcgacgataccaggcgcacttgtcgtctggaccagctggctacactcctgtatattatggcaacgctgaaaaagccacaaactccccgatttgcagatgctttcgtcctgtcatgttgctgtctgttgccttacctctcagcactcgcgtcaagaacaagcgttcgcaggagagacacgcgcggttggtttttccggcgaaagtcgacggttgtcggcgttcagctgggcacaaaaaggcgcttcatccggaaaggaaaacgctgagaagccgtaaaaggaagcaaccagaccgtttcctgtcccgtcactcaagttcaccgagaaagccggatgagtcagcaacgcgccgcaggcacaccggccccaaaacgcgaaattcgtatataagccgacgcgcgtccgaagcgccacaactctgaaggagggcatgcagccccgacggccggttaagaagcctactctctcacaggtcgcaaagacaggcaagaaacgcgagaccttcaaacaggtatcttcgcgcgaatttgtttcccgcgtaacggtagagaaggcacgcagacatgccttttacgctaaatcgtcaacccaaagataggaactggatgttaggtagcctctcaaggtcggggcgactaggagtgacgcccgaacaggcgtttcagcgtcatgttttctctcccgtcgacagaaacgtgaacatgcccaatacatgctctttagaaatccgttagttgatggattgaaacggagcagactcagaattttctcggatctgctgtccagacaacccgtcgattttccgccacaggtttctccgtcgtgcatgcgcgcgcaattgtctcaactactcgttctcttttctttacctcatactccctttcgcctccgtcgtttgtttcgttattccttcctctggtaggtttttctgtctttcagttagtgtgccgtcgccctccggtttgtccacgcttgtgtttcgcccgtcgtctcttccgtcccctgacagtctcaacccctcttgaagtcgcctcgcagttgatttccgcttttttgtagttgtcctctgggattttgcgcgacgtcgtttagcctgtccagca

SEQ ID NO: 4030 - DNA, 1396 bp, Toxoplasma gondii
  source 1..1396: mol_type = genomic DNA
aggagaggaactgaaacgcagcttactttgggaatgagatggttgtgtttctctcctcttccattttcgtaaagagctgccctgagcccacatctgcgagtttcgatcgcagtgaaaatgcgtccagcttccacgtagatcgccgccattttcctcgagcgcgcgcttcctctttgcttttataatgaacaagaacgaagggatctgcagcggcttcttactccgagagatatggcttcgaagccatttctgagtcggtctctacgggagaaaaacgcttcaaagataaccatttgtttcgcttttttttgaacgcttagtaaagtggaggtgtcgaatttccagccagcgggctctccccgatctgttttatttgacaagaaaaaaatagtcgattctctcctgcgcgacgactttggaaatcctctgagtttcggactgccttcaccgccgctgtctgatttctagaagatgtctcgtccgagcctcgctctcgagtgtcgctcttgccccttgccctggttgcgtccttcagcgagactccacaagttttatctctaacatctctcgtctcatccagaggcggaagaagaatcggcgagcaggtctcttgtctcctgctgtctttcgtttctttcgcgtgcctcctgccctctttccatcgaagggaagtcgttgacgaaaaggacgcaaggagagagcactaagagcaaaaaatcgggaagaaaaaacggtttgagtgaggaggaaacacagtcttgtgtcggagattttcagaagaaatttgcggctgaagcgcgaccaagtgagtcaaattccatttgaggcgaaaaaggggcgtataaggagaaggcggcgtcaaggcgagagaaacgcgacgcgaaaaaaataaagggagagcggaactcactcgaagaaaaagaagattcaattggggagacgtcacaagttggaaaaacacctgaaaaaaatgtggtaaaaagagtcgcaaagaaatacgcgtttttgcatgcagctgtgccgtgcagcctcagggaacgacagtaatctccgtttttctgctaccccacagaatctcgcaagtttggagttcttttctctccaacactgttgacacacgcttctcctggcctctttttgagacctcatctgaccttcgttgcgcctctcctttttccaccttctgcctcgccgccagccaccgtccttcttcgtagtcacctgttccctgctctcggtcgaagtctccttctttttcgtttcgacgctgctgcgtctctaggccctcttctccccatcagcctcgttggttttccccaccgacgtttgtccggtttttttcagttcacctctcctctcttcttcgccttctcacgtcgcgctctgtctccttgca

SEQ ID NO: 4031 - DNA, 492 bp, synthetic construct
  misc_feature 1..492: note = 5RT70constitutive promotor
  source 1..492: mol_type = other DNA
ccgggccccccctcgacggtatcgataagcttaaccacaaaccttgagacgcgtgttccaaccacgcaccctgacacgcgtgttccaaccacgcaccctgagacgcgtgttctaaccacgcaccctgagacgcgtgttctaaccacgcaccctgagacgcgtgttcaagcttgcctgcattgggtgcggttggtgatcctggttggaccggtggagatgcgcgcgcacgaaggggatgtgtcagaaacattttgtttgttctctgtgaacttttagatgtgttaaaggcggcgaatattagcagagagtcctccttgttccattctctcttgaatttcgccctttccttctctttgcgagtgtggtagagaacaagcactcgttcgccgtccctgacgacgcaacccgcgcagaagacatccaccaaacggtgttacacaatcaccttgtgtgaagttcttgcggaaaactactcgttggcattttttcttg

SEQ ID NO: 4032 - DNA, 1384 bp, synthetic construct
  misc_feature 1..1384: note = DHFRconstitutive promotor
  source 1..1384: mol_type = other DNA
aagcttcgccaggctgtaaatcccgtgagtcgtcctcacaaatcatcaagcaggtgtcctcagggagactgcctgactgagttatgctaattcctttctactttggcgtggtcacgtgtaaccatatccgaatcatttctctagccctacgaacaggtaagagcgctagggatgtccgtggagtagtgtgcttactcgataatattcagttgggactaccagcgaggcgctcgctttgctcacgcaatgcctgagacagttgcagaatgaatggtaaccgacaaacgcgttcatatgcgttttcaaacttagtagacgcgtactgtctgaaactggcggtcacaggcaccagataacgcccttggcatcggcatgtctcgtacagaggtccgtatgtagtgccacgacttctaaatccggcgacaggctggtcttttgtcttaccacgtattagcccgcgtgcgatttctcggagcgcacctgttcaacactagaaaacggagtttcctgatcgagaagccaccacctttccagaagttgaacgctagcatgtcattcgattttcaccccccgcgtagttcctgtgtgtcattcgttgtcgagacaactctgtcccgccccggtgctgttccatatgcgtgactttcccgcaattttttcagactttcaggaaagacaggctccggaacgatctcgtccatgactggtaaatccacgacaccgcaatggcccccagcacctctatctctcgtgccaggggactaacgttgtatgcgtctgcgtcttgtctttttgcattcgctttccaaaaaagagagccatccgttcccccgcacattcaacgccgcgagtgcggtttttgtcttttttgagtggtaggacgcttttcatgcgcgaactacgtggacattaagttccattctctttttcgacagcacgaaaccttgcattcaaacccgcccgcggaagatccgatcttgctgctgttcgcagtcccagtagcgtcctgtcggccgcgccgtctctgttggtgggcagccgctacacctgttatctgactgccgtgcgcgaaaatgacgccatttttgggaaaatcggggaacttcattctttaaaagtatgcggaggtttcctttttcttctgttcgtttctttttctcgggtttgataaccgtgttcgatgtaagcactttccgtctctcctccgtgctttgttcgacatcgagaccaggtgtgcagatccttcgcttgtcgatccggagacgcgtgtctcgtagaaccttttcattttaccacacggcagtgcggagcactgctctgagtgcagcagggacgggtgaagtttcgctttagtagtgcgtttctgctctacggggcgttgtcg

SEQ ID NO: 4033 - DNA, 1205 bp, synthetic construct
  misc_feature 1..1205: note = MIC2constitutive promotor
  source 1..1205: mol_type = other DNA
gcagcggtaacaccttgttgattcgcgcctagcacgacagaaggaaccaattgtacggataggcgaggggagaggacaacgatgtagtgttgttcaaagccacaaataacgtgattgtgcattttccatgatccaactggtatgctctactccaccgcgggcaagttgcaaaacatatgccaacgagttggtgcacggcaggatttgccttgtgaagcaattgtggtcggcacgaacctcgacaatgtgttgagatatgcaaacacgaacgagtggatccattgctaggcgtgaaacggttttctctgctgttgtacgccacgttccgctcccatgtcctactgtttttcagagcagtggagtgtgtggtggccgagaggtagcgccctttgtgtgccacggtaccaacgtattgtccttcggcattcctgatgcgaagttgttttggggtattgccagccttgcagatataacgaagaggtggtggatttcggtacatggtcaaaaaaagccgtaatgcaagtttacaccaggaacgggtcgtgtgggaggccgtcagcgctacgcgagtcctgctgtgagtggacttgcatccgcagttgttggagacgttcgttcagcagttctgactctgcgccgaatacgacttcgtggtgaataacgacgcagccagcacggttattgcgacatgcagaaagacaactgctgaaggaatctgttaaccagtagttgaatgtaactcgtgcttcctgagcgacgttgccggcactgttactcgtacactagcttcataggctacacgagcactctatattgaacgcatagtgttcgtccgtgccagtgagattgattaactctaaatgagactgtacaagctgacgactacattcgttatgtcaaaagagcgctcgcttgcttcaccacaacgctttctttgccaaaacttgtaatttaagacactctacccacaggagataattcctttgtaacgcagaaactgaaaataacaagtttgccatttgcctaaaactagcagaaagttacctcagtcatctgcgtgccgcagacgcgctcaaccagtgttacaacagcgtcgaaagcgcttgcttttgtgcagtcacctgtcaggtctacgaaacaccgacagccaaacaaatcccacattgagtacgtacccgtgttactctcctttcgtctcctccttg

SEQ ID NO: 4034 - DNA, 1858 bp, synthetic construct
  misc_feature 1..1858: note = MIC8constitutive promotor
  source 1..1858: mol_type = other DNA
cctggtggtgggcggaaaggaacacggcgccactccactttctgtggataaacaattctcgtaaggaatttcttacatttcatgtagatagcaagggaaatggaccgtcccccacgccacccagtcccatgattccatggatgggtgaccacattcaaacctatatgaagaaagagcatggacagtcaaatcatgcttaacgagactgattgacgaacgcatttcgttataacggtaaagatcttcatccatctcggctaccgtgcggtaaaaacagaactgaaaacttgaacgccggctcctagaaacgtcggcatctcgagaaccagggacatgtatgcacgaggaggcatcacgagtgtgacagaacacgacaaatatctggccttggcaaattccattgaacagcctctggcatgatgtcttgtattactcgattgtttctccactccacacaatttgtccactgccttctctccgcgagtcagcagactgataggttcgtgcactcgtagctagggtactggttgaccaatggccaaaatcgtcctgtcgtgcgaactatcggttcactcgtaacggatttggtggcggcctgccttcagaaatcgctggggcaagctgtcgaaccaggaccgctttttgtggctccctactcctctcttagatcaaaatctatttttcaatttcaatttaatcacgtataaacaaacaacacttcacccactgcaacacttcactacaacagcagtgtttggtattcgtcagacgaatcatcgctggaatcctgtggaacacttcgtagcgttgacagtaccccacataacacaatcacagtttcgcttctgagtggagaggactataaaaattacatgttcccttccttacaatgtccttcttacccatgcattaatcactttgatggcagtcaccaggatatcaggatggctagtgcaggtttcagcctgttccgtgtagaaataacgatgactataagtaaacattttgaagccctcagttcttctcgaaaaaaaacgtatgaatgccttctcaggggtggcttatacatccgtaccaggagtaggtccttcagttacaagggcgaaagaatctctccggaagtgctttgtatcgacaccgttgtgagtctgcgtcgcatacggttacttgcagaaaatacaggagagagtgacggcgaaacttatgccattgctccaatttctgtaaagcttgagttaatttagtcacctcacaaagcagcaaattcctaaggaatgtacggcacttccggtgtggtgttacaagcacagcacggttcacgaaataggaaccctcgacgtggaaccctctgcgtgtcacgcaaacgcacgaacatgcagcttgcgtgtcacttgaatggcatactgcttttcttctcatgtagccgcagccggagtaattcgcatgaataagcggtccagttgctcgaagagacatttcagtgtcggttcgtgtaccatacgaatgatgacagacaacctggcgtggtgtcatattacgcatcccctcgatttgattcgacagcgagtataaaaccataacggatagaggccgaggaacagcgacgccacgagtggttgtacacggaacagcccgggacttcgagtctgtgccagttttcttacatctttcctgcgactcttttgtggccagttttttatgtgggcaagggggaacacacttttcccttatggaatgcaggcaattactgtagctgttgcagcaaatgcagagccccatttatttcatgggcgagggttctcgtttacgtcaataagatcaccgtattattcggctggtcgcggtatctttcgtttcg

SEQ ID NO: 4035 - DNA, 806 bp, synthetic construct
  misc_feature 1..806: note = SAG1constitutive promotor
  source 1..806: mol_type = other DNA
aagcttttacatccgttgccttttccacggtccgtgatttcatgtgcgtgcagcttcaaagactggtcgttgcgactaataagactgcagtgacaggtcgaatggtgggcaccttgctgatgactatctactgcaaagtctgagacaacgaacgaaacttcccacacgaggcatttgaaactgacggtgtctaggtaatatgcactgcaagacacggtactggggcctcgctgaattaggggccgatctcgttgccctatcagtgctcacagtgccgcaacgtaacaccagggcaggttcttgacagtggcaacaatgtgcgacgggcgtgtgaacgtttcgtagtcatagcgctagcacgtacctagccacatggtcgtgaggagctttaccatgcgtctagaaggtggatgcgggacacgccttcctggcctttggctcccgagacgcgtgttctaaccacaaaccttgagacgcgtgttccaaccacgcaccctgacacgcgtgttccaaccacgcaccctgagacgcgtgttctaaccacgcaccctgagacgcgtgttctaaccacgcaccctgagacgcgtgttctgccgcacaatgtgcacctgtaggaagctgtagtcactgctgattctcactgttctcggcaagggccgacgaccggagtacagtttttgtgggcagagccgttgtgcagctttccgttcttctcggttgtgtcacatgtgtcattgtcgtgtaaacacacggttgtatgtcggtttcgctgcaccacttcattatttcttctggttttttgacga

SEQ ID NO: 4036 - DNA, 639 bp, synthetic construct
  misc_feature 1..639: note = TetO7SAG1 inducible promotor
  source 1..639: mol_type = other DNA
attaagttgggtaacgccagggttttcccagtcacgacgttgtaaaacgacggccagtgagcgcgcgtaatacgactcactatagggcgaattgggtaccgagctcgactttcacttttctctatcactgatagggagtggtaaactcgactttcacttttctctatcactgatagggagtggtaaactcgactttcacttttctctatcactgatagggagtggtaaactcgactttcacttttctctatcactgatagggagtggtaaactcgactttcacttttctctatcactgatagggagtggtaaactcgactttcacttttctctatcactgatagggagtggtaaactcgactttcacttttctctatcactgatagggagtggtaaactcgaggtcgacggtatcgataagcttcaatgtgcacctgtaggaagctgtagtcactgctgattctcactgttctcggcaagggccgacgaccggagtacagtttttgtgggcagagccgttgtgcagctttccgttcttctcggttgtgtcacatgtgtcattgtcgtgtaaacacacggttgtatgtcggtttcgctgcaccacttcattatttcttctggttttttgacgagtatgca

SEQ ID NO: 4037 - DNA, 716 bp, synthetic construct
  misc_feature 1..716: note = TetO7SAG4 inducible promotor
  source 1..716: mol_type = other DNA
attaagttgggtaacgccagggttttcccagtcacgacgttgtaaaacgacggccagtgagcgcgcgtaatacgactcactatagggcgaattgggtaccgagctcgactttcacttttctctatcactgatagggagtggtaaactcgactttcacttttctctatcactgatagggagtggtaaactcgactttcacttttctctatcactgatagggagtggtaaactcgactttcacttttctctatcactgatagggagtggtaaactcgactttcacttttctctatcactgatagggagtggtaaactcgactttcacttttctctatcactgatagggagtggtaaactcgactttcacttttctctatcactgatagggagtggtaaactcgaggtcgacggtatcgataagcttacgccgctgagactaactagaaagaagtgtgcaacagttcatgagggacaaaaggaatgtgatgcggttcgcttgaagaaggaatgtttaagcacgtcaacaatacgccttggcgaatgttcatgactgttcatgtggttcatcggatcatttgaaaacatcgtgaggctggtacctggtcgcaaacgtcgtagtgtagtaccgacaataacgtcgtcgttcaaggggacgcagttctcggaagacgcgtcgcagcatactgcaactgctttcgtctgtcttcaaccatgca

SEQ ID NO: 4038 - DNA, 498 bp, synthetic construct
  misc_feature 1..498: note = TUB1 constitutive promotor
  misc_difference 290: note = n is a, c, g, or t
  source 1..498: mol_type = other DNA
catgcatgtcccgcgttcgtgaaattctctgcatcagcggagtgatcaggaatcatcgtctcagcgggatgacgttgcggagcaggccggctcgcggtgggcagtcagatgccgaaggcgtaactcaggacggcttgcgctcatcgcagaacaggggtggtgcctgcattgggtgcggttggtgatcctggttggaccggtggagatgcgcgcgcacgaaggggatgtgtcagaaacattttgtttgttctctgtgaacttttagatgtgttaaaggcggcgaatattancagagagtcctccttgttggattctctcttgaatttcgccctttccttctctttgcgagtctcgtagagaacaagcactcgttcgccgtccctgacgacgcaacccgcgcagaagacatccaccaaacggtgttacacaatcaccttgtgtgaagttcttgcggaaaactactcgttggcattttttcttgaattccctttttcgaca

SEQ ID NO: 4039 - DNA, 485 bp, synthetic construct
  misc_feature 1..485: note = TUB8 constitutive promotor
  source 1..485: mol_type = other DNA
cccccctcgacggtatcgataagcttaaccacaaaccttgagacgcgtgttccaaccacgcaccctgacacgcgtgttccaaccacgcaccctgagacgcgtgttctaaccacgcaccctgagacgcgtgttctaaccacgcaccctgagacgcgtgttcaagcttgcctgcattgggtgcggttggtgatcctggttggaccggtggagatgcgcgcgcacgaaggggatgtgtcagaaacattttgtttgttctctgtgaacttttagatgtgttaaaggcggcgaatattagcagagagtcctccttgttccattctctcttgaatttcgccctttccttctctttgcgagtgtggtagagaacaagcactcgttcgccgtccctgacgacgcaacccgcgcagaagacatccaccaaacggtgttacacaatcaccttgtgtgaagttcttgcggaaaactactcgttggcattttttctt

SEQ ID NO: 4040 - DNA, 5228 bp, Homo sapiens
  source 1..5228: mol_type = genomic DNA
agggcggggcgcagcgggcaggcaagggcggccgagcgggcggcgggcatgagcggggcgggcagggcgctggccgcgctgctgctggccgcgtccgtgctgagcgccgcgctgctggcccccggcggctcttcggggcgcgatgcccaggccgcgccgccacgagacttagacaaaaaaagacatgcagagctgaagatggatcaggctttgctactcatccataatgaacttctctggaccaacttgaccgtctactggaaatctgaatgctgttatcactgcttgtttcaggttctggtaaacgttcctcagagtccaaaagcagggaagcctagtgctgcagctgcctctgtcagcacccagcacggatctatcctgcagctgaacgacaccttggaagagaaagaagtttgtaggttggaatacagatttggagaatttggaaactattctctcttggtaaagaacatccataatggagttagtgaaattgcctgtgacctggctgtgaacgaggatccagttgatagtaaccttcctgtgagcattgcattccttattggtcttgctgtcatcattgtgatatcctttctgaggctcttgttgagtttggatgactttaacaattggatttctaaagccataagttctcgagaaactgatcgcctcatcaattctgagctgggatctcccagcaggacagaccctctcgatggtgatgttcagccagcaacgtggcgtctatctgccctgccgccccgcctccgcagcgtggacaccttcagggggattgctcttatactcatggtctttgtcaattatggaggaggaaaatattggtacttcaaacatgcaagttggaatgggctgacagtggctgacctcgtgttcccgtggtttgtatttattatgggatcttccatttttctatcgatgacttctatactgcaacgggggtgttcaaaattcagattgctggggaagattgcatggaggagtttcctgttaatctgcataggaattatcattgtgaatcccaattattgccttggtccattgtcttgggacaaggtgcgcattcctggtgtgctgcagcgattgggagtgacatactttgtggttgctgtgttggagctcctctttgctaaacctgtgcctgaacattgtgcctcggagaggagctgcctttctcttcgagacatcacgtccagctggccccagtggctgctcatcctggtgctggaaggcctgtggctgggcttgacattcctcctgccagtccctgggtgccctactggttatcttggtcctgggggcattggagattttggcaagtatccaaattgcactggaggagctgcaggctacatcgaccgcctgctgctgggagacgatcacctttaccagcacccatcttctgctgtactttaccacaccgaggtggcctatgaccccgagggcatcctgggcaccatcaactccatcgtgatggcctttttaggagttcaggcaggaaaaatactattgtattacaaggctcggaccaaagacatcctgattcgattcactgcttggtgttgtattcttgggctcatttctgttgctctgacgaaggtttctgaaaatgaaggctttattccagtaaacaaaaatctctggtccctttcgtatgtcactacgctcagttcttttgccttcttcatcctgctggtcctgtacccagttgtggatgtgaaggggctgtggacaggaaccccattcttttatccaggaatgaattccattctggtatatgtcggccacgaggtgtttgagaactacttcccctttcagtggaagctgaaggacaaccagtcccacaaggagcacctgactcagaacatcgtcgccactgccctctgggtgctcattgcctacatcctctatagaaagaagattttttggaaaatctgatggctcccactgagatgtgctgctggaagactctagtaggcctgcagggaggactgaagcagcctttgttaaagggaagcattcattaggaaattgactggctgcgtgtttacagactctgggggaagacactgatgtcctcaaactggttaactgtgacacggctcgccagaactctgcctgtctatttgtgacttacagatttgaaatgtaattgtcttttttcctccatcttctgtggaaatggatgtctttggaacttcattccgaggagataagctttaactttccaaaagggaattgccatgggtgtttttcttctgtggtgagtgaaacaatctgaggtctggttcttgctgaccttgttgccctgcaaacttcctttccacgtgtacgcgcacaccaacacgaaatgccatcactcctactgcggctgctatgaagcttactggttgtgatgtgttataatttagtctgtttttttgattgaatgcagtttaatgtttccagaaagccaaagtaattttcttttcagatatgcaaggctttggtgggtccaaaaaatgtctatcacaagccattttttccttttcctctctcgaaaagttaaaatatctatgtgttattcccaaaccctcttacctatgtatctgcctgtctgtccatcatcttccttcctccctatctctgtgtatctggatggcagccgctgcccaggggagtggctgtggggagggcaggtactgtctttgcctgtgggtccagctgagccatccctgctgggtgatgctgggcaagacccttggcccgtctgggccttggcttcctcacttgtgaaatgagcgggaagatgactctcagttccttccacctcttagacatggtgaggtaacagacatcaaaagcttttctgaaatcttcagaagaaatagttccattacagaaaactcttcaaaataaatagtagtgaaaacttttaaaaactctcattggagtaagtcttttcaagatgatcctccacaatggaggcagcgttcctacttgtcatcacacagctgaagacattgtttcttaggtgtgaaatcggggacaaaggacaaacagagacacacggcattgttcatgggaggcatcgtcaccctcctgggtgttctgtgggaatttcctgtgtgaggaaaacgtggccacagggttgtgctgtacccacccttccccggcgagatggccctcggcctgtgccgctgcttccaccctcgccactccatggcagcttttggtctgtttccggctctgccctctgccctgaactctcatccggcttgtacctgcctgctggacccctccacctggaggccagcccatgtctcaggcccagccctagcctcttctcctcaaattctaagtgttttctctttaggtttccctggctttgtgaatggatcatgtgtctctaggtataaacctgacatcatctttccacccggcttacctccaccagatctccccagttctgtctccatcttctacctgcagctgctctgttctcatggtcactgctgcatcactgagtctggacccttgttatcattttcaaactggcctccttccctcgttccccacttcttaaagtcacctgtccattgccaccagattaagctttctccagccagatcacctctctctgagaaacctccattgacatggaaacaccattgtctggcacacatactcacatactcaccttcccgtcttgatccccacacatctttccagcctcccctcccactccactccctgctctctcctccacctccccatcctcttgtctcccctcccctctgaatccagcccagcggggcttctcctgcctccatcacatcacagaagtacctcctgcttctggttttaattagagccttccccgattacattttcctctgaattttttcctatctacatttgatctgtcatgtttaaaccccctacttctaagggaacttctctaatctcttatcctcatccccaaatagtgttttcttcctctgggttcttataatgttggtatcaatctcacagcatttagtgcttcctgcctggtgtgacagttacctgtgtgcatgtgcaatttctaatttcccacgctagactgtgagcttcctaaggcaagaatcatgccttgttggtttctgtattcctcatggtgccaaacacagtgccttctacattgcaggcgctgaataaacatttttaaagcaaaatgatgtggatttttaaaataaatatttaagtgctggtaagatgagcatgtatccggggtgcccatgaaatgttcttggggccgtgtggggacagtcgtcattcctcctcctgccacccttttctttcagtgagtcactgtggatggtcccagctgtgtcatcccaaagttcagcagggaaagctgagctgggcctctccaggtgagttttctagaagcatttctcaaactgtgggttacatcaacttgggtgtcttgagctgtaaggaaggaactccggagtcagctgggctacaggggagcttctctaagtcctgcgggaggccagacccagcctgagcttgctgttagctagcggaggcagctgctggtggcccaggtgctcgacaccaggcatcccctctcctcccacgaagggtgtgccataatccccttcaacaggaaatgcttcccagaagcctctcagcagcctcccctcctgtcctatcagctagaagcgcctcgcttgtcccaagaccagcagggacagggaactgtccgagcccgtggctgtgtggaggaaggcgacccccagcacaagattggtttcctttgggaagggaagagggagtgtgttggggtaaggggtagagcagaggaatggtcagggggcaacaaccgctgacagctgcaacaggtgcatggcatctcacagggaggcagggaggtgcgagctcctaagtaatggagcaaaaaaattctattctgtagaatggggagagaaaatgtgacattttaatttttttttgcatttatattcctaattcctacttaaagtgaatatactgccgctgtagatcataaaatgtatcttttccatggccaacaaggggcatcttttataaatgcataataacccagtttgtatcaaagggtatcgacttaagtgaaatttcaacatgctgttactttttccttttaatgtaattctgttttccaaataaatgggggagacaaatggaaaaaaaaaaaaaaa

SEQ ID NO: 4041 - DNA, 6194 bp, Homo sapiens
  source 1..6194: mol_type = genomic DNA
aagggggcaaagcctcggtcttcatagaaaaggagaggaggcaaacgcagcccaaactggggggtttctcttcaaagccagctggtctggctttattctgcaggaatttttttacctgtcagggtttggacaacaaagccctcagcaggtgctgacgggtacaacttcctggagaagcagaaaggcactggtgccaaagaagagttgcaaactgtgaagtaacttctatgaagagatgaagtaaagaacggaaggcaaatgattgtggcagtaaagaagtgtatgtgcaggaacgaatgcaggaatttgggaactgagctgtgcaagtgctgaagaaggagatttgtttggaggaaacaggaaagagaaagaaaaggaaggaaaaaatacataatttcagggacgagagagagaagaaaaacggggactatggggagaaaaaagattcagattacgaggattatggatgaacgtaacagacaggtgacatttacaaagaggaaatttgggttgatgaagaaggcttatgagctgagcgtgctgtgtgactgtgagattgcgctgatcatcttcaacagcaccaacaagctgttccagtatgccagcaccgacatggacaaagtgcttctcaagtacacggagtacaacgagccgcatgagagccggacaaactcagacatcgtggaggcattgaacaagaaagaaaacaaaggctgtgaaagccccgatcccgactcctcttatgcactcaccccacgcactgaagaaaaatacaaaaaaattaatgaagaatttgataatatgatcaagagtcataaaattcctgctgttccacctcccaacttcgagatgccagtctccatcccagtgtccagccacaacagtttggtgtacagcaaccctgtcagctcactgggaaaccccaacctattgccactggctcacccttctctgcagaggaatagtatgtctcctggtgtaacacatcgacctccaagtgcaggtaacacaggtggtctgatgggtggagacctcacgtctggtgcaggcaccagtgcagggaacgggtatggcaatccccgaaactcaccaggtctgctggtctcacctggtaacttgaacaagaatatgcaagcaaaatctcctcccccaatgaatttaggaatgaataaccgtaaaccagatctccgagttcttattccaccaggcagcaagaatacgatgccatcagtgaatcaaaggataaataactcccagtcggctcagtcattggctaccccagtggtttccgtagcaactcctactttaccaggacaaggaatgggaggatatccatcagccatttcaacaacatatggtaccgagtactctctgagtagtgcagacctgtcatctctgtctgggtttaacaccgccagcgctcttcaccttggttcagtaactggctggcaacagcaacacctacataacatgccaccatctgccctcagtcagttgggagcttgcactagcactcatttatctcagagttcaaatctctccctgccttctactcaaagcctcaacatcaagtcagaacctgtttctcctcctagagaccgtaccaccaccccttcgagatacccacaacacacgcgccacgaggcggggagatctcctgttgacagcttgagcagctgtagcagttcgtacgacgggagcgaccgagaggatcaccggaacgaattccactcccccattggactcaccagaccttcgccggacgaaagggaaagtccctcagtcaagcgcatgcgactttctgaaggatgggcaacatgatcagattattacttactagtttttttttttttcttgcagtgtgtgtgtgtgctataccttaatggggaaggggggtcgatatgcattatatgtgccgtgtgtggaaaaaaaaaaagtcaggtactctgttttgtaaaagtacttttaaattgcctcagtgatacagtataaagataaacagaaatgctgagataagcttagcacttgagttgtacaacagaacacttgtacaaaatagattttaaggctaacttcttttcactgttgtgctcctttgcaaaatgtatgttacaatagatagtgtcatgttgcaggttcaacgttatttacatgtaaatagacaaaaggaaacatttgccaaaagcggcagatctttactgaaagagagagcagctgttatgcaacatatagaaaaatgtatagatgcttggacagacccggtaatgggtggccattggtaaatgttaggaacacaccaggtcacctgacatcccaagaatgctcacaaacctgcaggcatatcattggcgtatggcactcattaaaaaggatcagagaccattaaaagaggaccatacctattaaaaaaaaatgtggagttggagggctaacatatttaattaaataaataaataaatctgggtctgcatctcttattaaataaaaatataaaaatatgtacattacattttgcttattttcatataaaaggtaagacagagtttgcaaagcatttgtggctttttgtagtttacttaagccaaaatgtgtttttttccccttgatagcttcgctaatattttaaacagtcctgtaaaaaaccaaaaaggactttttgtatagaaagcactaccctaagccatgaagaactccatgctttgctaaccaagataactgttttctctttgtagaagttttgtttttgaaatgtgtatttctaattatataaaatattaagaatcttttaaaaaaatctgtgaaattaacatgcttgtgtatagctttctaatatatataatattatggtaatagcagaagttttgttatcttaatagcgggaggggggtatatttgtgcagttgcacatttgagtaactattttctttctgttttcttttactctgcttacattttataagtttaaggtcagctgtcaaaaggataacctgtggggttagaacatatcacattgcaacaccctaaattgtttttaatacattagcaatctattgggtcaactgacatccattgtatatactagtttctttcatgctatttttattttgttttttgcatttttatcaaatgcagggcccctttctgatctcaccatttcaccatgcatcttggaattcagtaagtgcatatcctaacttgcccatattctaaatcatctggttggttttcagcctagaatttgatacgctttttagaaatatgcccagaatagaaaagctatgttggggcacatgtcctgcaaatatggccctagaaacaagtgatatggaatttacttggtgaataagttataaattcccacagaagaaaaatgtgaaagactgggtgctagacaagaaggaagcaggtaaagggatagttgctttgtcatccgtttttaattattttaactgacccttgacaatcttgtcagcaatataggactgttgaacaatcccggtgtgtcaggacccccaaatgtcacttctgcataaagcatgtatgtcatctattttttcttcaataaagagatttaatagccatttcaagaaatcccataaagaacctctctatgtccctttttttaatttaaaaaaaatgactcttgtctaatattcgtctataagggattaattttcagaccctttaataagtgagtgccataagaaagtcaatatatattgtttaaaagatatttcagtctaggaaagattttccttctcttggaatgtgaagatctgtcgattcatctccaatcatatgcattgacatacacagcaaagaagatataggcagtaatatcaacactgctatatcatgtgtaggacatttcttatccattttttctcttttacttgcatagttgctatgtgtttctcattgtaaaaggctgccgctgggtggcagaagccaagagaccttattaactaggctatatttttcttaacttgatctgaaatccacaattagaccacaatgcacctttggttgtatccataaaggatgctagcctgccttgtactaatgttttatatattaaaaaaaaaaaatctatcaaccatttcatatatatcccactactcaaggtatccatggaacatgaaagaataacatttatgcagaggaaaaacaaaaacatccctgaaaatatacacactcatacacacacacgcacaggggaataaaataagaaaatcattttcctcaccatagacttgatcccatccttacaacccatccttctaacttgatgtgtataaaatatgcaaacatttcacaaatgttctttgtcatttcaaaatactttagtatatcaatatcagtagataccagtgggtgggaaagggtcattacatgaaaatatgaagaaatagccatattagttttttaacctgcaatttgcctcagcaacaaagaaaaagtgaatttttaatgctgaagataaagtaagctaaagtaccagcagaagccttggctatttatagcagttctgacaatagttttataagaacatgaagagaacagaatcacttgaaaatggatgccagtcatctcttgttcccactactgaattcttataaagtggtggcaagatagggaagggataatctgagaatttttaaaagatgatttaatgagaagaagcacaattttgattttgatgagtcactttctgtaaacaatcttggtctatctttacccttataccttatctgtaatttaccatttattgtatttgcaaagctagtatggtttttaatcacagtaaatcctttgtattccagactttagggcagagccctgagggagtattattttacataacccgtcctagagtaacattttaggcaacattcttcattgcaagtaaaagatccataagtggcattttacacggctgcgagtattgttatatctaatcctattttaaaagatttttggtaatatgaagcttgaatactggtaacagtgatgcaatatacgcaagctgcacaacctgtatattgtatgcattgctgcgtggaggctgtttatttcaacctttttaaaaattgtgttttttagtaaaatggcttattttttcccaaaggtggaatttagcattttgtaatgatgaatataaaaatacctgtcatccccagatcatttaaaagttaactaaagtgagaatgaaaaaacaaaattccaagacactttttaaaagaatgtctgccctcacacacttttatggatttgtttttcttacatacccatcttttaacttagagatagcattttttgccctctttattttgttgtttgtttctccagagagtaaacgctttgtagttctttctttaaaaaacattttttttaaagaagaagaagccacttgaaccctcaataaaggctgttgcctaagcatggcatacttcatctgttctcatttgtgccatctgccgtgatgtcgtcacttttatggcgttaatttcctgccactacagatcttttgaagattgctggaatactggtgtctgttagaatgcttcagactacagatgtaattaaaggcttttcttaatatgttttaaccaaagatgtggagcaatccaagccacatatcttctacatcaaatttttccattttggttattttcataatctggtattgcattttgccttccctgttcatacctcaaattgattcatacctcagtttaattcagagaggtcagttaagtgacggattctgttgtggtttgaatgcagtaccagtgttctcttcgagcaaagtagacctgggtcactgtaggcataggacttggattgcttcagatggtttgctgtatcatttttcttctttttcttttcctggggacttgtttccattaaatgagagtaattaaaatcgcttgtaaatgagggcatacaagcatttgcaacaaatattcaaatagaggctcacagcggcataagctggactttgtcgccactagatgacaagatgttataactaagttaaaccacatctgtgtatctcaagggacttaattcagctgtctgtagtgaataaaagtgggaaattttcaaaagtttctcctgctggaaataaggtataatttgtattttgcagacaattcagtaaagttactggctttcttagtgaaaaaaaaaaa

SEQ ID NO: 4042 - DNA, 6449 bp, Homo sapiens
  source 1..6449: mol_type = genomic DNA
gagctgttctccttttcccattcgtcttctgtcacttccttcctggacgcagttttctggacgagtctggttacttttaatccgaccggccgctgagagccactttctcctcctcctcctcctcctccttctcttcctcctccttcttcctcctcctcctcctcttccgagcggcctcggcgcgcgcgaatgcgcggccccgcgccccccccctcgcgcgcgctcccctcgcgcgcgcgcacacacgcacacatcgtctccagctctctgctcgctctgctcgcagtcacagacacttgagcacacgcgtacacccagacatcttcgggctgctattggattgactttgaaggttctgtgtgggtcgccgtggctgcatgtttgaatcaggtggagaagcacttcaacgctggacgaagtaaagattattgttgttattttttttttctctctctctctctcttaagaaaggaaaatatcccaaggactaatctgatcgggtcttccttcatcaggaacgaatgcaggaatttgggaactgagctgtgcaagtgctgaagaaggagatttgtttggaggaaacaggaaagagaaagaaaaggaaggaaaaaatacataatttcagggacgagagagagaagaaaaacggggactatggggagaaaaaagattcagattacgaggattatggatgaacgtaacagacaggtgacatttacaaagaggaaatttgggttgatgaagaaggcttatgagctgagcgtgctgtgtgactgtgagattgcgctgatcatcttcaacagcaccaacaagctgttccagtatgccagcaccgacatggacaaagtgcttctcaagtacacggagtacaacgagccgcatgagagccggacaaactcagacatcgtggagacgttgagaaagaagggccttaatggctgtgacagcccagaccccgatgcggacgattccgtaggtcacagccctgagtctgaggacaagtacaggaaaattaacgaagatattgatctaatgatcagcaggcaaagattgtgtgctgttccacctcccaacttcgagatgccagtctccatcccagtgtccagccacaacagtttggtgtacagcaaccctgtcagctcactgggaaaccccaacctattgccactggctcacccttctctgcagaggaatagtatgtctcctggtgtaacacatcgacctccaagtgcaggtaacacaggtggtctgatgggtggagacctcacgtctggtgcaggcaccagtgcagggaacgggtatggcaatccccgaaactcaccaggtctgctggtctcacctggtaacttgaacaagaatatgcaagcaaaatctcctcccccaatgaatttaggaatgaataaccgtaaaccagatctccgagttcttattccaccaggcagcaagaatacgatgccatcagtgtctgaggatgtcgacctgcttttgaatcaaaggataaataactcccagtcggctcagtcattggctaccccagtggtttccgtagcaactcctactttaccaggacaaggaatgggaggatatccatcagccatttcaacaacatatggtaccgagtactctctgagtagtgcagacctgtcatctctgtctgggtttaacaccgccagcgctcttcaccttggttcagtaactggctggcaacagcaacacctacataacatgccaccatctgccctcagtcagttgggagcttgcactagcactcatttatctcagagttcaaatctctccctgccttctactcaaagcctcaacatcaagtcagaacctgtttctcctcctagagaccgtaccaccaccccttcgagatacccacaacacacgcgccacgaggcggggagatctcctgttgacagcttgagcagctgtagcagttcgtacgacgggagcgaccgagaggatcaccggaacgaattccactcccccattggactcaccagaccttcgccggacgaaagggaaagtccctcagtcaagcgcatgcgactttctgaaggatgggcaacatgatcagattattacttactagtttttttttttttcttgcagtgtgtgtgtgtgctataccttaatggggaaggggggtcgatatgcattatatgtgccgtgtgtggaaaaaaaaaaagtcaggtactctgttttgtaaaagtacttttaaattgcctcagtgatacagtataaagataaacagaaatgctgagataagcttagcacttgagttgtacaacagaacacttgtacaaaatagattttaaggctaacttcttttcactgttgtgctcctttgcaaaatgtatgttacaatagatagtgtcatgttgcaggttcaacgttatttacatgtaaatagacaaaaggaaacatttgccaaaagcggcagatctttactgaaagagagagcagctgttatgcaacatatagaaaaatgtatagatgcttggacagacccggtaatgggtggccattggtaaatgttaggaacacaccaggtcacctgacatcccaagaatgctcacaaacctgcaggcatatcattggcgtatggcactcattaaaaaggatcagagaccattaaaagaggaccatacctattaaaaaaaaatgtggagttggagggctaacatatttaattaaataaataaataaatctgggtctgcatctcttattaaataaaaatataaaaatatgtacattacattttgcttattttcatataaaaggtaagacagagtttgcaaagcatttgtggctttttgtagtttacttaagccaaaatgtgtttttttccccttgatagcttcgctaatattttaaacagtcctgtaaaaaaccaaaaaggactttttgtatagaaagcactaccctaagccatgaagaactccatgctttgctaaccaagataactgttttctctttgtagaagttttgtttttgaaatgtgtatttctaattatataaaatattaagaatcttttaaaaaaatctgtgaaattaacatgcttgtgtatagctttctaatatatataatattatggtaatagcagaagttttgttatcttaatagcgggaggggggtatatttgtgcagttgcacatttgagtaactattttctttctgttttcttttactctgcttacattttataagtttaaggtcagctgtcaaaaggataacctgtggggttagaacatatcacattgcaacaccctaaattgtttttaatacattagcaatctattgggtcaactgacatccattgtatatactagtttctttcatgctatttttattttgttttttgcatttttatcaaatgcagggcccctttctgatctcaccatttcaccatgcatcttggaattcagtaagtgcatatcctaacttgcccatattctaaatcatctggttggttttcagcctagaatttgatacgctttttagaaatatgcccagaatagaaaagctatgttggggcacatgtcctgcaaatatggccctagaaacaagtgatatggaatttacttggtgaataagttataaattcccacagaagaaaaatgtgaaagactgggtgctagacaagaaggaagcaggtaaagggatagttgctttgtcatccgtttttaattattttaactgacccttgacaatcttgtcagcaatataggactgttgaacaatcccggtgtgtcaggacccccaaatgtcacttctgcataaagcatgtatgtcatctattttttcttcaataaagagatttaatagccatttcaagaaatcccataaagaacctctctatgtccctttttttaatttaaaaaaaatgactcttgtctaatattcgtctataagggattaattttcagaccctttaataagtgagtgccataagaaagtcaatatatattgtttaaaagatatttcagtctaggaaagattttccttctcttggaatgtgaagatctgtcgattcatctccaatcatatgcattgacatacacagcaaagaagatataggcagtaatatcaacactgctatatcatgtgtaggacatttcttatccattttttctcttttacttgcatagttgctatgtgtttctcattgtaaaaggctgccgctgggtggcagaagccaagagaccttattaactaggctatatttttcttaacttgatctgaaatccacaattagaccacaatgcacctttggttgtatccataaaggatgctagcctgccttgtactaatgttttatatattaaaaaaaaaaaatctatcaaccatttcatatatatcccactactcaaggtatccatggaacatgaaagaataacatttatgcagaggaaaaacaaaaacatccctgaaaatatacacactcatacacacacacgcacaggggaataaaataagaaaatcattttcctcaccatagacttgatcccatccttacaacccatccttctaacttgatgtgtataaaatatgcaaacatttcacaaatgttctttgtcatttcaaaatactttagtatatcaatatcagtagataccagtgggtgggaaagggtcattacatgaaaatatgaagaaatagccatattagttttttaacctgcaatttgcctcagcaacaaagaaaaagtgaatttttaatgctgaagataaagtaagctaaagtaccagcagaagccttggctatttatagcagttctgacaatagttttataagaacatgaagagaacagaatcacttgaaaatggatgccagtcatctcttgttcccactactgaattcttataaagtggtggcaagatagggaagggataatctgagaatttttaaaagatgatttaatgagaagaagcacaattttgattttgatgagtcactttctgtaaacaatcttggtctatctttacccttataccttatctgtaatttaccatttattgtatttgcaaagctagtatggtttttaatcacagtaaatcctttgtattccagactttagggcagagccctgagggagtattattttacataacccgtcctagagtaacattttaggcaacattcttcattgcaagtaaaagatccataagtggcattttacacggctgcgagtattgttatatctaatcctattttaaaagatttttggtaatatgaagcttgaatactggtaacagtgatgcaatatacgcaagctgcacaacctgtatattgtatgcattgctgcgtggaggctgtttatttcaacctttttaaaaattgtgttttttagtaaaatggcttattttttcccaaaggtggaatttagcattttgtaatgatgaatataaaaatacctgtcatccccagatcatttaaaagttaactaaagtgagaatgaaaaaacaaaattccaagacactttttaaaagaatgtctgccctcacacacttttatggatttgtttttcttacatacccatcttttaacttagagatagcattttttgccctctttattttgttgtttgtttctccagagagtaaacgctttgtagttctttctttaaaaaacattttttttaaagaagaagaagccacttgaaccctcaataaaggctgttgcctaagcatggcatacttcatctgttctcatttgtgccatctgccgtgatgtcgtcacttttatggcgttaatttcctgccactacagatcttttgaagattgctggaatactggtgtctgttagaatgcttcagactacagatgtaattaaaggcttttcttaatatgttttaaccaaagatgtggagcaatccaagccacatatcttctacatcaaatttttccattttggttattttcataatctggtattgcattttgccttccctgttcatacctcaaattgattcatacctcagtttaattcagagaggtcagttaagtgacggattctgttgtggtttgaatgcagtaccagtgttctcttcgagcaaagtagacctgggtcactgtaggcataggacttggattgcttcagatggtttgctgtatcatttttcttctttttcttttcctggggacttgtttccattaaatgagagtaattaaaatcgcttgtaaatgagggcatacaagcatttgcaacaaatattcaaatagaggctcacagcggcataagctggactttgtcgccactagatgacaagatgttataactaagttaaaccacatctgtgtatctcaagggacttaattcagctgtctgtagtgaataaaagtgggaaattttcaaaagtttctcctgctggaaataaggtataatttgtattttgcagacaattcagtaaagttactggctttcttagtgaaaaaaaaaaa

SEQ ID NO: 4043 - DNA, 1141 bp, Homo sapiens
  source 1..1141: mol_type = genomic DNA
ccacactcagtctggcctcggggcctttgcactggctgtgtcccctgcctgtgatgccattctcctctgcctggccaactcctacgtttattcaagtctggaccttgtcatcggctcctcaggaaggcactccgggacccccagatgggggcggttccctgtgactcctggcacggaggccaaccccttccttgttcaatggttccttgagggaccattcccatgtgattatcgaccattcggcaggcgttcaaagtcaaaggccccacactgagtcctggcccagcgccctgtgcccgttggctgctggagggacagacggggcgtgcggctgaccatcccgtgcccgcaggctgaggatgcagcgctggaaggcggcggccttggcctcagtgctctgcagctccgtgctgtccatctggatgtgtcgagagggcctgcttctcagccaccgcctcggacctgcgctggtccccctgcaccgcctgcctcgaaccctggacgcccggattgcccgcctggcccagtaccgtgcactcctgcagggggccccggatgcgatggagctgcgcgagctgacgccctgggctgggcggcccccaggtccgcgccgtcgggcggggccccggcggcggcgcgcgcgtgcgcggttgggggcgcggccttgcgggctgcgcgagctggaggtgcgcgtgagcgagctgggcctgggctacgcgtccgacgagacggtgctgttccgctactgcgcaggcgcctgcgaggctgccgcgcgcgtctacgacctcgggctgcgacgactgcgccagcggcggcgcctgcggcgggagcgggtgcgcgcgcagccctgctgccgcccgacggcctacgaggacgaggtgtccttcctggacgcgcacagccgctaccacacggtgcacgagctgtcggcgcgcgagtgcgcctgcgtgtgaccctacctcactcggccggcgcggcggccactccccccgcctcgacggcaccactggccggccccgcgaaagactgcgcgtgcgtagagcacgccggcgcggccccgggactctcgcgataactgtactgagataaagtgtggcaactcgaaaaaaaaaaaaaaaaaaaaaaaaaaaaaaaaaaaaaa

SEQ ID NO: 4044 - DNA, 1911 bp, Homo sapiens
  source 1..1911: mol_type = genomic DNA
cctcgcacgcactgcgggctccggcgctgcgggctggccgggcgctgcgggctgaccgggcgctccgggaactcggctcgggaacctcgtctgcggtgggcggggccggcccggagccccgccccggctcagtccctgaaacccaggcgcggaccggctgcagtctcagaagggagctgctgtctgcggaggaaactgcatcgacggacggccgcccagctacgggaggacctggagtggcactgggcgcccgacggaccatccccgggacccgcctgcccctcggcgccccgccccgccgggccgctccccgtcgggttccccagccacagccttacctacgggctcctgactccgcaaggcttccagaagatgctcgaaccaccggccggggcctcggggcagcagtgagggaggcgtccagccccccactcagctcttctcctcctgtgccaggggctccccgggggatgagcatggtggttttccctcggagccccctggctcgggacgtctgagaagatgccggtcatgaggctgttcccttgcttcctgcagctcctggccgggctggcgctgcctgctgtgcccccccagcagtgggccttgtctgctgggaacggctcgtcagaggtggaagtggtacccttccaggaagtgtggggccgcagctactgccgggcgctggagaggctggtggacgtcgtgtccgagtaccccagcgaggtggagcacatgttcagcccatcctgtgtctccctgctgcgctgcaccggctgctgcggcgatgagaatctgcactgtgtgccggtggagacggccaatgtcaccatgcagctcctaaagatccgttctggggaccggccctcctacgtggagctgacgttctctcagcacgttcgctgcgaatgccggcctctgcgggagaagatgaagccggaaaggaggagacccaagggcagggggaagaggaggagagagaagcagagacccacagactgccacctgtgcggcgatgctgttccccggaggtaacccaccccttggaggagagagaccccgcacccggctcgtgtatttattaccgtcacactcttcagtgactcctgctggtacctgccctctatttattagccaactgtttccctgctgaatgcctcgctcccttcaagacgaggggcagggaaggacaggaccctcaggaattcagtgccttcaacaacgtgagagaaagagagaagccagccacagacccctgggagcttccgctttgaaagaagcaagacacgtggcctcgtgaggggcaagctaggccccagaggccctggaggtctccaggggcctgcagaaggaaagaagggggccctgctacctgttcttgggcctcaggctctgcacagacaagcagcccttgctttcggagctcctgtccaaagtagggatgcggatcctgctggggccgccacggcctggctggtgggaaggccggcagcgggcggaggggatccagccacttccccctcttcttctgaagatcagaacattcagctctggagaacagtggttgcctgggggcttttgccactccttgtcccccgtgatctcccctcacactttgccatttgcttgtactgggacattgttctttccggccaaggtgccaccaccctgccccccctaagagacacatacagagtgggccccgggctggagaaagagctgcctggatgagaaacagctcagccagtggggatgaggtcaccaggggaggagcctgtgcgtcccagctgaaggcagtggcaggggagcaggttccccaagggccctggcacccccacaagctgtccctgcagggccatctgactgccaagccagattctcttgaataaagtattctagtgtggaaacgct

SEQ ID NO: 4045 - DNA, 2608 bp, Homo sapiens
  source 1..2608: mol_type = genomic DNA
tccttcttcattctgcagttggtgccagaactctggatcctgaactggaagaaaatgtctatccaggttgagcatcctgctggtggttacaagaaactgtttgaaactgtggaggaactgtcctcgccgctcacagctcatgtaacaggcaggatccccctctggctcaccggcagtctccttcgatgtgggccaggactctttgaagttggatctgagccattttaccacctgtttgatgggcaagccctcctgcacaagtttgactttaaagaaggacatgtcacataccacagaaggttcatccgcactgatgcttacgtacgggcaatgactgagaaaaggatcgtcataacagaatttggcacctgtgctttcccagatccctgcaagaatatattttccaggtttttttcttactttcgaggagtagaggttactgacaatgcccttgttaatgtctacccagtgggggaagattactacgcttgcacagagaccaactttattacaaagattaatccagagaccttggagacaattaagcaggttgatctttgcaactatgtctctgtcaatggggccactgctcacccccacattgaaaatgatggaaccgtttacaatattggtaattgctttggaaaaaatttttcaattgcctacaacattgtaaagatcccaccactgcaagcagacaaggaagatccaataagcaagtcagagatcgttgtacaattcccctgcagtgaccgattcaagccatcttacgttcatagttttggtctgactcccaactatatcgtttttgtggagacaccagtcaaaattaacctgttcaagttcctttcttcatggagtctttggggagccaactacatggattgttttgagtccaatgaaaccatgggggtttggcttcatattgctgacaaaaaaaggaaaaagtacctcaataataaatacagaacttctcctttcaacctcttccatcacatcaacacctatgaagacaatgggtttctgattgtggatctctgctgctggaaaggatttgagtttgtttataattacttatatttagccaatttacgtgagaactgggaagaggtgaaaaaaaatgccagaaaggctccccaacctgaagttaggagatatgtacttcctttgaatattgacaaggctgacacaggcaagaatttagtcacgctccccaatacaactgccactgcaattctgtgcagtgacgagactatctggctggagcctgaagttctcttttcagggcctcgtcaagcatttgagtttcctcaaatcaattaccagaagtattgtgggaaaccttacacatatgcgtatggacttggcttgaatcactttgttccagataggctctgtaagctgaatgtcaaaactaaagaaacttgggtttggcaagagcctgattcatacccatcagaacccatctttgtttctcacccagatgccttggaagaagatgatggtgtagttctgagtgtggtggtgagcccaggagcaggacaaaagcctgcttatctcctgattctgaatgccaaggacttaagtgaagttgcccgggctgaagtggagattaacatccctgtcacctttcatggactgttcaaaaaatcttgagcatactccagcaagatatgtttttggtagcaaaactgagaaaatcagcttcaggtctgcaatcaaattctgttcaattttagcctgctatatgtcatggttttaacttgcagatgcgcacaattttgcaatgttttacagaaagcactgagttgagcaagcaattcctttatttaaaaaaaaaagtacgtatttagataatcatacttcctctgtgagacaggccataactgaaaaactcttaaatatttagcaatcaaataggaaatgaatgtggacttactaaatggcttttaattcctattataagagcatattttaggtacctatctgctccaattatatttttaacatttaaaaaccaaagtcctctacacttgatttatattatatgtggctttgctgagtcaaggaagtatcatgcaataaggcttaattactaaatgtcaaaccaaactttttctcaaaccagggactatcatctaagattaattacagtaattattttgcgtatacgtaactgctcaaagattatgaatcttatgaatgttaacctttccgtttattacaagcaagtactattatttctgattttataataagaaaatctgtgtttaatcaactgaggcctctcaaccaaataacatctcagagattaagttatatattaaaagcttatgtaacataaaagcaagtacatatagtagtgactatatttaaaaaaacagcataaaatgcttaaaaatgtaatatttactaaaatcagattatgggataatgttgcaggattatactttattgcatcttttttgtttaattgtatttaagcattgtgcaatcacttgggaaaaatattaaattattaacattgaggtattaatacattttaagccttttgtttttaaatttcttttcttccagagattgtttaaaaataaatattgacaaaaat

SEQ ID NO: 4046 - DNA, 3810 bp, Homo sapiens
  source 1..3810: mol_type = genomic DNA
ccgcctccagcgcgcccttgctgccccgcgcgaccccaggattgcgaactcttgcccctgacctgttgggcggggctccgcgctccagccatcagcccggatgggtctcctggctgggacttggggcacctggagttaatgtccaacctagggtctgcggagacccgatccgaggtgccgccgccggacgggactttaagatgaagttatgggatgtcgtggctgtctgcctggtgctgctccacaccgcgtccgccttcccgctgcccgccggtaagaggcctcccgaggcgcccgccgaagaccgctccctcggccgccgccgcgcgcccttcgcgctgagcagtgactcaaatatgccagaggattatcctgatcagttcgatgatgtcatggattttattcaagccaccattaaaagactgaaaaggtcaccagataaacaaatggcagtgcttcctagaagagagcggaatcggcaggctgcagctgccaacccagagaattccagaggaaaaggtcggagaggccagaggggcaaaaaccggggttgtgtcttaactgcaatacatttaaatgtcactgacttgggtctgggctatgaaaccaaggaggaactgatttttaggtactgcagcggctcttgcgatgcagctgagacaacgtacgacaaaatattgaaaaacttatccagaaatagaaggctggtgagtgacaaagtagggcaggcatgttgcagacccatcgcctttgatgatgacctgtcgtttttagatgataacctggtttaccatattctaagaaagcattccgctaaaaggtgtggatgtatctgactccggctccagagactgctgtgtattgcattcctgctacagtgcaaagaaagggaccaaggttcccaggaaatgtttgcccagaatggaagatgaggaccaaggaggcggaggaggaggaagaagaagaggaggaggaggaggaggaggaggaggaggaggaaggcagccatcatgggagcctggtagagggagatccagctacagacaactggacaggagagagagaaaacagccctctggattctccaggatggcagccgatgtcactagaagctcagggctgatgttcctggttggctattgccaccatttcagctgatacagtccaccatcactgattaccggcgcggttgcggtggatgcacttgaaccaaaccagtgtatctcctgtgatttgttttcatgtgtccgaagacaccagggaaacagagatcctggtgttgttccttgttattacgttttactgctgaaagtaagaggtttatttttctgtcactcagtggagacataccctggaaaggagaggggaaaaaaaaagcaaagatacaagagataatcacctttgcatttgaaagttgaggcccgaggtttactacaaccagcatttttgccaacggttggtgattgatttccatcacggtgtgtggggtgggaagaagttggctaggaaccaaaaaggctgtgctcatgattaaacacaaacctgaaggtatttcctttatgtccttggaaacaggaaacgagttgtggttttcgccagcattcttgtaggagagaatcggggaaggccccgaactgcccccgggcagggagagcccctcaggcctgttggtttacagagagacagatgttacataaccagctccgttgatgcgtggtcaccagtgaccagagaagctactcgatgcaatgcatctgtttcagatacagaaatatagagaagatatttattgaaatttaagttattgttatttattaccgttcactaatgaatttctcttttttcccttatttattaaagtttcttttcaaaggtgccaaagtatatgtgctcgcaaaatgcaaagaaaggtgacaaaaggaaatttgaattgggaacaagggtccatgcttttcaaagtattaaaaagttttttgccaggcaaaaatcacttactttacctttttaagaaaatttgtcattaattttccccagatttcagcatttttcccaatttttatttgtggagcatctcaggcaagccccctttcctggagcagcgtgcagagaccactggcacttgactttatttcttccttgctccattgctgaacagaaatgtcgtgggctccacttcctgttgtctttaagctcttagtcccctccacgtatacctatctgtactatgcataaccatatgtagaaaaggttcagttccttttagtaggtagtcctggatttaatgctgacctaaaagtaatgtcgacaatgctgtcaggtagctgccgttctaccgactccctccatccctgcccacccactgccctcccgagaatatgctggctgcccagtgcagcccgggagacacaggggccttccagaggtagggtctaccaggtcctgtacaacccctgggctgtcaccgggggtcaacagctgctgctcctatatacccaaacacctgacagctccctggggagcagatggctgagaagggtgctgaggaagccatattgggaccagccacagccacacacatggagcctcatacttaggagcgtgctgcctttaaatgaaggtggtcggggccagtgcagcggctcacacccataatcccaacactttggaaagccaaggtgggaggatctcttgaacccaggagtttgagaccagcttgggcaacatagggagaccctgtctctacagaaactttaaaaattaggcaggcatgatggtgcacacctgtggtcccagctactcaagaggctgaaggaggatcacttgagtccagaaggtcgaggctgcagtgagctgtgatcatgccactgcactccagcctaagtgacagtgcggtaccctgtctcaaaaaaaaaaaaaaaaaaaaaaagaggttggagcaggaggaagcataggggcgggaacagccacctcctccatgccctagattgtgaatttatcgggcagccaacacatgtatgacacactaggccctgtattacagcttgttacgcatttcataaaagggattttcattaaggagataatctattactacctaccttagtggctactagtataaaactatgacagatttagcaattaaatgaaatactggcctccatcaaataatcatagtaacaagaagcagcagttaccagacatctgatccccttcccccaaaatacccaaattcttcatggttctgcccttctctgtcctttctgctccccttgctcgcctgggaaatggaggaaaggccttccctctcacactgtcttgggatcttgctgagaattcagactgctcgaaacagtgacaaaccccagccatccagtcattcgtggagcacaatttggatgtggccccaggggcatctgtcccattcagagaaccttggcagtgcgatggccactgttcccaggcttcaacctcagtgaccccccccaacaactccccatggagagtccctgcccaaaaaagctgtaggatccaaggggtgtcaatagctcgttcccggcatcacctacacaccacaagcaggttttaatggaagcaagttgctccaccaaatccacaaaagggtaaagtttgtgatttttctttatcattgcgatcaccatctgataccgtaaggagtgcacttgtttggaagttctgacttctctgatctgtcttggtcgtttgtgttataaaaccaaagttctctacagactttatttttgtacaatatcattttgtaactttttacaaataaaaactcatttctattgc

SEQ ID NO: 4047 - DNA, 3655 bp, Homo sapiens
  source 1..3655: mol_type = genomic DNA
catacaggccaaaagtctccaagtccctgctaacttcttgctctcgcaacagaatacctatttaggtgggaagaatgaggtgtgggcggcaggctgggtgccgccgccggacgggactttaagatgaagttatgggatgtcgtggctgtctgcctggtgctgctccacaccgcgtccgccttcccgctgcccgccgcaaatatgccagaggattatcctgatcagttcgatgatgtcatggattttattcaagccaccattaaaagactgaaaaggtcaccagataaacaaatggcagtgcttcctagaagagagcggaatcggcaggctgcagctgccaacccagagaattccagaggaaaaggtcggagaggccagaggggcaaaaaccggggttgtgtcttaactgcaatacatttaaatgtcactgacttgggtctgggctatgaaaccaaggaggaactgatttttaggtactgcagcggctcttgcgatgcagctgagacaacgtacgacaaaatattgaaaaacttatccagaaatagaaggctggtgagtgacaaagtagggcaggcatgttgcagacccatcgcctttgatgatgacctgtcgtttttagatgataacctggtttaccatattctaagaaagcattccgctaaaaggtgtggatgtatctgactccggctccagagactgctgtgtattgcattcctgctacagtgcaaagaaagggaccaaggttcccaggaaatgtttgcccagaatggaagatgaggaccaaggaggcggaggaggaggaagaagaagaggaggaggaggaggaggaggaggaggaggaggaaggcagccatcatgggagcctggtagagggagatccagctacagacaactggacaggagagagagaaaacagccctctggattctccaggatggcagccgatgtcactagaagctcagggctgatgttcctggttggctattgccaccatttcagctgatacagtccaccatcactgattaccggcgcggttgcggtggatgcacttgaaccaaaccagtgtatctcctgtgatttgttttcatgtgtccgaagacaccagggaaacagagatcctggtgttgttccttgttattacgttttactgctgaaagtaagaggtttatttttctgtcactcagtggagacataccctggaaaggagaggggaaaaaaaaagcaaagatacaagagataatcacctttgcatttgaaagttgaggcccgaggtttactacaaccagcatttttgccaacggttggtgattgatttccatcacggtgtgtggggtgggaagaagttggctaggaaccaaaaaggctgtgctcatgattaaacacaaacctgaaggtatttcctttatgtccttggaaacaggaaacgagttgtggttttcgccagcattcttgtaggagagaatcggggaaggccccgaactgcccccgggcagggagagcccctcaggcctgttggtttacagagagacagatgttacataaccagctccgttgatgcgtggtcaccagtgaccagagaagctactcgatgcaatgcatctgtttcagatacagaaatatagagaagatatttattgaaatttaagttattgttatttattaccgttcactaatgaatttctcttttttcccttatttattaaagtttcttttcaaaggtgccaaagtatatgtgctcgcaaaatgcaaagaaaggtgacaaaaggaaatttgaattgggaacaagggtccatgcttttcaaagtattaaaaagttttttgccaggcaaaaatcacttactttacctttttaagaaaatttgtcattaattttccccagatttcagcatttttcccaatttttatttgtggagcatctcaggcaagccccctttcctggagcagcgtgcagagaccactggcacttgactttatttcttccttgctccattgctgaacagaaatgtcgtgggctccacttcctgttgtctttaagctcttagtcccctccacgtatacctatctgtactatgcataaccatatgtagaaaaggttcagttccttttagtaggtagtcctggatttaatgctgacctaaaagtaatgtcgacaatgctgtcaggtagctgccgttctaccgactccctccatccctgcccacccactgccctcccgagaatatgctggctgcccagtgcagcccgggagacacaggggccttccagaggtagggtctaccaggtcctgtacaacccctgggctgtcaccgggggtcaacagctgctgctcctatatacccaaacacctgacagctccctggggagcagatggctgagaagggtgctgaggaagccatattgggaccagccacagccacacacatggagcctcatacttaggagcgtgctgcctttaaatgaaggtggtcggggccagtgcagcggctcacacccataatcccaacactttggaaagccaaggtgggaggatctcttgaacccaggagtttgagaccagcttgggcaacatagggagaccctgtctctacagaaactttaaaaattaggcaggcatgatggtgcacacctgtggtcccagctactcaagaggctgaaggaggatcacttgagtccagaaggtcgaggctgcagtgagctgtgatcatgccactgcactccagcctaagtgacagtgcggtaccctgtctcaaaaaaaaaaaaaaaaaaaaaaagaggttggagcaggaggaagcataggggcgggaacagccacctcctccatgccctagattgtgaatttatcgggcagccaacacatgtatgacacactaggccctgtattacagcttgttacgcatttcataaaagggattttcattaaggagataatctattactacctaccttagtggctactagtataaaactatgacagatttagcaattaaatgaaatactggcctccatcaaataatcatagtaacaagaagcagcagttaccagacatctgatccccttcccccaaaatacccaaattcttcatggttctgcccttctctgtcctttctgctccccttgctcgcctgggaaatggaggaaaggccttccctctcacactgtcttgggatcttgctgagaattcagactgctcgaaacagtgacaaaccccagccatccagtcattcgtggagcacaatttggatgtggccccaggggcatctgtcccattcagagaaccttggcagtgcgatggccactgttcccaggcttcaacctcagtgaccccccccaacaactccccatggagagtccctgcccaaaaaagctgtaggatccaaggggtgtcaatagctcgttcccggcatcacctacacaccacaagcaggttttaatggaagcaagttgctccaccaaatccacaaaagggtaaagtttgtgatttttctttatcattgcgatcaccatctgataccgtaaggagtgcacttgtttggaagttctgacttctctgatctgtcttggtcgtttgtgttataaaaccaaagttctctacagactttatttttgtacaatatcattttgtaactttttacaaataaaaactcatttctattgc

SEQ ID NO: 4048 - DNA, 4354 bp, Homo sapiens
  source 1..4354: mol_type = genomic DNA
aaggcacagtcataaatacagagggttttcagaaccacctcagagaagatgtttaaatcgctgacaaaagtcaacaaggtgaagcctataggagagaacaatgagaatgaacaaagttctcgtcggaatgaagaaggctctcacccaagtaatcagtctcagcaaaccacagcacaggaagaaaacaaaggtgaagagaaatctctcaaaaccaagtcaactccagtcacgtctgaagagccacacaccaacatacaagacaaactctccaagaaaaattcctctggagatctgaccacaaaccctgaccctcaaaatgcagcagaaccaactggaacagtgccagagcagaaggaaatggaccccgggaaagaaggtccaaacagcccacaaaacaaaccgcctgcagctcctgttataaatgagtatgccgatgcccagctacacaacctggtgaaaagaatgcgtcaaagaacagccctctacaagaaaaagttggtagagggagatctctcctcacccgaagccagcccacaaactgcaaagcccacggctgtaccaccagtaaaagaaagcgatgataagccaacagaacattactacaggctgttgtggttcaaagtcaaaaagatgcctttaacagagtacttaaagcgaattaaacttccaaacagcatagattcatacacagatcgactctatctcctgtggctcttgcttgtcactcttgcctataactggaactgctgttttataccactgcgcctcgtcttcccatatcaaaccgcagacaacatacactactggcttattgcggacatcatatgtgatatcatctacctttatgatatgctatttatccagcccagactccagtttgtaagaggaggagacataatagtggattcaaatgagctaaggaaacactacaggacttctacaaaatttcagttggatgtcgcatcaataataccatttgatatttgctacctcttctttgggtttaatccaatgtttagagcaaataggatgttaaagtacacttcattttttgaatttaatcatcacctagagtctataatggacaaagcatatatctacagagttattcgaacaactggatacttgctgtttattctgcacattaatgcctgtgtttattactgggcttcaaactatgaaggaattggcactactagatgggtgtatgatggggaaggaaacgagtatctgagatgttattattgggcagttcgaactttaattaccattggtggccttccagaaccacaaactttatttgaaattgtttttcaactcttgaattttttttctggagtttttgtgttctccagtttaattggtcagatgagagatgtgattggagcagctacagccaatcagaactacttccgcgcctgcatggatgacaccattgcctacatgaacaattactccattcctaaacttgtgcaaaagcgagttcggacttggtatgaatatacatgggactctcaaagaatgctagatgagtctgatttgcttaagaccctaccaactacggtccagttagccctcgccattgatgtgaacttcagcatcatcagcaaagtcgacttgttcaagggttgtgatacacagatgatttatgacatgttgctaagattgaaatccgttctctatttgcctggtgactttgtctgcaaaaagggagaaattggcaaggaaatgtatatcatcaagcatggagaagtccaagttcttggaggccctgatggtactaaagttctggttactctgaaagctgggtcggtgtttggagaaatcagccttctagcagcaggaggaggaaaccgtcgaactgccaatgtggtggcccacgggtttgccaatcttttaactctagacaaaaagaccctccaagaaattctagtgcattatccagattctgaaaggatcctcatgaagaaagccagagtgcttttaaagcagaaggctaagaccgcagaagcaacccctccaagaaaagatcttgccctcctcttcccaccgaaagaagagacacccaaactgtttaaaactctcctaggaggcacaggaaaagcaagtcttgcaagactactcaaattgaagcgagagcaagcagctcagaagaaagaaaattctgaaggaggagaggaagaaggaaaagaaaatgaagataaacaaaaagaaaatgaagataaacaaaaagaaaatgaagataaaggaaaagaaaatgaagataaagataaaggaagagagccagaagagaagccactggacagacctgaatgtacagcaagtcctattgcagtggaggaagaaccccactcagttagaaggacagttttacccagagggacttctcgtcaatcactcattatcagcatggctccttctgctgagggcggagaagaggttcttactattgaagtcaaagaaaaggctaagcaataaatgtttgattatctttagatgtgatatagctagttcccaaagtgattgtacctaggattgtaacttaaattaacgaggggaaacgacatgctgggacccttgagaaacgaaaggcaaatccctagcttagtttctaggacttatctgagagtgtgatttcatgcagtggtaataagaagattattaaaagccatccctattctccgttttcattaactttatgcaattgctatatcttctaattgtatgtagtaagtttccttttcctttggttctttcctgatgatgtctcttccttccagttttattagcttgctcttggctgtgatgtgattcactaaccttttctcttaatttttattgtgtttaatttcttctttggcactctaaagcctggctaattgttctaggtttatgaatttcacctcttacatgtaaagggtataagattttaatgtaataggtcaaaaatcagattattttcattcaaatgaggatgatgagtcactgtaatatcaaaaaatccccagcagctgggactgaagggaagcagagatcatgaagctttctgaatgagaagtctgatttttggaacagtcccctgaagaccaatgttggtcggcagaattagcaaactggcaaaatcacattgcaggaacatattggaaaaattgtaccctttactaaagaaataaacttcaatattttctcttctaaccaacttaaaagacaccaatctacctaactcatctggctcaagggacttggactggaggatacaggctaaagtgacacttatcagaatcttcctcaagcacttgctggaaaagatatcagattggaacttcttgtttaaaattaagctttagtaaaacaaagtgatgaggttaggaaggcagactctacacatgtcagattgacatatccccacaatttccggaacctacatgtatagctgtttacaaaatctccaagttaattaagggcactttaggaagttgtcctcatgaattagctagcattagcataattaccgacgttgcatgctgtgaggaggctacaaaggccaggctggtgtcggaagtaataatacatatagaattccattctaataaatgccattagtgtataacatcaagttctgtgtaatgaggctatttccaagtctccaaagatggtcactgtaacagcactttgctgagagggttttaacaaatcatattagccaaaaagcctacaacatagatgcatttagcaaaccatgtacaaatcaatcactataataaactgcatcatttgatagagtcaccgtttttgcatgtagtgttagagtatcacaaaatataacaagttttactaaaggatggttggttttttcaggatttaagggaatatggacaaattgttaaatagtatttatttgataaatgggagtttgtatgcagaaagagtgaattgcgtataaaaagggtgatttaaaaacccagaaacaaaaggtagaatagggctgaagcatctgataataggaaaagaaaaggacaaaagtcctcaacttgtgagcaatatgctttccctttacaccctgtaatttattcaaatgatattaaaatacaagaccattgcaatttatgcttttcgcctggcagttattttcccccccaagctatcctgtttcagataatatcaatttatttccaatccatcagactaaaatctaagaaaattcaagaactcttttattgttgatttggtgccaccaaattctttttctttttaaatctttctaattatcctttctttttcaatcccattgctaacacccagaacatattttctgttcaatgcaaataaacattcactttttacctaaaaaaaa

SEQ ID NO: 4049 - DNA, 4521 bp, Homo sapiens
  source 1..4521: mol_type = genomic DNA
cacacacacacacacacacagagagaacatctctagtaaaaagaaaagttgagctttcttagctagatgtgtgtattagccagaaaaagccaaggagtgaagggttttagagaactggaggagataaagtggagtctgcatatgggaggcatttgaaatggacttaaatgtctttttaatgctgactttttcagttttctccttaccagacacattgttttcatgacattagccccaggcatagacacatcattaaaatgaacatgtcaaaaaatgatttctgtttagaaataagcaaaacattttcagttgtgaccacccaggtgtagaataaagaacagtggaattgggagccctgagttctaacataaactttcttcatgacataaggcaagtcttctatggcctttggtttccttacctgtaaaacaggatggctcaatgaaattatctttcttctttgctataatagagtatctctgtgggaagaggaaaaaaaaagtcaatttaaaggctccttatagttccccaactgctgttttattgtgctattcatgcctagacatcacatagctagaaaggcccatcagacccctcaggccactgctgttcctgtcacacattcctgcaaaggaccatgttgctaacttgaaaaaaattactattaattacacttgcagttgttgcttagtaacatttatgattttgtgtttctcgtgacagcatgagcagagatcattaaaaattaaacttacaaagctgctaaagtgggaagaaggagaacttgaagccacaatttttgcacttgcttagaagccatctaatctcagttccaccaggtgagaagagtgatgaccatccttttccttactatggttatttcatactttggttgcatgaaggctgcccccatgaaagaagcaaacatccgaggacaaggtggcttggcctacccaggtgtgcggacccatgggactctggagagcgtgaatgggcccaaggcaggttcaagaggcttgacatcattggctgacactttcgaacacgtgatagaagagctgttggatgaggaccagaaagttcggcccaatgaagaaaacaataaggacgcagacttgtacacgtccagggtgatgctcagtagtcaagtgcctttggagcctcctcttctctttctgctggaggaatacaaaaattacctagatgctgcaaacatgtccatgagggtccggcgccactctgaccctgcccgccgaggggagctgagcgtgtgtgacagtattagtgagtgggtaacggcggcagacaaaaagactgcagtggacatgtcgggcgggacggtcacagtccttgaaaaggtccctgtatcaaaaggccaactgaagcaatacttctacgagaccaagtgcaatcccatgggttacacaaaagaaggctgcaggggcatagacaaaaggcattggaactcccagtgccgaactacccagtcgtacgtgcgggcccttaccatggatagcaaaaagagaattggctggcgattcataaggatagacacttcttgtgtatgtacattgaccattaaaaggggaagatagtggatttatgttgtatagattagattatattgagacaaaaattatctatttgtatatatacataacagggtaaattattcagttaagaaaaaaataattttatgaactgcatgtataaatgaagtttatacagtacagtggttctacaatctatttattggacatgtccatgaccagaagggaaacagtcatttgcgcacaacttaaaaagtctgcattacattccttgataatgttgtggtttgttgccgttgccaagaactgaaaacataaaaagttaaaaaaaataataaattgcatgctgctttaattgtgaattgataataaactgtcctctttcagaaaacagaaaaaaacacacacacacacaacaaaaatttgaaccaaaacattccgtttacattttagacagtaagtatcttcgttcttgttagtactatatctgttttactgcttttaacttctgatagcgttggaattaaaacaatgtcaaggtgctgttgtcattgctttactggcttaggggatgggggatggggggtatatttttgtttgttttgtgtttttttttcgtttgtttgttttgttttttagttcccacagggagtagagatggggaaagaattcctacaatatatattctggctgataaaagatacatttgtatgttgtgaagatgtttgcaatatcgatcagatgactagaaagtgaataaaaattaaggcaactgaacaaaaaaatgctcacactccacatcccgtgatgcacctcccaggccccgctcattctttgggcgttggtcagagtaagctgcttttgacggaaggacctatgtttgctcagaacacattctttccccccctccccctctggtctcctctttgttttgttttaaggaagaaaaatcagttgcgcgttctgaaatattttaccactgctgtgaacaagtgaacacattgtgtcacatcatgacactcgtataagcatggagaacagtgatttttttttagaacagaaaacaacaaaaaataaccccaaaatgaagattattttttatgaggagtgaacatttgggtaaatcatggctaagcttaaaaaaaactcatggtgaggcttaacaatgtcttgtaagcaaaaggtagagccctgtatcaacccagaaacacctagatcagaacaggaatccacattgccagtgacatgagactgaacagccaaatggaggctatgtggagttggcattgcatttaccggcagtgcgggaggaatttctgagtggccatcccaaggtctaggtggaggtggggcatggtatttgagacattccaaaacgaaggcctctgaaggacccttcagaggtggctctggaatgacatgtgtcaagctgcttggacctcgtgctttaagtgcctacattatctaactgtgctcaagaggttctcgactggaggaccacactcaagccgacttatgcccaccatcccacctctggataattttgcataaaattggattagcctggagcaggttgggagccaaatgtggcatttgtgatcatgagattgatgcaatgagatagaagatgtttgctacctgaacacttattgctttgaaactagacttgaggaaaccagggtttatcttttgagaacttttggtaagggaaaagggaacaggaaaagaaaccccaaactcaggccgaatgatcaaggggacccataggaaatcttgtccagagacaagacttcgggaaggtgtctggacattcagaacaccaagacttgaaggtgccttgctcaatggaagaggccaggacagagctgacaaaattttgctccccagtgaaggccacagcaaccttctgcccatcctgtctgttcatggagagggtccctgcctcacctctgccattttgggttaggagaagtcaagttgggagcctgaaatagtggttcttggaaaaatggatccccagtgaaaactagagctctaagcccattcagcccatttcacacctgaaaatgttagtgatcaccacttggaccagcatccttaagtatcagaaagccccaagcaattgctgcatcttagtagggtgagggataagcaaaagaggatgttcaccataacccaggaatgaagataccatcagcaaagaatttcaatttgttcagtctttcatttagagctagtctttcacagtaccatctgaatacctctttgaaagaaggaagactttacgtagtgtagatttgttttgtgttgtttgaaaatattatctttgtaattatttttaatatgtaaggaatgcttggaatatctgctatatgtcaactttatgcagcttccttttgagggacaaatttaaaacaaacaaccccccatcacaaacttaaaggattgcaagggccagatctgttaagtggtttcataggagacacatccagcaattgtgtggtcagtggctcttttacccaataagatacatcacagtcacatgcttgatggtttatgttgacctaagatttattttgttaaaatctctctctgttgtgttcgttcttgttctgttttgttttgttttttaaagtcttgctgtggtctctttgtggcagaagtgtttcatgcatggcagcaggcctgttgcttttttatggcgattcccattgaaaatgtaagtaaatgtctgtggccttgttctctctatggtaaagatattattcaccatgtaaaacaaaaaacaatatttattgtattttagtatatttatataattatgttattgaaaaaaattggcattaaaacttaaccgcatcagaacctattgtaaatacaagttctatttaagtgtactaattaacatataatatatgttttaaatatagaatttttaatgtttttaaatatattttcaaagtacataaaa

SEQ ID NO: 4050 - DNA, 4123 bp, Homo sapiens
  source 1..4123: mol_type = genomic DNA
agagctaaataatgtctgacccgggcgcaaggcgcagcctggagctccgggtccccgccgctgccgccgccgcgcccgggcgcacccgcccgctcgctgtcccgcgcaccccgtagcgcctcgggctcccgggccggacagaggagccagcccggtgcgcccctccacctcctgctcggggggctttaatgagacacccaccgctgctgtggggccggcggggagcagcaccgcgacggggaccggggctgggcgctggagccagaatcggaaccacgatgtgactccgccgccggggacccgtgaggtttgtgtggaccccgagcatgagcagagatcattaaaaattaaacttacaaagctgctaaagtgggaagaaggagaacttgaagccacaatttttgcacttgcttagaagccatctaatctcagttccaccaggtgagaagagtgatgaccatccttttccttactatggttatttcatactttggttgcatgaaggctgcccccatgaaagaagcaaacatccgaggacaaggtggcttggcctacccaggtgtgcggacccatgggactctggagagcgtgaatgggcccaaggcaggttcaagaggcttgacatcattggctgacactttcgaacacgtgatagaagagctgttggatgaggaccagaaagttcggcccaatgaagaaaacaataaggacgcagacttgtacacgtccagggtgatgctcagtagtcaagtgcctttggagcctcctcttctctttctgctggaggaatacaaaaattacctagatgctgcaaacatgtccatgagggtccggcgccactctgaccctgcccgccgaggggagctgagcgtgtgtgacagtattagtgagtgggtaacggcggcagacaaaaagactgcagtggacatgtcgggcgggacggtcacagtccttgaaaaggtccctgtatcaaaaggccaactgaagcaatacttctacgagaccaagtgcaatcccatgggttacacaaaagaaggctgcaggggcatagacaaaaggcattggaactcccagtgccgaactacccagtcgtacgtgcgggcccttaccatggatagcaaaaagagaattggctggcgattcataaggatagacacttcttgtgtatgtacattgaccattaaaaggggaagatagtggatttatgttgtatagattagattatattgagacaaaaattatctatttgtatatatacataacagggtaaattattcagttaagaaaaaaataattttatgaactgcatgtataaatgaagtttatacagtacagtggttctacaatctatttattggacatgtccatgaccagaagggaaacagtcatttgcgcacaacttaaaaagtctgcattacattccttgataatgttgtggtttgttgccgttgccaagaactgaaaacataaaaagttaaaaaaaataataaattgcatgctgctttaattgtgaattgataataaactgtcctctttcagaaaacagaaaaaaacacacacacacacaacaaaaatttgaaccaaaacattccgtttacattttagacagtaagtatcttcgttcttgttagtactatatctgttttactgcttttaacttctgatagcgttggaattaaaacaatgtcaaggtgctgttgtcattgctttactggcttaggggatgggggatggggggtatatttttgtttgttttgtgtttttttttcgtttgtttgttttgttttttagttcccacagggagtagagatggggaaagaattcctacaatatatattctggctgataaaagatacatttgtatgttgtgaagatgtttgcaatatcgatcagatgactagaaagtgaataaaaattaaggcaactgaacaaaaaaatgctcacactccacatcccgtgatgcacctcccaggccccgctcattctttgggcgttggtcagagtaagctgcttttgacggaaggacctatgtttgctcagaacacattctttccccccctccccctctggtctcctctttgttttgttttaaggaagaaaaatcagttgcgcgttctgaaatattttaccactgctgtgaacaagtgaacacattgtgtcacatcatgacactcgtataagcatggagaacagtgatttttttttagaacagaaaacaacaaaaaataaccccaaaatgaagattattttttatgaggagtgaacatttgggtaaatcatggctaagcttaaaaaaaactcatggtgaggcttaacaatgtcttgtaagcaaaaggtagagccctgtatcaacccagaaacacctagatcagaacaggaatccacattgccagtgacatgagactgaacagccaaatggaggctatgtggagttggcattgcatttaccggcagtgcgggaggaatttctgagtggccatcccaaggtctaggtggaggtggggcatggtatttgagacattccaaaacgaaggcctctgaaggacccttcagaggtggctctggaatgacatgtgtcaagctgcttggacctcgtgctttaagtgcctacattatctaactgtgctcaagaggttctcgactggaggaccacactcaagccgacttatgcccaccatcccacctctggataattttgcataaaattggattagcctggagcaggttgggagccaaatgtggcatttgtgatcatgagattgatgcaatgagatagaagatgtttgctacctgaacacttattgctttgaaactagacttgaggaaaccagggtttatcttttgagaacttttggtaagggaaaagggaacaggaaaagaaaccccaaactcaggccgaatgatcaaggggacccataggaaatcttgtccagagacaagacttcgggaaggtgtctggacattcagaacaccaagacttgaaggtgccttgctcaatggaagaggccaggacagagctgacaaaattttgctccccagtgaaggccacagcaaccttctgcccatcctgtctgttcatggagagggtccctgcctcacctctgccattttgggttaggagaagtcaagttgggagcctgaaatagtggttcttggaaaaatggatccccagtgaaaactagagctctaagcccattcagcccatttcacacctgaaaatgttagtgatcaccacttggaccagcatccttaagtatcagaaagccccaagcaattgctgcatcttagtagggtgagggataagcaaaagaggatgttcaccataacccaggaatgaagataccatcagcaaagaatttcaatttgttcagtctttcatttagagctagtctttcacagtaccatctgaatacctctttgaaagaaggaagactttacgtagtgtagatttgttttgtgttgtttgaaaatattatctttgtaattatttttaatatgtaaggaatgcttggaatatctgctatatgtcaactttatgcagcttccttttgagggacaaatttaaaacaaacaaccccccatcacaaacttaaaggattgcaagggccagatctgttaagtggtttcataggagacacatccagcaattgtgtggtcagtggctcttttacccaataagatacatcacagtcacatgcttgatggtttatgttgacctaagatttattttgttaaaatctctctctgttgtgttcgttcttgttctgttttgttttgttttttaaagtcttgctgtggtctctttgtggcagaagtgtttcatgcatggcagcaggcctgttgcttttttatggcgattcccattgaaaatgtaagtaaatgtctgtggccttgttctctctatggtaaagatattattcaccatgtaaaacaaaaaacaatatttattgtattttagtatatttatataattatgttattgaaaaaaattggcattaaaacttaaccgcatcagaacctattgtaaatacaagttctatttaagtgtactaattaacatataatatatgttttaaatatagaatttttaatgtttttaaatatattttcaaagtacataaaa

SEQ ID NO: 4051 - DNA, 3998 bp, Homo sapiens
  source 1..3998: mol_type = genomic DNA
agagctaaataatgtctgacccgggcgcaaggcgcagcctggagctccgggtccccgccgctgccgccgccgcgcccgggcgcacccgcccgctcgctgtcccgcgcaccccgtagcgcctcgggctcccgggccggacagaggagccagcccggtgcgcccctccacctcctgctcggggggctttaatgagacacccaccgctgctgtggggccggcggggagcagcaccgcgacggggaccggggctgggcgctggagccagaatcggaaccacgatgtgactccgccgccggggacccgtgagttccaccaggtgagaagagtgatgaccatccttttccttactatggttatttcatactttggttgcatgaaggctgcccccatgaaagaagcaaacatccgaggacaaggtggcttggcctacccaggtgtgcggacccatgggactctggagagcgtgaatgggcccaaggcaggttcaagaggcttgacatcattggctgacactttcgaacacgtgatagaagagctgttggatgaggaccagaaagttcggcccaatgaagaaaacaataaggacgcagacttgtacacgtccagggtgatgctcagtagtcaagtgcctttggagcctcctcttctctttctgctggaggaatacaaaaattacctagatgctgcaaacatgtccatgagggtccggcgccactctgaccctgcccgccgaggggagctgagcgtgtgtgacagtattagtgagtgggtaacggcggcagacaaaaagactgcagtggacatgtcgggcgggacggtcacagtccttgaaaaggtccctgtatcaaaaggccaactgaagcaatacttctacgagaccaagtgcaatcccatgggttacacaaaagaaggctgcaggggcatagacaaaaggcattggaactcccagtgccgaactacccagtcgtacgtgcgggcccttaccatggatagcaaaaagagaattggctggcgattcataaggatagacacttcttgtgtatgtacattgaccattaaaaggggaagatagtggatttatgttgtatagattagattatattgagacaaaaattatctatttgtatatatacataacagggtaaattattcagttaagaaaaaaataattttatgaactgcatgtataaatgaagtttatacagtacagtggttctacaatctatttattggacatgtccatgaccagaagggaaacagtcatttgcgcacaacttaaaaagtctgcattacattccttgataatgttgtggtttgttgccgttgccaagaactgaaaacataaaaagttaaaaaaaataataaattgcatgctgctttaattgtgaattgataataaactgtcctctttcagaaaacagaaaaaaacacacacacacacaacaaaaatttgaaccaaaacattccgtttacattttagacagtaagtatcttcgttcttgttagtactatatctgttttactgcttttaacttctgatagcgttggaattaaaacaatgtcaaggtgctgttgtcattgctttactggcttaggggatgggggatggggggtatatttttgtttgttttgtgtttttttttcgtttgtttgttttgttttttagttcccacagggagtagagatggggaaagaattcctacaatatatattctggctgataaaagatacatttgtatgttgtgaagatgtttgcaatatcgatcagatgactagaaagtgaataaaaattaaggcaactgaacaaaaaaatgctcacactccacatcccgtgatgcacctcccaggccccgctcattctttgggcgttggtcagagtaagctgcttttgacggaaggacctatgtttgctcagaacacattctttccccccctccccctctggtctcctctttgttttgttttaaggaagaaaaatcagttgcgcgttctgaaatattttaccactgctgtgaacaagtgaacacattgtgtcacatcatgacactcgtataagcatggagaacagtgatttttttttagaacagaaaacaacaaaaaataaccccaaaatgaagattattttttatgaggagtgaacatttgggtaaatcatggctaagcttaaaaaaaactcatggtgaggcttaacaatgtcttgtaagcaaaaggtagagccctgtatcaacccagaaacacctagatcagaacaggaatccacattgccagtgacatgagactgaacagccaaatggaggctatgtggagttggcattgcatttaccggcagtgcgggaggaatttctgagtggccatcccaaggtctaggtggaggtggggcatggtatttgagacattccaaaacgaaggcctctgaaggacccttcagaggtggctctggaatgacatgtgtcaagctgcttggacctcgtgctttaagtgcctacattatctaactgtgctcaagaggttctcgactggaggaccacactcaagccgacttatgcccaccatcccacctctggataattttgcataaaattggattagcctggagcaggttgggagccaaatgtggcatttgtgatcatgagattgatgcaatgagatagaagatgtttgctacctgaacacttattgctttgaaactagacttgaggaaaccagggtttatcttttgagaacttttggtaagggaaaagggaacaggaaaagaaaccccaaactcaggccgaatgatcaaggggacccataggaaatcttgtccagagacaagacttcgggaaggtgtctggacattcagaacaccaagacttgaaggtgccttgctcaatggaagaggccaggacagagctgacaaaattttgctccccagtgaaggccacagcaaccttctgcccatcctgtctgttcatggagagggtccctgcctcacctctgccattttgggttaggagaagtcaagttgggagcctgaaatagtggttcttggaaaaatggatccccagtgaaaactagagctctaagcccattcagcccatttcacacctgaaaatgttagtgatcaccacttggaccagcatccttaagtatcagaaagccccaagcaattgctgcatcttagtagggtgagggataagcaaaagaggatgttcaccataacccaggaatgaagataccatcagcaaagaatttcaatttgttcagtctttcatttagagctagtctttcacagtaccatctgaatacctctttgaaagaaggaagactttacgtagtgtagatttgttttgtgttgtttgaaaatattatctttgtaattatttttaatatgtaaggaatgcttggaatatctgctatatgtcaactttatgcagcttccttttgagggacaaatttaaaacaaacaaccccccatcacaaacttaaaggattgcaagggccagatctgttaagtggtttcataggagacacatccagcaattgtgtggtcagtggctcttttacccaataagatacatcacagtcacatgcttgatggtttatgttgacctaagatttattttgttaaaatctctctctgttgtgttcgttcttgttctgttttgttttgttttttaaagtcttgctgtggtctctttgtggcagaagtgtttcatgcatggcagcaggcctgttgcttttttatggcgattcccattgaaaatgtaagtaaatgtctgtggccttgttctctctatggtaaagatattattcaccatgtaaaacaaaaaacaatatttattgtattttagtatatttatataattatgttattgaaaaaaattggcattaaaacttaaccgcatcagaacctattgtaaatacaagttctatttaagtgtactaattaacatataatatatgttttaaatatagaatttttaatgtttttaaatatattttcaaagtacataaaa

SEQ ID NO: 4052 - DNA, 3916 bp, Homo sapiens
  source 1..3916: mol_type = genomic DNA
agagttgaaagctaggggagcgagacctcggggcgtgcgattctcactcgctccctcccgccccagcgcccacagccggggtttctgcagagggcgcgggacgcggggttccccggggctgaggctggggctggaacacccctcgaagccgcgggcgtcctgtccaaggcgccccaggagggcgcaggactcgcagggcgatgtcgcggggccctaggggaggagttccaccaggtgagaagagtgatgaccatccttttccttactatggttatttcatactttggttgcatgaaggctgcccccatgaaagaagcaaacatccgaggacaaggtggcttggcctacccaggtgtgcggacccatgggactctggagagcgtgaatgggcccaaggcaggttcaagaggcttgacatcattggctgacactttcgaacacgtgatagaagagctgttggatgaggaccagaaagttcggcccaatgaagaaaacaataaggacgcagacttgtacacgtccagggtgatgctcagtagtcaagtgcctttggagcctcctcttctctttctgctggaggaatacaaaaattacctagatgctgcaaacatgtccatgagggtccggcgccactctgaccctgcccgccgaggggagctgagcgtgtgtgacagtattagtgagtgggtaacggcggcagacaaaaagactgcagtggacatgtcgggcgggacggtcacagtccttgaaaaggtccctgtatcaaaaggccaactgaagcaatacttctacgagaccaagtgcaatcccatgggttacacaaaagaaggctgcaggggcatagacaaaaggcattggaactcccagtgccgaactacccagtcgtacgtgcgggcccttaccatggatagcaaaaagagaattggctggcgattcataaggatagacacttcttgtgtatgtacattgaccattaaaaggggaagatagtggatttatgttgtatagattagattatattgagacaaaaattatctatttgtatatatacataacagggtaaattattcagttaagaaaaaaataattttatgaactgcatgtataaatgaagtttatacagtacagtggttctacaatctatttattggacatgtccatgaccagaagggaaacagtcatttgcgcacaacttaaaaagtctgcattacattccttgataatgttgtggtttgttgccgttgccaagaactgaaaacataaaaagttaaaaaaaataataaattgcatgctgctttaattgtgaattgataataaactgtcctctttcagaaaacagaaaaaaacacacacacacacaacaaaaatttgaaccaaaacattccgtttacattttagacagtaagtatcttcgttcttgttagtactatatctgttttactgcttttaacttctgatagcgttggaattaaaacaatgtcaaggtgctgttgtcattgctttactggcttaggggatgggggatggggggtatatttttgtttgttttgtgtttttttttcgtttgtttgttttgttttttagttcccacagggagtagagatggggaaagaattcctacaatatatattctggctgataaaagatacatttgtatgttgtgaagatgtttgcaatatcgatcagatgactagaaagtgaataaaaattaaggcaactgaacaaaaaaatgctcacactccacatcccgtgatgcacctcccaggccccgctcattctttgggcgttggtcagagtaagctgcttttgacggaaggacctatgtttgctcagaacacattctttccccccctccccctctggtctcctctttgttttgttttaaggaagaaaaatcagttgcgcgttctgaaatattttaccactgctgtgaacaagtgaacacattgtgtcacatcatgacactcgtataagcatggagaacagtgatttttttttagaacagaaaacaacaaaaaataaccccaaaatgaagattattttttatgaggagtgaacatttgggtaaatcatggctaagcttaaaaaaaactcatggtgaggcttaacaatgtcttgtaagcaaaaggtagagccctgtatcaacccagaaacacctagatcagaacaggaatccacattgccagtgacatgagactgaacagccaaatggaggctatgtggagttggcattgcatttaccggcagtgcgggaggaatttctgagtggccatcccaaggtctaggtggaggtggggcatggtatttgagacattccaaaacgaaggcctctgaaggacccttcagaggtggctctggaatgacatgtgtcaagctgcttggacctcgtgctttaagtgcctacattatctaactgtgctcaagaggttctcgactggaggaccacactcaagccgacttatgcccaccatcccacctctggataattttgcataaaattggattagcctggagcaggttgggagccaaatgtggcatttgtgatcatgagattgatgcaatgagatagaagatgtttgctacctgaacacttattgctttgaaactagacttgaggaaaccagggtttatcttttgagaacttttggtaagggaaaagggaacaggaaaagaaaccccaaactcaggccgaatgatcaaggggacccataggaaatcttgtccagagacaagacttcgggaaggtgtctggacattcagaacaccaagacttgaaggtgccttgctcaatggaagaggccaggacagagctgacaaaattttgctccccagtgaaggccacagcaaccttctgcccatcctgtctgttcatggagagggtccctgcctcacctctgccattttgggttaggagaagtcaagttgggagcctgaaatagtggttcttggaaaaatggatccccagtgaaaactagagctctaagcccattcagcccatttcacacctgaaaatgttagtgatcaccacttggaccagcatccttaagtatcagaaagccccaagcaattgctgcatcttagtagggtgagggataagcaaaagaggatgttcaccataacccaggaatgaagataccatcagcaaagaatttcaatttgttcagtctttcatttagagctagtctttcacagtaccatctgaatacctctttgaaagaaggaagactttacgtagtgtagatttgttttgtgttgtttgaaaatattatctttgtaattatttttaatatgtaaggaatgcttggaatatctgctatatgtcaactttatgcagcttccttttgagggacaaatttaaaacaaacaaccccccatcacaaacttaaaggattgcaagggccagatctgttaagtggtttcataggagacacatccagcaattgtgtggtcagtggctcttttacccaataagatacatcacagtcacatgcttgatggtttatgttgacctaagatttattttgttaaaatctctctctgttgtgttcgttcttgttctgttttgttttgttttttaaagtcttgctgtggtctctttgtggcagaagtgtttcatgcatggcagcaggcctgttgcttttttatggcgattcccattgaaaatgtaagtaaatgtctgtggccttgttctctctatggtaaagatattattcaccatgtaaaacaaaaaacaatatttattgtattttagtatatttatataattatgttattgaaaaaaattggcattaaaacttaaccgcatcagaacctattgtaaatacaagttctatttaagtgtactaattaacatataatatatgttttaaatatagaatttttaatgtttttaaatatattttcaaagtacataaaa

SEQ ID NO: 4053 - DNA, 4042 bp, Homo sapiens
  source 1..4042: mol_type = genomic DNA
aatatcaagtatcacttaattagagatttttaagccttttcctcctgctgtgccgggtgtgtaatccgggcgataggagtccattcagcaccttggacagagccaacggatttgtccgaggtggcggtacccccaggtagtcttcttggccccgctgtaaagccaaccctgtgtcgcccttaaaaagcgtcttttctgaggttcggctcacactgagatcggggctggagagagagtcagattttggagcggagcgtttggaaagcgagccccagtttggtcccctcattgagctcgctgaagttggcttcctagcggtgtaggctggaatagactcttggcaagctccggttccaccaggtgagaagagtgatgaccatccttttccttactatggttatttcatactttggttgcatgaaggctgcccccatgaaagaagcaaacatccgaggacaaggtggcttggcctacccaggtgtgcggacccatgggactctggagagcgtgaatgggcccaaggcaggttcaagaggcttgacatcattggctgacactttcgaacacgtgatagaagagctgttggatgaggaccagaaagttcggcccaatgaagaaaacaataaggacgcagacttgtacacgtccagggtgatgctcagtagtcaagtgcctttggagcctcctcttctctttctgctggaggaatacaaaaattacctagatgctgcaaacatgtccatgagggtccggcgccactctgaccctgcccgccgaggggagctgagcgtgtgtgacagtattagtgagtgggtaacggcggcagacaaaaagactgcagtggacatgtcgggcgggacggtcacagtccttgaaaaggtccctgtatcaaaaggccaactgaagcaatacttctacgagaccaagtgcaatcccatgggttacacaaaagaaggctgcaggggcatagacaaaaggcattggaactcccagtgccgaactacccagtcgtacgtgcgggcccttaccatggatagcaaaaagagaattggctggcgattcataaggatagacacttcttgtgtatgtacattgaccattaaaaggggaagatagtggatttatgttgtatagattagattatattgagacaaaaattatctatttgtatatatacataacagggtaaattattcagttaagaaaaaaataattttatgaactgcatgtataaatgaagtttatacagtacagtggttctacaatctatttattggacatgtccatgaccagaagggaaacagtcatttgcgcacaacttaaaaagtctgcattacattccttgataatgttgtggtttgttgccgttgccaagaactgaaaacataaaaagttaaaaaaaataataaattgcatgctgctttaattgtgaattgataataaactgtcctctttcagaaaacagaaaaaaacacacacacacacaacaaaaatttgaaccaaaacattccgtttacattttagacagtaagtatcttcgttcttgttagtactatatctgttttactgcttttaacttctgatagcgttggaattaaaacaatgtcaaggtgctgttgtcattgctttactggcttaggggatgggggatggggggtatatttttgtttgttttgtgtttttttttcgtttgtttgttttgttttttagttcccacagggagtagagatggggaaagaattcctacaatatatattctggctgataaaagatacatttgtatgttgtgaagatgtttgcaatatcgatcagatgactagaaagtgaataaaaattaaggcaactgaacaaaaaaatgctcacactccacatcccgtgatgcacctcccaggccccgctcattctttgggcgttggtcagagtaagctgcttttgacggaaggacctatgtttgctcagaacacattctttccccccctccccctctggtctcctctttgttttgttttaaggaagaaaaatcagttgcgcgttctgaaatattttaccactgctgtgaacaagtgaacacattgtgtcacatcatgacactcgtataagcatggagaacagtgatttttttttagaacagaaaacaacaaaaaataaccccaaaatgaagattattttttatgaggagtgaacatttgggtaaatcatggctaagcttaaaaaaaactcatggtgaggcttaacaatgtcttgtaagcaaaaggtagagccctgtatcaacccagaaacacctagatcagaacaggaatccacattgccagtgacatgagactgaacagccaaatggaggctatgtggagttggcattgcatttaccggcagtgcgggaggaatttctgagtggccatcccaaggtctaggtggaggtggggcatggtatttgagacattccaaaacgaaggcctctgaaggacccttcagaggtggctctggaatgacatgtgtcaagctgcttggacctcgtgctttaagtgcctacattatctaactgtgctcaagaggttctcgactggaggaccacactcaagccgacttatgcccaccatcccacctctggataattttgcataaaattggattagcctggagcaggttgggagccaaatgtggcatttgtgatcatgagattgatgcaatgagatagaagatgtttgctacctgaacacttattgctttgaaactagacttgaggaaaccagggtttatcttttgagaacttttggtaagggaaaagggaacaggaaaagaaaccccaaactcaggccgaatgatcaaggggacccataggaaatcttgtccagagacaagacttcgggaaggtgtctggacattcagaacaccaagacttgaaggtgccttgctcaatggaagaggccaggacagagctgacaaaattttgctccccagtgaaggccacagcaaccttctgcccatcctgtctgttcatggagagggtccctgcctcacctctgccattttgggttaggagaagtcaagttgggagcctgaaatagtggttcttggaaaaatggatccccagtgaaaactagagctctaagcccattcagcccatttcacacctgaaaatgttagtgatcaccacttggaccagcatccttaagtatcagaaagccccaagcaattgctgcatcttagtagggtgagggataagcaaaagaggatgttcaccataacccaggaatgaagataccatcagcaaagaatttcaatttgttcagtctttcatttagagctagtctttcacagtaccatctgaatacctctttgaaagaaggaagactttacgtagtgtagatttgttttgtgttgtttgaaaatattatctttgtaattatttttaatatgtaaggaatgcttggaatatctgctatatgtcaactttatgcagcttccttttgagggacaaatttaaaacaaacaaccccccatcacaaacttaaaggattgcaagggccagatctgttaagtggtttcataggagacacatccagcaattgtgtggtcagtggctcttttacccaataagatacatcacagtcacatgcttgatggtttatgttgacctaagatttattttgttaaaatctctctctgttgtgttcgttcttgttctgttttgttttgttttttaaagtcttgctgtggtctctttgtggcagaagtgtttcatgcatggcagcaggcctgttgcttttttatggcgattcccattgaaaatgtaagtaaatgtctgtggccttgttctctctatggtaaagatattattcaccatgtaaaacaaaaaacaatatttattgtattttagtatatttatataattatgttattgaaaaaaattggcattaaaacttaaccgcatcagaacctattgtaaatacaagttctatttaagtgtactaattaacatataatatatgttttaaatatagaatttttaatgtttttaaatatattttcaaagtacataaaa

SEQ ID NO: 4054 - DNA, 4174 bp, Homo sapiens
  source 1..4174: mol_type = genomic DNA
gtaaaccaatagcccccatgctctgtgcgatttcattgtgtgctcgcgttcgcaagctccgtagtgcaggaaggtgcgggaagttaagtaattaaaagaaattatagagtgggatgcaaaaataacccgaaggacaactggatgtgtggagccaccagttttctccatgagtgcacaaggttaatccttgttactactcagaatgctgagtttctacagaaagggttgcaggtccacacatgttttggcgtctacccacacgcttctgtatggcatgactgtgcatcccagaagaagggctgtgctgtgtacctccacgtttcagtggaatttaacaaactgatccctgaaaatggtttcataaagggatggtaataaagtctcttagtggttgaaaatgttatttcttacaaaagtggagaacatttgcttttcaataccagagttttcagccatttctgcattctgacctattgactggagttccaccaggtgagaagagtgatgaccatccttttccttactatggttatttcatactttggttgcatgaaggctgcccccatgaaagaagcaaacatccgaggacaaggtggcttggcctacccaggtgtgcggacccatgggactctggagagcgtgaatgggcccaaggcaggttcaagaggcttgacatcattggctgacactttcgaacacgtgatagaagagctgttggatgaggaccagaaagttcggcccaatgaagaaaacaataaggacgcagacttgtacacgtccagggtgatgctcagtagtcaagtgcctttggagcctcctcttctctttctgctggaggaatacaaaaattacctagatgctgcaaacatgtccatgagggtccggcgccactctgaccctgcccgccgaggggagctgagcgtgtgtgacagtattagtgagtgggtaacggcggcagacaaaaagactgcagtggacatgtcgggcgggacggtcacagtccttgaaaaggtccctgtatcaaaaggccaactgaagcaatacttctacgagaccaagtgcaatcccatgggttacacaaaagaaggctgcaggggcatagacaaaaggcattggaactcccagtgccgaactacccagtcgtacgtgcgggcccttaccatggatagcaaaaagagaattggctggcgattcataaggatagacacttcttgtgtatgtacattgaccattaaaaggggaagatagtggatttatgttgtatagattagattatattgagacaaaaattatctatttgtatatatacataacagggtaaattattcagttaagaaaaaaataattttatgaactgcatgtataaatgaagtttatacagtacagtggttctacaatctatttattggacatgtccatgaccagaagggaaacagtcatttgcgcacaacttaaaaagtctgcattacattccttgataatgttgtggtttgttgccgttgccaagaactgaaaacataaaaagttaaaaaaaataataaattgcatgctgctttaattgtgaattgataataaactgtcctctttcagaaaacagaaaaaaacacacacacacacaacaaaaatttgaaccaaaacattccgtttacattttagacagtaagtatcttcgttcttgttagtactatatctgttttactgcttttaacttctgatagcgttggaattaaaacaatgtcaaggtgctgttgtcattgctttactggcttaggggatgggggatggggggtatatttttgtttgttttgtgtttttttttcgtttgtttgttttgttttttagttcccacagggagtagagatggggaaagaattcctacaatatatattctggctgataaaagatacatttgtatgttgtgaagatgtttgcaatatcgatcagatgactagaaagtgaataaaaattaaggcaactgaacaaaaaaatgctcacactccacatcccgtgatgcacctcccaggccccgctcattctttgggcgttggtcagagtaagctgcttttgacggaaggacctatgtttgctcagaacacattctttccccccctccccctctggtctcctctttgttttgttttaaggaagaaaaatcagttgcgcgttctgaaatattttaccactgctgtgaacaagtgaacacattgtgtcacatcatgacactcgtataagcatggagaacagtgatttttttttagaacagaaaacaacaaaaaataaccccaaaatgaagattattttttatgaggagtgaacatttgggtaaatcatggctaagcttaaaaaaaactcatggtgaggcttaacaatgtcttgtaagcaaaaggtagagccctgtatcaacccagaaacacctagatcagaacaggaatccacattgccagtgacatgagactgaacagccaaatggaggctatgtggagttggcattgcatttaccggcagtgcgggaggaatttctgagtggccatcccaaggtctaggtggaggtggggcatggtatttgagacattccaaaacgaaggcctctgaaggacccttcagaggtggctctggaatgacatgtgtcaagctgcttggacctcgtgctttaagtgcctacattatctaactgtgctcaagaggttctcgactggaggaccacactcaagccgacttatgcccaccatcccacctctggataattttgcataaaattggattagcctggagcaggttgggagccaaatgtggcatttgtgatcatgagattgatgcaatgagatagaagatgtttgctacctgaacacttattgctttgaaactagacttgaggaaaccagggtttatcttttgagaacttttggtaagggaaaagggaacaggaaaagaaaccccaaactcaggccgaatgatcaaggggacccataggaaatcttgtccagagacaagacttcgggaaggtgtctggacattcagaacaccaagacttgaaggtgccttgctcaatggaagaggccaggacagagctgacaaaattttgctccccagtgaaggccacagcaaccttctgcccatcctgtctgttcatggagagggtccctgcctcacctctgccattttgggttaggagaagtcaagttgggagcctgaaatagtggttcttggaaaaatggatccccagtgaaaactagagctctaagcccattcagcccatttcacacctgaaaatgttagtgatcaccacttggaccagcatccttaagtatcagaaagccccaagcaattgctgcatcttagtagggtgagggataagcaaaagaggatgttcaccataacccaggaatgaagataccatcagcaaagaatttcaatttgttcagtctttcatttagagctagtctttcacagtaccatctgaatacctctttgaaagaaggaagactttacgtagtgtagatttgttttgtgttgtttgaaaatattatctttgtaattatttttaatatgtaaggaatgcttggaatatctgctatatgtcaactttatgcagcttccttttgagggacaaatttaaaacaaacaaccccccatcacaaacttaaaggattgcaagggccagatctgttaagtggtttcataggagacacatccagcaattgtgtggtcagtggctcttttacccaataagatacatcacagtcacatgcttgatggtttatgttgacctaagatttattttgttaaaatctctctctgttgtgttcgttcttgttctgttttgttttgttttttaaagtcttgctgtggtctctttgtggcagaagtgtttcatgcatggcagcaggcctgttgcttttttatggcgattcccattgaaaatgtaagtaaatgtctgtggccttgttctctctatggtaaagatattattcaccatgtaaaacaaaaaacaatatttattgtattttagtatatttatataattatgttattgaaaaaaattggcattaaaacttaaccgcatcagaacctattgtaaatacaagttctatttaagtgtactaattaacatataatatatgttttaaatatagaatttttaatgtttttaaatatattttcaaagtacataaaa

SEQ ID NO: 4055 - DNA, 4016 bp, Homo sapiens
  source 1..4016: mol_type = genomic DNA
agagctaaataatgtctgacccgggcgcaaggcgcagcctggagctccgggtccccgccgctgccgccgccgcgcccgggcgcacccgcccgctcgctgtcccgcgcaccccgtagcgcctcgggctcccgggccggacagaggagccagcccggtgcgcccctccacctcctgctcggggggctttaatgagacacccaccgctgctgtggggccggcggggagcagcaccgcgacggggaccggggctgggcgctggagccagaatcggaaccacgatgtgactccgccgccggggacccgtgaggtttgtgtggaccccgagttccaccaggtgagaagagtgatgaccatccttttccttactatggttatttcatactttggttgcatgaaggctgcccccatgaaagaagcaaacatccgaggacaaggtggcttggcctacccaggtgtgcggacccatgggactctggagagcgtgaatgggcccaaggcaggttcaagaggcttgacatcattggctgacactttcgaacacgtgatagaagagctgttggatgaggaccagaaagttcggcccaatgaagaaaacaataaggacgcagacttgtacacgtccagggtgatgctcagtagtcaagtgcctttggagcctcctcttctctttctgctggaggaatacaaaaattacctagatgctgcaaacatgtccatgagggtccggcgccactctgaccctgcccgccgaggggagctgagcgtgtgtgacagtattagtgagtgggtaacggcggcagacaaaaagactgcagtggacatgtcgggcgggacggtcacagtccttgaaaaggtccctgtatcaaaaggccaactgaagcaatacttctacgagaccaagtgcaatcccatgggttacacaaaagaaggctgcaggggcatagacaaaaggcattggaactcccagtgccgaactacccagtcgtacgtgcgggcccttaccatggatagcaaaaagagaattggctggcgattcataaggatagacacttcttgtgtatgtacattgaccattaaaaggggaagatagtggatttatgttgtatagattagattatattgagacaaaaattatctatttgtatatatacataacagggtaaattattcagttaagaaaaaaataattttatgaactgcatgtataaatgaagtttatacagtacagtggttctacaatctatttattggacatgtccatgaccagaagggaaacagtcatttgcgcacaacttaaaaagtctgcattacattccttgataatgttgtggtttgttgccgttgccaagaactgaaaacataaaaagttaaaaaaaataataaattgcatgctgctttaattgtgaattgataataaactgtcctctttcagaaaacagaaaaaaacacacacacacacaacaaaaatttgaaccaaaacattccgtttacattttagacagtaagtatcttcgttcttgttagtactatatctgttttactgcttttaacttctgatagcgttggaattaaaacaatgtcaaggtgctgttgtcattgctttactggcttaggggatgggggatggggggtatatttttgtttgttttgtgtttttttttcgtttgtttgttttgttttttagttcccacagggagtagagatggggaaagaattcctacaatatatattctggctgataaaagatacatttgtatgttgtgaagatgtttgcaatatcgatcagatgactagaaagtgaataaaaattaaggcaactgaacaaaaaaatgctcacactccacatcccgtgatgcacctcccaggccccgctcattctttgggcgttggtcagagtaagctgcttttgacggaaggacctatgtttgctcagaacacattctttccccccctccccctctggtctcctctttgttttgttttaaggaagaaaaatcagttgcgcgttctgaaatattttaccactgctgtgaacaagtgaacacattgtgtcacatcatgacactcgtataagcatggagaacagtgatttttttttagaacagaaaacaacaaaaaataaccccaaaatgaagattattttttatgaggagtgaacatttgggtaaatcatggctaagcttaaaaaaaactcatggtgaggcttaacaatgtcttgtaagcaaaaggtagagccctgtatcaacccagaaacacctagatcagaacaggaatccacattgccagtgacatgagactgaacagccaaatggaggctatgtggagttggcattgcatttaccggcagtgcgggaggaatttctgagtggccatcccaaggtctaggtggaggtggggcatggtatttgagacattccaaaacgaaggcctctgaaggacccttcagaggtggctctggaatgacatgtgtcaagctgcttggacctcgtgctttaagtgcctacattatctaactgtgctcaagaggttctcgactggaggaccacactcaagccgacttatgcccaccatcccacctctggataattttgcataaaattggattagcctggagcaggttgggagccaaatgtggcatttgtgatcatgagattgatgcaatgagatagaagatgtttgctacctgaacacttattgctttgaaactagacttgaggaaaccagggtttatcttttgagaacttttggtaagggaaaagggaacaggaaaagaaaccccaaactcaggccgaatgatcaaggggacccataggaaatcttgtccagagacaagacttcgggaaggtgtctggacattcagaacaccaagacttgaaggtgccttgctcaatggaagaggccaggacagagctgacaaaattttgctccccagtgaaggccacagcaaccttctgcccatcctgtctgttcatggagagggtccctgcctcacctctgccattttgggttaggagaagtcaagttgggagcctgaaatagtggttcttggaaaaatggatccccagtgaaaactagagctctaagcccattcagcccatttcacacctgaaaatgttagtgatcaccacttggaccagcatccttaagtatcagaaagccccaagcaattgctgcatcttagtagggtgagggataagcaaaagaggatgttcaccataacccaggaatgaagataccatcagcaaagaatttcaatttgttcagtctttcatttagagctagtctttcacagtaccatctgaatacctctttgaaagaaggaagactttacgtagtgtagatttgttttgtgttgtttgaaaatattatctttgtaattatttttaatatgtaaggaatgcttggaatatctgctatatgtcaactttatgcagcttccttttgagggacaaatttaaaacaaacaaccccccatcacaaacttaaaggattgcaagggccagatctgttaagtggtttcataggagacacatccagcaattgtgtggtcagtggctcttttacccaataagatacatcacagtcacatgcttgatggtttatgttgacctaagatttattttgttaaaatctctctctgttgtgttcgttcttgttctgttttgttttgttttttaaagtcttgctgtggtctctttgtggcagaagtgtttcatgcatggcagcaggcctgttgcttttttatggcgattcccattgaaaatgtaagtaaatgtctgtggccttgttctctctatggtaaagatattattcaccatgtaaaacaaaaaacaatatttattgtattttagtatatttatataattatgttattgaaaaaaattggcattaaaacttaaccgcatcagaacctattgtaaatacaagttctatttaagtgtactaattaacatataatatatgttttaaatatagaatttttaatgtttttaaatatattttcaaagtacataaaa

SEQ ID NO: 4056 - DNA, 3827 bp, Homo sapiens
  source 1..3827: mol_type = genomic DNA
aatatcaagtatcacttaattagagatttttaagccttttcctcctgctgtgccgggtgtgtaatccgggcgataggagtccattcagcaccttggacagagccaacggatttgtccgaggtggcggtacccccagttccaccaggtgagaagagtgatgaccatccttttccttactatggttatttcatactttggttgcatgaaggctgcccccatgaaagaagcaaacatccgaggacaaggtggcttggcctacccaggtgtgcggacccatgggactctggagagcgtgaatgggcccaaggcaggttcaagaggcttgacatcattggctgacactttcgaacacgtgatagaagagctgttggatgaggaccagaaagttcggcccaatgaagaaaacaataaggacgcagacttgtacacgtccagggtgatgctcagtagtcaagtgcctttggagcctcctcttctctttctgctggaggaatacaaaaattacctagatgctgcaaacatgtccatgagggtccggcgccactctgaccctgcccgccgaggggagctgagcgtgtgtgacagtattagtgagtgggtaacggcggcagacaaaaagactgcagtggacatgtcgggcgggacggtcacagtccttgaaaaggtccctgtatcaaaaggccaactgaagcaatacttctacgagaccaagtgcaatcccatgggttacacaaaagaaggctgcaggggcatagacaaaaggcattggaactcccagtgccgaactacccagtcgtacgtgcgggcccttaccatggatagcaaaaagagaattggctggcgattcataaggatagacacttcttgtgtatgtacattgaccattaaaaggggaagatagtggatttatgttgtatagattagattatattgagacaaaaattatctatttgtatatatacataacagggtaaattattcagttaagaaaaaaataattttatgaactgcatgtataaatgaagtttatacagtacagtggttctacaatctatttattggacatgtccatgaccagaagggaaacagtcatttgcgcacaacttaaaaagtctgcattacattccttgataatgttgtggtttgttgccgttgccaagaactgaaaacataaaaagttaaaaaaaataataaattgcatgctgctttaattgtgaattgataataaactgtcctctttcagaaaacagaaaaaaacacacacacacacaacaaaaatttgaaccaaaacattccgtttacattttagacagtaagtatcttcgttcttgttagtactatatctgttttactgcttttaacttctgatagcgttggaattaaaacaatgtcaaggtgctgttgtcattgctttactggcttaggggatgggggatggggggtatatttttgtttgttttgtgtttttttttcgtttgtttgttttgttttttagttcccacagggagtagagatggggaaagaattcctacaatatatattctggctgataaaagatacatttgtatgttgtgaagatgtttgcaatatcgatcagatgactagaaagtgaataaaaattaaggcaactgaacaaaaaaatgctcacactccacatcccgtgatgcacctcccaggccccgctcattctttgggcgttggtcagagtaagctgcttttgacggaaggacctatgtttgctcagaacacattctttccccccctccccctctggtctcctctttgttttgttttaaggaagaaaaatcagttgcgcgttctgaaatattttaccactgctgtgaacaagtgaacacattgtgtcacatcatgacactcgtataagcatggagaacagtgatttttttttagaacagaaaacaacaaaaaataaccccaaaatgaagattattttttatgaggagtgaacatttgggtaaatcatggctaagcttaaaaaaaactcatggtgaggcttaacaatgtcttgtaagcaaaaggtagagccctgtatcaacccagaaacacctagatcagaacaggaatccacattgccagtgacatgagactgaacagccaaatggaggctatgtggagttggcattgcatttaccggcagtgcgggaggaatttctgagtggccatcccaaggtctaggtggaggtggggcatggtatttgagacattccaaaacgaaggcctctgaaggacccttcagaggtggctctggaatgacatgtgtcaagctgcttggacctcgtgctttaagtgcctacattatctaactgtgctcaagaggttctcgactggaggaccacactcaagccgacttatgcccaccatcccacctctggataattttgcataaaattggattagcctggagcaggttgggagccaaatgtggcatttgtgatcatgagattgatgcaatgagatagaagatgtttgctacctgaacacttattgctttgaaactagacttgaggaaaccagggtttatcttttgagaacttttggtaagggaaaagggaacaggaaaagaaaccccaaactcaggccgaatgatcaaggggacccataggaaatcttgtccagagacaagacttcgggaaggtgtctggacattcagaacaccaagacttgaaggtgccttgctcaatggaagaggccaggacagagctgacaaaattttgctccccagtgaaggccacagcaaccttctgcccatcctgtctgttcatggagagggtccctgcctcacctctgccattttgggttaggagaagtcaagttgggagcctgaaatagtggttcttggaaaaatggatccccagtgaaaactagagctctaagcccattcagcccatttcacacctgaaaatgttagtgatcaccacttggaccagcatccttaagtatcagaaagccccaagcaattgctgcatcttagtagggtgagggataagcaaaagaggatgttcaccataacccaggaatgaagataccatcagcaaagaatttcaatttgttcagtctttcatttagagctagtctttcacagtaccatctgaatacctctttgaaagaaggaagactttacgtagtgtagatttgttttgtgttgtttgaaaatattatctttgtaattatttttaatatgtaaggaatgcttggaatatctgctatatgtcaactttatgcagcttccttttgagggacaaatttaaaacaaacaaccccccatcacaaacttaaaggattgcaagggccagatctgttaagtggtttcataggagacacatccagcaattgtgtggtcagtggctcttttacccaataagatacatcacagtcacatgcttgatggtttatgttgacctaagatttattttgttaaaatctctctctgttgtgttcgttcttgttctgttttgttttgttttttaaagtcttgctgtggtctctttgtggcagaagtgtttcatgcatggcagcaggcctgttgcttttttatggcgattcccattgaaaatgtaagtaaatgtctgtggccttgttctctctatggtaaagatattattcaccatgtaaaacaaaaaacaatatttattgtattttagtatatttatataattatgttattgaaaaaaattggcattaaaacttaaccgcatcagaacctattgtaaatacaagttctatttaagtgtactaattaacatataatatatgttttaaatatagaatttttaatgtttttaaatatattttcaaagtacataaaa

SEQ ID NO: 4057 - DNA, 4057 bp, Homo sapiens
  source 1..4057: mol_type = genomic DNA
gtaaaccaatagcccccatgctctgtgcgatttcattgtgtgctcgcgttcgcaagctccgtagtgcaggaaggtgcgggaagttaagtaattaaaagaaattatagagtgggatgcaaaaataacccgaaggacaactggatgtgtggagccaccagttttctccatgagtgcacaaggttaatccttgttactactcagaatgctgagtttctacagaaagggttgcaggtccacacatgttttggcgtctacccacacgcttctgtatggcatgactgtgcatcccagaagaagggctgtgctgtgtacctccacgtttcagtggaatttaacaaactgatccctgaaaatggtttcataaagttccaccaggtgagaagagtgatgaccatccttttccttactatggttatttcatactttggttgcatgaaggctgcccccatgaaagaagcaaacatccgaggacaaggtggcttggcctacccaggtgtgcggacccatgggactctggagagcgtgaatgggcccaaggcaggttcaagaggcttgacatcattggctgacactttcgaacacgtgatagaagagctgttggatgaggaccagaaagttcggcccaatgaagaaaacaataaggacgcagacttgtacacgtccagggtgatgctcagtagtcaagtgcctttggagcctcctcttctctttctgctggaggaatacaaaaattacctagatgctgcaaacatgtccatgagggtccggcgccactctgaccctgcccgccgaggggagctgagcgtgtgtgacagtattagtgagtgggtaacggcggcagacaaaaagactgcagtggacatgtcgggcgggacggtcacagtccttgaaaaggtccctgtatcaaaaggccaactgaagcaatacttctacgagaccaagtgcaatcccatgggttacacaaaagaaggctgcaggggcatagacaaaaggcattggaactcccagtgccgaactacccagtcgtacgtgcgggcccttaccatggatagcaaaaagagaattggctggcgattcataaggatagacacttcttgtgtatgtacattgaccattaaaaggggaagatagtggatttatgttgtatagattagattatattgagacaaaaattatctatttgtatatatacataacagggtaaattattcagttaagaaaaaaataattttatgaactgcatgtataaatgaagtttatacagtacagtggttctacaatctatttattggacatgtccatgaccagaagggaaacagtcatttgcgcacaacttaaaaagtctgcattacattccttgataatgttgtggtttgttgccgttgccaagaactgaaaacataaaaagttaaaaaaaataataaattgcatgctgctttaattgtgaattgataataaactgtcctctttcagaaaacagaaaaaaacacacacacacacaacaaaaatttgaaccaaaacattccgtttacattttagacagtaagtatcttcgttcttgttagtactatatctgttttactgcttttaacttctgatagcgttggaattaaaacaatgtcaaggtgctgttgtcattgctttactggcttaggggatgggggatggggggtatatttttgtttgttttgtgtttttttttcgtttgtttgttttgttttttagttcccacagggagtagagatggggaaagaattcctacaatatatattctggctgataaaagatacatttgtatgttgtgaagatgtttgcaatatcgatcagatgactagaaagtgaataaaaattaaggcaactgaacaaaaaaatgctcacactccacatcccgtgatgcacctcccaggccccgctcattctttgggcgttggtcagagtaagctgcttttgacggaaggacctatgtttgctcagaacacattctttccccccctccccctctggtctcctctttgttttgttttaaggaagaaaaatcagttgcgcgttctgaaatattttaccactgctgtgaacaagtgaacacattgtgtcacatcatgacactcgtataagcatggagaacagtgatttttttttagaacagaaaacaacaaaaaataaccccaaaatgaagattattttttatgaggagtgaacatttgggtaaatcatggctaagcttaaaaaaaactcatggtgaggcttaacaatgtcttgtaagcaaaaggtagagccctgtatcaacccagaaacacctagatcagaacaggaatccacattgccagtgacatgagactgaacagccaaatggaggctatgtggagttggcattgcatttaccggcagtgcgggaggaatttctgagtggccatcccaaggtctaggtggaggtggggcatggtatttgagacattccaaaacgaaggcctctgaaggacccttcagaggtggctctggaatgacatgtgtcaagctgcttggacctcgtgctttaagtgcctacattatctaactgtgctcaagaggttctcgactggaggaccacactcaagccgacttatgcccaccatcccacctctggataattttgcataaaattggattagcctggagcaggttgggagccaaatgtggcatttgtgatcatgagattgatgcaatgagatagaagatgtttgctacctgaacacttattgctttgaaactagacttgaggaaaccagggtttatcttttgagaacttttggtaagggaaaagggaacaggaaaagaaaccccaaactcaggccgaatgatcaaggggacccataggaaatcttgtccagagacaagacttcgggaaggtgtctggacattcagaacaccaagacttgaaggtgccttgctcaatggaagaggccaggacagagctgacaaaattttgctccccagtgaaggccacagcaaccttctgcccatcctgtctgttcatggagagggtccctgcctcacctctgccattttgggttaggagaagtcaagttgggagcctgaaatagtggttcttggaaaaatggatccccagtgaaaactagagctctaagcccattcagcccatttcacacctgaaaatgttagtgatcaccacttggaccagcatccttaagtatcagaaagccccaagcaattgctgcatcttagtagggtgagggataagcaaaagaggatgttcaccataacccaggaatgaagataccatcagcaaagaatttcaatttgttcagtctttcatttagagctagtctttcacagtaccatctgaatacctctttgaaagaaggaagactttacgtagtgtagatttgttttgtgttgtttgaaaatattatctttgtaattatttttaatatgtaaggaatgcttggaatatctgctatatgtcaactttatgcagcttccttttgagggacaaatttaaaacaaacaaccccccatcacaaacttaaaggattgcaagggccagatctgttaagtggtttcataggagacacatccagcaattgtgtggtcagtggctcttttacccaataagatacatcacagtcacatgcttgatggtttatgttgacctaagatttattttgttaaaatctctctctgttgtgttcgttcttgttctgttttgttttgttttttaaagtcttgctgtggtctctttgtggcagaagtgtttcatgcatggcagcaggcctgttgcttttttatggcgattcccattgaaaatgtaagtaaatgtctgtggccttgttctctctatggtaaagatattattcaccatgtaaaacaaaaaacaatatttattgtattttagtatatttatataattatgttattgaaaaaaattggcattaaaacttaaccgcatcagaacctattgtaaatacaagttctatttaagtgtactaattaacatataatatatgttttaaatatagaatttttaatgtttttaaatatattttcaaagtacataaaa

SEQ ID NO: 4058 - DNA, 4755 bp, Homo sapiens
  source 1..4755: mol_type = genomic DNA
cacacacacacacacacacagagagaacatctctagtaaaaagaaaagttgagctttcttagctagatgtgtgtattagccagaaaaagccaaggagtgaagggttttagagaactggaggagataaagtggagtctgcatatgggaggcatttgaaatggacttaaatgtctttttaatgctgactttttcagttttctccttaccagacacattgttttcatgacattagccccaggcatagacacatcattaaaatgaacatgtcaaaaaatgatttctgtttagaaataagcaaaacattttcagttgtgaccacccaggtgtagaataaagaacagtggaattgggagccctgagttctaacataaactttcttcatgacataaggcaagtcttctatggcctttggtttccttacctgtaaaacaggatggctcaatgaaattatctttcttctttgctataatagagtatctctgtgggaagaggaaaaaaaaagtcaatttaaaggctccttatagttccccaactgctgttttattgtgctattcatgcctagacatcacatagctagaaaggcccatcagacccctcaggccactgctgttcctgtcacacattcctgcaaaggaccatgttgctaacttgaaaaaaattactattaattacacttgcagttgttgcttagtaacatttatgattttgtgtttctcgtgacagcatgagcagagatcattaaaaattaaacttacaaagctgctaaagtgggaagaaggagaacttgaagccacaatttttgcacttgcttagaagccatctaatctcaggttatatgctagatcttgggggcaaacactgcatgtctctggtttatattaaaccacatacagcacactactgacactgatttgtgtctggtgcagctggagtttatcaccaagacataaaaaaaccttgaccctgcagaatggcctggaattacaatcagatgggccacatggcatcccggtgaaagaaagccctaaccagttttctgtcttgtttctgctttctccctacagttccaccaggtgagaagagtgatgaccatccttttccttactatggttatttcatactttggttgcatgaaggctgcccccatgaaagaagcaaacatccgaggacaaggtggcttggcctacccaggtgtgcggacccatgggactctggagagcgtgaatgggcccaaggcaggttcaagaggcttgacatcattggctgacactttcgaacacgtgatagaagagctgttggatgaggaccagaaagttcggcccaatgaagaaaacaataaggacgcagacttgtacacgtccagggtgatgctcagtagtcaagtgcctttggagcctcctcttctctttctgctggaggaatacaaaaattacctagatgctgcaaacatgtccatgagggtccggcgccactctgaccctgcccgccgaggggagctgagcgtgtgtgacagtattagtgagtgggtaacggcggcagacaaaaagactgcagtggacatgtcgggcgggacggtcacagtccttgaaaaggtccctgtatcaaaaggccaactgaagcaatacttctacgagaccaagtgcaatcccatgggttacacaaaagaaggctgcaggggcatagacaaaaggcattggaactcccagtgccgaactacccagtcgtacgtgcgggcccttaccatggatagcaaaaagagaattggctggcgattcataaggatagacacttcttgtgtatgtacattgaccattaaaaggggaagatagtggatttatgttgtatagattagattatattgagacaaaaattatctatttgtatatatacataacagggtaaattattcagttaagaaaaaaataattttatgaactgcatgtataaatgaagtttatacagtacagtggttctacaatctatttattggacatgtccatgaccagaagggaaacagtcatttgcgcacaacttaaaaagtctgcattacattccttgataatgttgtggtttgttgccgttgccaagaactgaaaacataaaaagttaaaaaaaataataaattgcatgctgctttaattgtgaattgataataaactgtcctctttcagaaaacagaaaaaaacacacacacacacaacaaaaatttgaaccaaaacattccgtttacattttagacagtaagtatcttcgttcttgttagtactatatctgttttactgcttttaacttctgatagcgttggaattaaaacaatgtcaaggtgctgttgtcattgctttactggcttaggggatgggggatggggggtatatttttgtttgttttgtgtttttttttcgtttgtttgttttgttttttagttcccacagggagtagagatggggaaagaattcctacaatatatattctggctgataaaagatacatttgtatgttgtgaagatgtttgcaatatcgatcagatgactagaaagtgaataaaaattaaggcaactgaacaaaaaaatgctcacactccacatcccgtgatgcacctcccaggccccgctcattctttgggcgttggtcagagtaagctgcttttgacggaaggacctatgtttgctcagaacacattctttccccccctccccctctggtctcctctttgttttgttttaaggaagaaaaatcagttgcgcgttctgaaatattttaccactgctgtgaacaagtgaacacattgtgtcacatcatgacactcgtataagcatggagaacagtgatttttttttagaacagaaaacaacaaaaaataaccccaaaatgaagattattttttatgaggagtgaacatttgggtaaatcatggctaagcttaaaaaaaactcatggtgaggcttaacaatgtcttgtaagcaaaaggtagagccctgtatcaacccagaaacacctagatcagaacaggaatccacattgccagtgacatgagactgaacagccaaatggaggctatgtggagttggcattgcatttaccggcagtgcgggaggaatttctgagtggccatcccaaggtctaggtggaggtggggcatggtatttgagacattccaaaacgaaggcctctgaaggacccttcagaggtggctctggaatgacatgtgtcaagctgcttggacctcgtgctttaagtgcctacattatctaactgtgctcaagaggttctcgactggaggaccacactcaagccgacttatgcccaccatcccacctctggataattttgcataaaattggattagcctggagcaggttgggagccaaatgtggcatttgtgatcatgagattgatgcaatgagatagaagatgtttgctacctgaacacttattgctttgaaactagacttgaggaaaccagggtttatcttttgagaacttttggtaagggaaaagggaacaggaaaagaaaccccaaactcaggccgaatgatcaaggggacccataggaaatcttgtccagagacaagacttcgggaaggtgtctggacattcagaacaccaagacttgaaggtgccttgctcaatggaagaggccaggacagagctgacaaaattttgctccccagtgaaggccacagcaaccttctgcccatcctgtctgttcatggagagggtccctgcctcacctctgccattttgggttaggagaagtcaagttgggagcctgaaatagtggttcttggaaaaatggatccccagtgaaaactagagctctaagcccattcagcccatttcacacctgaaaatgttagtgatcaccacttggaccagcatccttaagtatcagaaagccccaagcaattgctgcatcttagtagggtgagggataagcaaaagaggatgttcaccataacccaggaatgaagataccatcagcaaagaatttcaatttgttcagtctttcatttagagctagtctttcacagtaccatctgaatacctctttgaaagaaggaagactttacgtagtgtagatttgttttgtgttgtttgaaaatattatctttgtaattatttttaatatgtaaggaatgcttggaatatctgctatatgtcaactttatgcagcttccttttgagggacaaatttaaaacaaacaaccccccatcacaaacttaaaggattgcaagggccagatctgttaagtggtttcataggagacacatccagcaattgtgtggtcagtggctcttttacccaataagatacatcacagtcacatgcttgatggtttatgttgacctaagatttattttgttaaaatctctctctgttgtgttcgttcttgttctgttttgttttgttttttaaagtcttgctgtggtctctttgtggcagaagtgtttcatgcatggcagcaggcctgttgcttttttatggcgattcccattgaaaatgtaagtaaatgtctgtggccttgttctctctatggtaaagatattattcaccatgtaaaacaaaaaacaatatttattgtattttagtatatttatataattatgttattgaaaaaaattggcattaaaacttaaccgcatcagaacctattgtaaatacaagttctatttaagtgtactaattaacatataatatatgttttaaatatagaatttttaatgtttttaaatatattttcaaagtacataaaa

SEQ ID NO: 4059 - DNA, 3976 bp, Homo sapiens
  source 1..3976: mol_type = genomic DNA
acacggctacctgctcccaggaattgagactgaagtggacttacaagtccgaagccaatgtagcttggaaaacttgggaggcggaattcctaccgctgggaactgaaagggtctgcgacactctcgggcaggccgaacccacatctctacccatcctgcgcccctcttctgaagcgccctccagggaagttaagagttttgactttcggggagtggttgggatgtacgtgggggattcttgactcgggttagtctctggggatgcagagccgggaagaggaatggttccaccaggtgagaagagtgatgaccatccttttccttactatggttatttcatactttggttgcatgaaggctgcccccatgaaagaagcaaacatccgaggacaaggtggcttggcctacccaggtgtgcggacccatgggactctggagagcgtgaatgggcccaaggcaggttcaagaggcttgacatcattggctgacactttcgaacacgtgatagaagagctgttggatgaggaccagaaagttcggcccaatgaagaaaacaataaggacgcagacttgtacacgtccagggtgatgctcagtagtcaagtgcctttggagcctcctcttctctttctgctggaggaatacaaaaattacctagatgctgcaaacatgtccatgagggtccggcgccactctgaccctgcccgccgaggggagctgagcgtgtgtgacagtattagtgagtgggtaacggcggcagacaaaaagactgcagtggacatgtcgggcgggacggtcacagtccttgaaaaggtccctgtatcaaaaggccaactgaagcaatacttctacgagaccaagtgcaatcccatgggttacacaaaagaaggctgcaggggcatagacaaaaggcattggaactcccagtgccgaactacccagtcgtacgtgcgggcccttaccatggatagcaaaaagagaattggctggcgattcataaggatagacacttcttgtgtatgtacattgaccattaaaaggggaagatagtggatttatgttgtatagattagattatattgagacaaaaattatctatttgtatatatacataacagggtaaattattcagttaagaaaaaaataattttatgaactgcatgtataaatgaagtttatacagtacagtggttctacaatctatttattggacatgtccatgaccagaagggaaacagtcatttgcgcacaacttaaaaagtctgcattacattccttgataatgttgtggtttgttgccgttgccaagaactgaaaacataaaaagttaaaaaaaataataaattgcatgctgctttaattgtgaattgataataaactgtcctctttcagaaaacagaaaaaaacacacacacacacaacaaaaatttgaaccaaaacattccgtttacattttagacagtaagtatcttcgttcttgttagtactatatctgttttactgcttttaacttctgatagcgttggaattaaaacaatgtcaaggtgctgttgtcattgctttactggcttaggggatgggggatggggggtatatttttgtttgttttgtgtttttttttcgtttgtttgttttgttttttagttcccacagggagtagagatggggaaagaattcctacaatatatattctggctgataaaagatacatttgtatgttgtgaagatgtttgcaatatcgatcagatgactagaaagtgaataaaaattaaggcaactgaacaaaaaaatgctcacactccacatcccgtgatgcacctcccaggccccgctcattctttgggcgttggtcagagtaagctgcttttgacggaaggacctatgtttgctcagaacacattctttccccccctccccctctggtctcctctttgttttgttttaaggaagaaaaatcagttgcgcgttctgaaatattttaccactgctgtgaacaagtgaacacattgtgtcacatcatgacactcgtataagcatggagaacagtgatttttttttagaacagaaaacaacaaaaaataaccccaaaatgaagattattttttatgaggagtgaacatttgggtaaatcatggctaagcttaaaaaaaactcatggtgaggcttaacaatgtcttgtaagcaaaaggtagagccctgtatcaacccagaaacacctagatcagaacaggaatccacattgccagtgacatgagactgaacagccaaatggaggctatgtggagttggcattgcatttaccggcagtgcgggaggaatttctgagtggccatcccaaggtctaggtggaggtggggcatggtatttgagacattccaaaacgaaggcctctgaaggacccttcagaggtggctctggaatgacatgtgtcaagctgcttggacctcgtgctttaagtgcctacattatctaactgtgctcaagaggttctcgactggaggaccacactcaagccgacttatgcccaccatcccacctctggataattttgcataaaattggattagcctggagcaggttgggagccaaatgtggcatttgtgatcatgagattgatgcaatgagatagaagatgtttgctacctgaacacttattgctttgaaactagacttgaggaaaccagggtttatcttttgagaacttttggtaagggaaaagggaacaggaaaagaaaccccaaactcaggccgaatgatcaaggggacccataggaaatcttgtccagagacaagacttcgggaaggtgtctggacattcagaacaccaagacttgaaggtgccttgctcaatggaagaggccaggacagagctgacaaaattttgctccccagtgaaggccacagcaaccttctgcccatcctgtctgttcatggagagggtccctgcctcacctctgccattttgggttaggagaagtcaagttgggagcctgaaatagtggttcttggaaaaatggatccccagtgaaaactagagctctaagcccattcagcccatttcacacctgaaaatgttagtgatcaccacttggaccagcatccttaagtatcagaaagccccaagcaattgctgcatcttagtagggtgagggataagcaaaagaggatgttcaccataacccaggaatgaagataccatcagcaaagaatttcaatttgttcagtctttcatttagagctagtctttcacagtaccatctgaatacctctttgaaagaaggaagactttacgtagtgtagatttgttttgtgttgtttgaaaatattatctttgtaattatttttaatatgtaaggaatgcttggaatatctgctatatgtcaactttatgcagcttccttttgagggacaaatttaaaacaaacaaccccccatcacaaacttaaaggattgcaagggccagatctgttaagtggtttcataggagacacatccagcaattgtgtggtcagtggctcttttacccaataagatacatcacagtcacatgcttgatggtttatgttgacctaagatttattttgttaaaatctctctctgttgtgttcgttcttgttctgttttgttttgttttttaaagtcttgctgtggtctctttgtggcagaagtgtttcatgcatggcagcaggcctgttgcttttttatggcgattcccattgaaaatgtaagtaaatgtctgtggccttgttctctctatggtaaagatattattcaccatgtaaaacaaaaaacaatatttattgtattttagtatatttatataattatgttattgaaaaaaattggcattaaaacttaaccgcatcagaacctattgtaaatacaagttctatttaagtgtactaattaacatataatatatgttttaaatatagaatttttaatgtttttaaatatattttcaaagtacataaaa

SEQ ID NO: 4060 - DNA, 4028 bp, Homo sapiens
  source 1..4028: mol_type = genomic DNA
acccactttcccattcaccgcggagagggctgctctcgctgccgctccccccggcgaactagcatgaaatctccctgcctctgccgagatcaaatggagcttctcgctgatggggtgcgagtattacctccgccatgcaatttccactatcaataatttaacttctttgctgcagaacagaaggagtacataccgggcaccaaagactcgcgccccctcccccctttaattaagcgaagggaacgtgaaaaaataatagagtgtgggagttttggggccgaagtctttcccggagcagctgccttgatggttactttgacaagtagtgactgaaaagttccaccaggtgagaagagtgatgaccatccttttccttactatggttatttcatactttggttgcatgaaggctgcccccatgaaagaagcaaacatccgaggacaaggtggcttggcctacccaggtgtgcggacccatgggactctggagagcgtgaatgggcccaaggcaggttcaagaggcttgacatcattggctgacactttcgaacacgtgatagaagagctgttggatgaggaccagaaagttcggcccaatgaagaaaacaataaggacgcagacttgtacacgtccagggtgatgctcagtagtcaagtgcctttggagcctcctcttctctttctgctggaggaatacaaaaattacctagatgctgcaaacatgtccatgagggtccggcgccactctgaccctgcccgccgaggggagctgagcgtgtgtgacagtattagtgagtgggtaacggcggcagacaaaaagactgcagtggacatgtcgggcgggacggtcacagtccttgaaaaggtccctgtatcaaaaggccaactgaagcaatacttctacgagaccaagtgcaatcccatgggttacacaaaagaaggctgcaggggcatagacaaaaggcattggaactcccagtgccgaactacccagtcgtacgtgcgggcccttaccatggatagcaaaaagagaattggctggcgattcataaggatagacacttcttgtgtatgtacattgaccattaaaaggggaagatagtggatttatgttgtatagattagattatattgagacaaaaattatctatttgtatatatacataacagggtaaattattcagttaagaaaaaaataattttatgaactgcatgtataaatgaagtttatacagtacagtggttctacaatctatttattggacatgtccatgaccagaagggaaacagtcatttgcgcacaacttaaaaagtctgcattacattccttgataatgttgtggtttgttgccgttgccaagaactgaaaacataaaaagttaaaaaaaataataaattgcatgctgctttaattgtgaattgataataaactgtcctctttcagaaaacagaaaaaaacacacacacacacaacaaaaatttgaaccaaaacattccgtttacattttagacagtaagtatcttcgttcttgttagtactatatctgttttactgcttttaacttctgatagcgttggaattaaaacaatgtcaaggtgctgttgtcattgctttactggcttaggggatgggggatggggggtatatttttgtttgttttgtgtttttttttcgtttgtttgttttgttttttagttcccacagggagtagagatggggaaagaattcctacaatatatattctggctgataaaagatacatttgtatgttgtgaagatgtttgcaatatcgatcagatgactagaaagtgaataaaaattaaggcaactgaacaaaaaaatgctcacactccacatcccgtgatgcacctcccaggccccgctcattctttgggcgttggtcagagtaagctgcttttgacggaaggacctatgtttgctcagaacacattctttccccccctccccctctggtctcctctttgttttgttttaaggaagaaaaatcagttgcgcgttctgaaatattttaccactgctgtgaacaagtgaacacattgtgtcacatcatgacactcgtataagcatggagaacagtgatttttttttagaacagaaaacaacaaaaaataaccccaaaatgaagattattttttatgaggagtgaacatttgggtaaatcatggctaagcttaaaaaaaactcatggtgaggcttaacaatgtcttgtaagcaaaaggtagagccctgtatcaacccagaaacacctagatcagaacaggaatccacattgccagtgacatgagactgaacagccaaatggaggctatgtggagttggcattgcatttaccggcagtgcgggaggaatttctgagtggccatcccaaggtctaggtggaggtggggcatggtatttgagacattccaaaacgaaggcctctgaaggacccttcagaggtggctctggaatgacatgtgtcaagctgcttggacctcgtgctttaagtgcctacattatctaactgtgctcaagaggttctcgactggaggaccacactcaagccgacttatgcccaccatcccacctctggataattttgcataaaattggattagcctggagcaggttgggagccaaatgtggcatttgtgatcatgagattgatgcaatgagatagaagatgtttgctacctgaacacttattgctttgaaactagacttgaggaaaccagggtttatcttttgagaacttttggtaagggaaaagggaacaggaaaagaaaccccaaactcaggccgaatgatcaaggggacccataggaaatcttgtccagagacaagacttcgggaaggtgtctggacattcagaacaccaagacttgaaggtgccttgctcaatggaagaggccaggacagagctgacaaaattttgctccccagtgaaggccacagcaaccttctgcccatcctgtctgttcatggagagggtccctgcctcacctctgccattttgggttaggagaagtcaagttgggagcctgaaatagtggttcttggaaaaatggatccccagtgaaaactagagctctaagcccattcagcccatttcacacctgaaaatgttagtgatcaccacttggaccagcatccttaagtatcagaaagccccaagcaattgctgcatcttagtagggtgagggataagcaaaagaggatgttcaccataacccaggaatgaagataccatcagcaaagaatttcaatttgttcagtctttcatttagagctagtctttcacagtaccatctgaatacctctttgaaagaaggaagactttacgtagtgtagatttgttttgtgttgtttgaaaatattatctttgtaattatttttaatatgtaaggaatgcttggaatatctgctatatgtcaactttatgcagcttccttttgagggacaaatttaaaacaaacaaccccccatcacaaacttaaaggattgcaagggccagatctgttaagtggtttcataggagacacatccagcaattgtgtggtcagtggctcttttacccaataagatacatcacagtcacatgcttgatggtttatgttgacctaagatttattttgttaaaatctctctctgttgtgttcgttcttgttctgttttgttttgttttttaaagtcttgctgtggtctctttgtggcagaagtgtttcatgcatggcagcaggcctgttgcttttttatggcgattcccattgaaaatgtaagtaaatgtctgtggccttgttctctctatggtaaagatattattcaccatgtaaaacaaaaaacaatatttattgtattttagtatatttatataattatgttattgaaaaaaattggcattaaaacttaaccgcatcagaacctattgtaaatacaagttctatttaagtgtactaattaacatataatatatgttttaaatatagaatttttaatgtttttaaatatattttcaaagtacataaaa

SEQ ID NO: 4061 - DNA, 4125 bp, Homo sapiens
  source 1..4125: mol_type = genomic DNA
aatatcaagtatcacttaattagagatttttaagccttttcctcctgctgtgccgggtgtgtaatccgggcgataggagtccattcagcaccttggacagagccaacggatttgtccgaggtggcggtacccccaggtagtcttcttggccccgctgtaaagccaaccctgtgtcgcccttaaaaagcgtcttttctgaggttcggctcacactgagatcggggctggagagagagtcagattttggagcggagcgtttggaaagcgagccccagtttggtcccctcattgagctcgctgaagttggcttcctagcggtgtaggctggaatagactcttggcaagctccgggttggtatactgggttaactttgggaaatgcaagtgtttatctccaggatctagccaccggggtggtgtaagccgcaaagaagttccaccaggtgagaagagtgatgaccatccttttccttactatggttatttcatactttggttgcatgaaggctgcccccatgaaagaagcaaacatccgaggacaaggtggcttggcctacccaggtgtgcggacccatgggactctggagagcgtgaatgggcccaaggcaggttcaagaggcttgacatcattggctgacactttcgaacacgtgatagaagagctgttggatgaggaccagaaagttcggcccaatgaagaaaacaataaggacgcagacttgtacacgtccagggtgatgctcagtagtcaagtgcctttggagcctcctcttctctttctgctggaggaatacaaaaattacctagatgctgcaaacatgtccatgagggtccggcgccactctgaccctgcccgccgaggggagctgagcgtgtgtgacagtattagtgagtgggtaacggcggcagacaaaaagactgcagtggacatgtcgggcgggacggtcacagtccttgaaaaggtccctgtatcaaaaggccaactgaagcaatacttctacgagaccaagtgcaatcccatgggttacacaaaagaaggctgcaggggcatagacaaaaggcattggaactcccagtgccgaactacccagtcgtacgtgcgggcccttaccatggatagcaaaaagagaattggctggcgattcataaggatagacacttcttgtgtatgtacattgaccattaaaaggggaagatagtggatttatgttgtatagattagattatattgagacaaaaattatctatttgtatatatacataacagggtaaattattcagttaagaaaaaaataattttatgaactgcatgtataaatgaagtttatacagtacagtggttctacaatctatttattggacatgtccatgaccagaagggaaacagtcatttgcgcacaacttaaaaagtctgcattacattccttgataatgttgtggtttgttgccgttgccaagaactgaaaacataaaaagttaaaaaaaataataaattgcatgctgctttaattgtgaattgataataaactgtcctctttcagaaaacagaaaaaaacacacacacacacaacaaaaatttgaaccaaaacattccgtttacattttagacagtaagtatcttcgttcttgttagtactatatctgttttactgcttttaacttctgatagcgttggaattaaaacaatgtcaaggtgctgttgtcattgctttactggcttaggggatgggggatggggggtatatttttgtttgttttgtgtttttttttcgtttgtttgttttgttttttagttcccacagggagtagagatggggaaagaattcctacaatatatattctggctgataaaagatacatttgtatgttgtgaagatgtttgcaatatcgatcagatgactagaaagtgaataaaaattaaggcaactgaacaaaaaaatgctcacactccacatcccgtgatgcacctcccaggccccgctcattctttgggcgttggtcagagtaagctgcttttgacggaaggacctatgtttgctcagaacacattctttccccccctccccctctggtctcctctttgttttgttttaaggaagaaaaatcagttgcgcgttctgaaatattttaccactgctgtgaacaagtgaacacattgtgtcacatcatgacactcgtataagcatggagaacagtgatttttttttagaacagaaaacaacaaaaaataaccccaaaatgaagattattttttatgaggagtgaacatttgggtaaatcatggctaagcttaaaaaaaactcatggtgaggcttaacaatgtcttgtaagcaaaaggtagagccctgtatcaacccagaaacacctagatcagaacaggaatccacattgccagtgacatgagactgaacagccaaatggaggctatgtggagttggcattgcatttaccggcagtgcgggaggaatttctgagtggccatcccaaggtctaggtggaggtggggcatggtatttgagacattccaaaacgaaggcctctgaaggacccttcagaggtggctctggaatgacatgtgtcaagctgcttggacctcgtgctttaagtgcctacattatctaactgtgctcaagaggttctcgactggaggaccacactcaagccgacttatgcccaccatcccacctctggataattttgcataaaattggattagcctggagcaggttgggagccaaatgtggcatttgtgatcatgagattgatgcaatgagatagaagatgtttgctacctgaacacttattgctttgaaactagacttgaggaaaccagggtttatcttttgagaacttttggtaagggaaaagggaacaggaaaagaaaccccaaactcaggccgaatgatcaaggggacccataggaaatcttgtccagagacaagacttcgggaaggtgtctggacattcagaacaccaagacttgaaggtgccttgctcaatggaagaggccaggacagagctgacaaaattttgctccccagtgaaggccacagcaaccttctgcccatcctgtctgttcatggagagggtccctgcctcacctctgccattttgggttaggagaagtcaagttgggagcctgaaatagtggttcttggaaaaatggatccccagtgaaaactagagctctaagcccattcagcccatttcacacctgaaaatgttagtgatcaccacttggaccagcatccttaagtatcagaaagccccaagcaattgctgcatcttagtagggtgagggataagcaaaagaggatgttcaccataacccaggaatgaagataccatcagcaaagaatttcaatttgttcagtctttcatttagagctagtctttcacagtaccatctgaatacctctttgaaagaaggaagactttacgtagtgtagatttgttttgtgttgtttgaaaatattatctttgtaattatttttaatatgtaaggaatgcttggaatatctgctatatgtcaactttatgcagcttccttttgagggacaaatttaaaacaaacaaccccccatcacaaacttaaaggattgcaagggccagatctgttaagtggtttcataggagacacatccagcaattgtgtggtcagtggctcttttacccaataagatacatcacagtcacatgcttgatggtttatgttgacctaagatttattttgttaaaatctctctctgttgtgttcgttcttgttctgttttgttttgttttttaaagtcttgctgtggtctctttgtggcagaagtgtttcatgcatggcagcaggcctgttgcttttttatggcgattcccattgaaaatgtaagtaaatgtctgtggccttgttctctctatggtaaagatattattcaccatgtaaaacaaaaaacaatatttattgtattttagtatatttatataattatgttattgaaaaaaattggcattaaaacttaaccgcatcagaacctattgtaaatacaagttctatttaagtgtactaattaacatataatatatgttttaaatatagaatttttaatgtttttaaatatattttcaaagtacataaaa

SEQ ID NO: 4062 - DNA, 4338 bp, Homo sapiens
  source 1..4338: mol_type = genomic DNA
attattaaagcggtagtctgccggcgctgataagcaacaagttccccagcggtcttcccgccctagcctgacaaggcgaaggttttcttacctggcgacagggaaatctcccgagccgaattcagcttcgccggagccccaggtgtgacctgcgtagtgggcaagggagcggtgtgcaggctgagtttttttttttacaggggtaccctgaaactcctcactttctctgggaactttcagtgccaggacccagtaacgggcggttagaaggcagccctaggaaacacctgctacatagcagggcagttgggcaatcattggtaacctcgctcattcattagaatcacgtaagaactcaaaaggaaacgtgtctctcggagtgagggcgtttgcgtaaatctataggtttttcgacatcgatgccagttgctttgtcttctgtagtcgccaaggtggttgagagtttaagcttgcggatattgcaaagggttattagattcataagtcacaccaagtggtgggcgatccactgagcaaagccgaacttctcacatgatgacttcaaacaagacacattaccttccagcatctgttggggagacgagattttaagacacttgagtctccaggacagcaaaggcacaatgttccaccaggtgagaagagtgatgaccatccttttccttactatggttatttcatactttggttgcatgaaggctgcccccatgaaagaagcaaacatccgaggacaaggtggcttggcctacccaggtgtgcggacccatgggactctggagagcgtgaatgggcccaaggcaggttcaagaggcttgacatcattggctgacactttcgaacacgtgatagaagagctgttggatgaggaccagaaagttcggcccaatgaagaaaacaataaggacgcagacttgtacacgtccagggtgatgctcagtagtcaagtgcctttggagcctcctcttctctttctgctggaggaatacaaaaattacctagatgctgcaaacatgtccatgagggtccggcgccactctgaccctgcccgccgaggggagctgagcgtgtgtgacagtattagtgagtgggtaacggcggcagacaaaaagactgcagtggacatgtcgggcgggacggtcacagtccttgaaaaggtccctgtatcaaaaggccaactgaagcaatacttctacgagaccaagtgcaatcccatgggttacacaaaagaaggctgcaggggcatagacaaaaggcattggaactcccagtgccgaactacccagtcgtacgtgcgggcccttaccatggatagcaaaaagagaattggctggcgattcataaggatagacacttcttgtgtatgtacattgaccattaaaaggggaagatagtggatttatgttgtatagattagattatattgagacaaaaattatctatttgtatatatacataacagggtaaattattcagttaagaaaaaaataattttatgaactgcatgtataaatgaagtttatacagtacagtggttctacaatctatttattggacatgtccatgaccagaagggaaacagtcatttgcgcacaacttaaaaagtctgcattacattccttgataatgttgtggtttgttgccgttgccaagaactgaaaacataaaaagttaaaaaaaataataaattgcatgctgctttaattgtgaattgataataaactgtcctctttcagaaaacagaaaaaaacacacacacacacaacaaaaatttgaaccaaaacattccgtttacattttagacagtaagtatcttcgttcttgttagtactatatctgttttactgcttttaacttctgatagcgttggaattaaaacaatgtcaaggtgctgttgtcattgctttactggcttaggggatgggggatggggggtatatttttgtttgttttgtgtttttttttcgtttgtttgttttgttttttagttcccacagggagtagagatggggaaagaattcctacaatatatattctggctgataaaagatacatttgtatgttgtgaagatgtttgcaatatcgatcagatgactagaaagtgaataaaaattaaggcaactgaacaaaaaaatgctcacactccacatcccgtgatgcacctcccaggccccgctcattctttgggcgttggtcagagtaagctgcttttgacggaaggacctatgtttgctcagaacacattctttccccccctccccctctggtctcctctttgttttgttttaaggaagaaaaatcagttgcgcgttctgaaatattttaccactgctgtgaacaagtgaacacattgtgtcacatcatgacactcgtataagcatggagaacagtgatttttttttagaacagaaaacaacaaaaaataaccccaaaatgaagattattttttatgaggagtgaacatttgggtaaatcatggctaagcttaaaaaaaactcatggtgaggcttaacaatgtcttgtaagcaaaaggtagagccctgtatcaacccagaaacacctagatcagaacaggaatccacattgccagtgacatgagactgaacagccaaatggaggctatgtggagttggcattgcatttaccggcagtgcgggaggaatttctgagtggccatcccaaggtctaggtggaggtggggcatggtatttgagacattccaaaacgaaggcctctgaaggacccttcagaggtggctctggaatgacatgtgtcaagctgcttggacctcgtgctttaagtgcctacattatctaactgtgctcaagaggttctcgactggaggaccacactcaagccgacttatgcccaccatcccacctctggataattttgcataaaattggattagcctggagcaggttgggagccaaatgtggcatttgtgatcatgagattgatgcaatgagatagaagatgtttgctacctgaacacttattgctttgaaactagacttgaggaaaccagggtttatcttttgagaacttttggtaagggaaaagggaacaggaaaagaaaccccaaactcaggccgaatgatcaaggggacccataggaaatcttgtccagagacaagacttcgggaaggtgtctggacattcagaacaccaagacttgaaggtgccttgctcaatggaagaggccaggacagagctgacaaaattttgctccccagtgaaggccacagcaaccttctgcccatcctgtctgttcatggagagggtccctgcctcacctctgccattttgggttaggagaagtcaagttgggagcctgaaatagtggttcttggaaaaatggatccccagtgaaaactagagctctaagcccattcagcccatttcacacctgaaaatgttagtgatcaccacttggaccagcatccttaagtatcagaaagccccaagcaattgctgcatcttagtagggtgagggataagcaaaagaggatgttcaccataacccaggaatgaagataccatcagcaaagaatttcaatttgttcagtctttcatttagagctagtctttcacagtaccatctgaatacctctttgaaagaaggaagactttacgtagtgtagatttgttttgtgttgtttgaaaatattatctttgtaattatttttaatatgtaaggaatgcttggaatatctgctatatgtcaactttatgcagcttccttttgagggacaaatttaaaacaaacaaccccccatcacaaacttaaaggattgcaagggccagatctgttaagtggtttcataggagacacatccagcaattgtgtggtcagtggctcttttacccaataagatacatcacagtcacatgcttgatggtttatgttgacctaagatttattttgttaaaatctctctctgttgtgttcgttcttgttctgttttgttttgttttttaaagtcttgctgtggtctctttgtggcagaagtgtttcatgcatggcagcaggcctgttgcttttttatggcgattcccattgaaaatgtaagtaaatgtctgtggccttgttctctctatggtaaagatattattcaccatgtaaaacaaaaaacaatatttattgtattttagtatatttatataattatgttattgaaaaaaattggcattaaaacttaaccgcatcagaacctattgtaaatacaagttctatttaagtgtactaattaacatataatatatgttttaaatatagaatttttaatgtttttaaatatattttcaaagtacataaaa

SEQ ID NO: 4063 - DNA, 3774 bp, Homo sapiens
  source 1..3774: mol_type = genomic DNA
gtaaaccaatagcccccatgctctgtgcgatttcattgtgtgctcgcgttcgcaagctccgtagtgcaggaaggtgcgggaagttccaccaggtgagaagagtgatgaccatccttttccttactatggttatttcatactttggttgcatgaaggctgcccccatgaaagaagcaaacatccgaggacaaggtggcttggcctacccaggtgtgcggacccatgggactctggagagcgtgaatgggcccaaggcaggttcaagaggcttgacatcattggctgacactttcgaacacgtgatagaagagctgttggatgaggaccagaaagttcggcccaatgaagaaaacaataaggacgcagacttgtacacgtccagggtgatgctcagtagtcaagtgcctttggagcctcctcttctctttctgctggaggaatacaaaaattacctagatgctgcaaacatgtccatgagggtccggcgccactctgaccctgcccgccgaggggagctgagcgtgtgtgacagtattagtgagtgggtaacggcggcagacaaaaagactgcagtggacatgtcgggcgggacggtcacagtccttgaaaaggtccctgtatcaaaaggccaactgaagcaatacttctacgagaccaagtgcaatcccatgggttacacaaaagaaggctgcaggggcatagacaaaaggcattggaactcccagtgccgaactacccagtcgtacgtgcgggcccttaccatggatagcaaaaagagaattggctggcgattcataaggatagacacttcttgtgtatgtacattgaccattaaaaggggaagatagtggatttatgttgtatagattagattatattgagacaaaaattatctatttgtatatatacataacagggtaaattattcagttaagaaaaaaataattttatgaactgcatgtataaatgaagtttatacagtacagtggttctacaatctatttattggacatgtccatgaccagaagggaaacagtcatttgcgcacaacttaaaaagtctgcattacattccttgataatgttgtggtttgttgccgttgccaagaactgaaaacataaaaagttaaaaaaaataataaattgcatgctgctttaattgtgaattgataataaactgtcctctttcagaaaacagaaaaaaacacacacacacacaacaaaaatttgaaccaaaacattccgtttacattttagacagtaagtatcttcgttcttgttagtactatatctgttttactgcttttaacttctgatagcgttggaattaaaacaatgtcaaggtgctgttgtcattgctttactggcttaggggatgggggatggggggtatatttttgtttgttttgtgtttttttttcgtttgtttgttttgttttttagttcccacagggagtagagatggggaaagaattcctacaatatatattctggctgataaaagatacatttgtatgttgtgaagatgtttgcaatatcgatcagatgactagaaagtgaataaaaattaaggcaactgaacaaaaaaatgctcacactccacatcccgtgatgcacctcccaggccccgctcattctttgggcgttggtcagagtaagctgcttttgacggaaggacctatgtttgctcagaacacattctttccccccctccccctctggtctcctctttgttttgttttaaggaagaaaaatcagttgcgcgttctgaaatattttaccactgctgtgaacaagtgaacacattgtgtcacatcatgacactcgtataagcatggagaacagtgatttttttttagaacagaaaacaacaaaaaataaccccaaaatgaagattattttttatgaggagtgaacatttgggtaaatcatggctaagcttaaaaaaaactcatggtgaggcttaacaatgtcttgtaagcaaaaggtagagccctgtatcaacccagaaacacctagatcagaacaggaatccacattgccagtgacatgagactgaacagccaaatggaggctatgtggagttggcattgcatttaccggcagtgcgggaggaatttctgagtggccatcccaaggtctaggtggaggtggggcatggtatttgagacattccaaaacgaaggcctctgaaggacccttcagaggtggctctggaatgacatgtgtcaagctgcttggacctcgtgctttaagtgcctacattatctaactgtgctcaagaggttctcgactggaggaccacactcaagccgacttatgcccaccatcccacctctggataattttgcataaaattggattagcctggagcaggttgggagccaaatgtggcatttgtgatcatgagattgatgcaatgagatagaagatgtttgctacctgaacacttattgctttgaaactagacttgaggaaaccagggtttatcttttgagaacttttggtaagggaaaagggaacaggaaaagaaaccccaaactcaggccgaatgatcaaggggacccataggaaatcttgtccagagacaagacttcgggaaggtgtctggacattcagaacaccaagacttgaaggtgccttgctcaatggaagaggccaggacagagctgacaaaattttgctccccagtgaaggccacagcaaccttctgcccatcctgtctgttcatggagagggtccctgcctcacctctgccattttgggttaggagaagtcaagttgggagcctgaaatagtggttcttggaaaaatggatccccagtgaaaactagagctctaagcccattcagcccatttcacacctgaaaatgttagtgatcaccacttggaccagcatccttaagtatcagaaagccccaagcaattgctgcatcttagtagggtgagggataagcaaaagaggatgttcaccataacccaggaatgaagataccatcagcaaagaatttcaatttgttcagtctttcatttagagctagtctttcacagtaccatctgaatacctctttgaaagaaggaagactttacgtagtgtagatttgttttgtgttgtttgaaaatattatctttgtaattatttttaatatgtaaggaatgcttggaatatctgctatatgtcaactttatgcagcttccttttgagggacaaatttaaaacaaacaaccccccatcacaaacttaaaggattgcaagggccagatctgttaagtggtttcataggagacacatccagcaattgtgtggtcagtggctcttttacccaataagatacatcacagtcacatgcttgatggtttatgttgacctaagatttattttgttaaaatctctctctgttgtgttcgttcttgttctgttttgttttgttttttaaagtcttgctgtggtctctttgtggcagaagtgtttcatgcatggcagcaggcctgttgcttttttatggcgattcccattgaaaatgtaagtaaatgtctgtggccttgttctctctatggtaaagatattattcaccatgtaaaacaaaaaacaatatttattgtattttagtatatttatataattatgttattgaaaaaaattggcattaaaacttaaccgcatcagaacctattgtaaatacaagttctatttaagtgtactaattaacatataatatatgttttaaatatagaatttttaatgtttttaaatatattttcaaagtacataaaa

SEQ ID NO: 4064 - DNA, 3928 bp, Homo sapiens
  source 1..3928: mol_type = genomic DNA
cttccaccccgccccctcctccagcctccatccctccctcattctatctcttcctctccgtcgccctcgctcctcgctggatgcttctttctgggttttcttttttttttcccttctgtcctccctccccgcgagtttcgggcgctggcttagagggttcccgctttctcaagggaaggggagctgccgagaccgcgctccgctccccagccgggccggatgcctcactgagcccagttccaccaggtgagaagagtgatgaccatccttttccttactatggttatttcatactttggttgcatgaaggctgcccccatgaaagaagcaaacatccgaggacaaggtggcttggcctacccaggtgtgcggacccatgggactctggagagcgtgaatgggcccaaggcaggttcaagaggcttgacatcattggctgacactttcgaacacgtgatagaagagctgttggatgaggaccagaaagttcggcccaatgaagaaaacaataaggacgcagacttgtacacgtccagggtgatgctcagtagtcaagtgcctttggagcctcctcttctctttctgctggaggaatacaaaaattacctagatgctgcaaacatgtccatgagggtccggcgccactctgaccctgcccgccgaggggagctgagcgtgtgtgacagtattagtgagtgggtaacggcggcagacaaaaagactgcagtggacatgtcgggcgggacggtcacagtccttgaaaaggtccctgtatcaaaaggccaactgaagcaatacttctacgagaccaagtgcaatcccatgggttacacaaaagaaggctgcaggggcatagacaaaaggcattggaactcccagtgccgaactacccagtcgtacgtgcgggcccttaccatggatagcaaaaagagaattggctggcgattcataaggatagacacttcttgtgtatgtacattgaccattaaaaggggaagatagtggatttatgttgtatagattagattatattgagacaaaaattatctatttgtatatatacataacagggtaaattattcagttaagaaaaaaataattttatgaactgcatgtataaatgaagtttatacagtacagtggttctacaatctatttattggacatgtccatgaccagaagggaaacagtcatttgcgcacaacttaaaaagtctgcattacattccttgataatgttgtggtttgttgccgttgccaagaactgaaaacataaaaagttaaaaaaaataataaattgcatgctgctttaattgtgaattgataataaactgtcctctttcagaaaacagaaaaaaacacacacacacacaacaaaaatttgaaccaaaacattccgtttacattttagacagtaagtatcttcgttcttgttagtactatatctgttttactgcttttaacttctgatagcgttggaattaaaacaatgtcaaggtgctgttgtcattgctttactggcttaggggatgggggatggggggtatatttttgtttgttttgtgtttttttttcgtttgtttgttttgttttttagttcccacagggagtagagatggggaaagaattcctacaatatatattctggctgataaaagatacatttgtatgttgtgaagatgtttgcaatatcgatcagatgactagaaagtgaataaaaattaaggcaactgaacaaaaaaatgctcacactccacatcccgtgatgcacctcccaggccccgctcattctttgggcgttggtcagagtaagctgcttttgacggaaggacctatgtttgctcagaacacattctttccccccctccccctctggtctcctctttgttttgttttaaggaagaaaaatcagttgcgcgttctgaaatattttaccactgctgtgaacaagtgaacacattgtgtcacatcatgacactcgtataagcatggagaacagtgatttttttttagaacagaaaacaacaaaaaataaccccaaaatgaagattattttttatgaggagtgaacatttgggtaaatcatggctaagcttaaaaaaaactcatggtgaggcttaacaatgtcttgtaagcaaaaggtagagccctgtatcaacccagaaacacctagatcagaacaggaatccacattgccagtgacatgagactgaacagccaaatggaggctatgtggagttggcattgcatttaccggcagtgcgggaggaatttctgagtggccatcccaaggtctaggtggaggtggggcatggtatttgagacattccaaaacgaaggcctctgaaggacccttcagaggtggctctggaatgacatgtgtcaagctgcttggacctcgtgctttaagtgcctacattatctaactgtgctcaagaggttctcgactggaggaccacactcaagccgacttatgcccaccatcccacctctggataattttgcataaaattggattagcctggagcaggttgggagccaaatgtggcatttgtgatcatgagattgatgcaatgagatagaagatgtttgctacctgaacacttattgctttgaaactagacttgaggaaaccagggtttatcttttgagaacttttggtaagggaaaagggaacaggaaaagaaaccccaaactcaggccgaatgatcaaggggacccataggaaatcttgtccagagacaagacttcgggaaggtgtctggacattcagaacaccaagacttgaaggtgccttgctcaatggaagaggccaggacagagctgacaaaattttgctccccagtgaaggccacagcaaccttctgcccatcctgtctgttcatggagagggtccctgcctcacctctgccattttgggttaggagaagtcaagttgggagcctgaaatagtggttcttggaaaaatggatccccagtgaaaactagagctctaagcccattcagcccatttcacacctgaaaatgttagtgatcaccacttggaccagcatccttaagtatcagaaagccccaagcaattgctgcatcttagtagggtgagggataagcaaaagaggatgttcaccataacccaggaatgaagataccatcagcaaagaatttcaatttgttcagtctttcatttagagctagtctttcacagtaccatctgaatacctctttgaaagaaggaagactttacgtagtgtagatttgttttgtgttgtttgaaaatattatctttgtaattatttttaatatgtaaggaatgcttggaatatctgctatatgtcaactttatgcagcttccttttgagggacaaatttaaaacaaacaaccccccatcacaaacttaaaggattgcaagggccagatctgttaagtggtttcataggagacacatccagcaattgtgtggtcagtggctcttttacccaataagatacatcacagtcacatgcttgatggtttatgttgacctaagatttattttgttaaaatctctctctgttgtgttcgttcttgttctgttttgttttgttttttaaagtcttgctgtggtctctttgtggcagaagtgtttcatgcatggcagcaggcctgttgcttttttatggcgattcccattgaaaatgtaagtaaatgtctgtggccttgttctctctatggtaaagatattattcaccatgtaaaacaaaaaacaatatttattgtattttagtatatttatataattatgttattgaaaaaaattggcattaaaacttaaccgcatcagaacctattgtaaatacaagttctatttaagtgtactaattaacatataatatatgttttaaatatagaatttttaatgtttttaaatatattttcaaagtacataaaa

SEQ ID NO: 4065 - DNA, 3764 bp, Homo sapiens
  source 1..3764: mol_type = genomic DNA
gtaaaccaatagcccccatgctctgtgcgatttcattgtgtgctcgcgttcgcaagctccgtagtgcaggaagttccaccaggtgagaagagtgatgaccatccttttccttactatggttatttcatactttggttgcatgaaggctgcccccatgaaagaagcaaacatccgaggacaaggtggcttggcctacccaggtgtgcggacccatgggactctggagagcgtgaatgggcccaaggcaggttcaagaggcttgacatcattggctgacactttcgaacacgtgatagaagagctgttggatgaggaccagaaagttcggcccaatgaagaaaacaataaggacgcagacttgtacacgtccagggtgatgctcagtagtcaagtgcctttggagcctcctcttctctttctgctggaggaatacaaaaattacctagatgctgcaaacatgtccatgagggtccggcgccactctgaccctgcccgccgaggggagctgagcgtgtgtgacagtattagtgagtgggtaacggcggcagacaaaaagactgcagtggacatgtcgggcgggacggtcacagtccttgaaaaggtccctgtatcaaaaggccaactgaagcaatacttctacgagaccaagtgcaatcccatgggttacacaaaagaaggctgcaggggcatagacaaaaggcattggaactcccagtgccgaactacccagtcgtacgtgcgggcccttaccatggatagcaaaaagagaattggctggcgattcataaggatagacacttcttgtgtatgtacattgaccattaaaaggggaagatagtggatttatgttgtatagattagattatattgagacaaaaattatctatttgtatatatacataacagggtaaattattcagttaagaaaaaaataattttatgaactgcatgtataaatgaagtttatacagtacagtggttctacaatctatttattggacatgtccatgaccagaagggaaacagtcatttgcgcacaacttaaaaagtctgcattacattccttgataatgttgtggtttgttgccgttgccaagaactgaaaacataaaaagttaaaaaaaataataaattgcatgctgctttaattgtgaattgataataaactgtcctctttcagaaaacagaaaaaaacacacacacacacaacaaaaatttgaaccaaaacattccgtttacattttagacagtaagtatcttcgttcttgttagtactatatctgttttactgcttttaacttctgatagcgttggaattaaaacaatgtcaaggtgctgttgtcattgctttactggcttaggggatgggggatggggggtatatttttgtttgttttgtgtttttttttcgtttgtttgttttgttttttagttcccacagggagtagagatggggaaagaattcctacaatatatattctggctgataaaagatacatttgtatgttgtgaagatgtttgcaatatcgatcagatgactagaaagtgaataaaaattaaggcaactgaacaaaaaaatgctcacactccacatcccgtgatgcacctcccaggccccgctcattctttgggcgttggtcagagtaagctgcttttgacggaaggacctatgtttgctcagaacacattctttccccccctccccctctggtctcctctttgttttgttttaaggaagaaaaatcagttgcgcgttctgaaatattttaccactgctgtgaacaagtgaacacattgtgtcacatcatgacactcgtataagcatggagaacagtgatttttttttagaacagaaaacaacaaaaaataaccccaaaatgaagattattttttatgaggagtgaacatttgggtaaatcatggctaagcttaaaaaaaactcatggtgaggcttaacaatgtcttgtaagcaaaaggtagagccctgtatcaacccagaaacacctagatcagaacaggaatccacattgccagtgacatgagactgaacagccaaatggaggctatgtggagttggcattgcatttaccggcagtgcgggaggaatttctgagtggccatcccaaggtctaggtggaggtggggcatggtatttgagacattccaaaacgaaggcctctgaaggacccttcagaggtggctctggaatgacatgtgtcaagctgcttggacctcgtgctttaagtgcctacattatctaactgtgctcaagaggttctcgactggaggaccacactcaagccgacttatgcccaccatcccacctctggataattttgcataaaattggattagcctggagcaggttgggagccaaatgtggcatttgtgatcatgagattgatgcaatgagatagaagatgtttgctacctgaacacttattgctttgaaactagacttgaggaaaccagggtttatcttttgagaacttttggtaagggaaaagggaacaggaaaagaaaccccaaactcaggccgaatgatcaaggggacccataggaaatcttgtccagagacaagacttcgggaaggtgtctggacattcagaacaccaagacttgaaggtgccttgctcaatggaagaggccaggacagagctgacaaaattttgctccccagtgaaggccacagcaaccttctgcccatcctgtctgttcatggagagggtccctgcctcacctctgccattttgggttaggagaagtcaagttgggagcctgaaatagtggttcttggaaaaatggatccccagtgaaaactagagctctaagcccattcagcccatttcacacctgaaaatgttagtgatcaccacttggaccagcatccttaagtatcagaaagccccaagcaattgctgcatcttagtagggtgagggataagcaaaagaggatgttcaccataacccaggaatgaagataccatcagcaaagaatttcaatttgttcagtctttcatttagagctagtctttcacagtaccatctgaatacctctttgaaagaaggaagactttacgtagtgtagatttgttttgtgttgtttgaaaatattatctttgtaattatttttaatatgtaaggaatgcttggaatatctgctatatgtcaactttatgcagcttccttttgagggacaaatttaaaacaaacaaccccccatcacaaacttaaaggattgcaagggccagatctgttaagtggtttcataggagacacatccagcaattgtgtggtcagtggctcttttacccaataagatacatcacagtcacatgcttgatggtttatgttgacctaagatttattttgttaaaatctctctctgttgtgttcgttcttgttctgttttgttttgttttttaaagtcttgctgtggtctctttgtggcagaagtgtttcatgcatggcagcaggcctgttgcttttttatggcgattcccattgaaaatgtaagtaaatgtctgtggccttgttctctctatggtaaagatattattcaccatgtaaaacaaaaaacaatatttattgtattttagtatatttatataattatgttattgaaaaaaattggcattaaaacttaaccgcatcagaacctattgtaaatacaagttctatttaagtgtactaattaacatataatatatgttttaaatatagaatttttaatgtttttaaatatattttcaaagtacataaaa

SEQ ID NO: 4066 - DNA, 3648 bp, Homo sapiens
  source 1..3648: mol_type = genomic DNA
ggatcagctgactcgcctggctctgagccccgccgccgcgctcgggctccgtcagtttcctcggcagcggtaggcgagagcacgcggaggagcgtgcgcgggggccccgggagacggcggcggtggcggcgcgggcagagcaaggacgcggcggatcccactcgcacagcagcgcactcggtgccccgcgcagggtcgcgatgctgcccggtttggcactgctcctgctggccgcctggacggctcgggcgctggaggtacccactgatggtaatgctggcctgctggctgaaccccagattgccatgttctgtggcagactgaacatgcacatgaatgtccagaatgggaagtgggattcagatccatcagggaccaaaacctgcattgataccaaggaaggcatcctgcagtattgccaagaagtctaccctgaactgcagatcaccaatgtggtagaagccaaccaaccagtgaccatccagaactggtgcaagcggggccgcaagcagtgcaagacccatccccactttgtgattccctaccgctgcttagttggtgagtttgtaagtgatgcccttctcgttcctgacaagtgcaaattcttacaccaggagaggatggatgtttgcgaaactcatcttcactggcacaccgtcgccaaagagacatgcagtgagaagagtaccaacttgcatgactacggcatgttgctgccctgcggaattgacaagttccgaggggtagagtttgtgtgttgcccactggctgaagaaagtgacaatgtggattctgctgatgcggaggaggatgactcggatgtctggtggggcggagcagacacagactatgcagatgggagtgaagacaaagtagtagaagtagcagaggaggaagaagtggctgaggtggaagaagaagaagccgatgatgacgaggacgatgaggatggtgatgaggtagaggaagaggctgaggaaccctacgaagaagccacagagagaaccaccagcattgccaccaccaccaccaccaccacagagtctgtggaagaggtggttcgagaggtgtgctctgaacaagccgagacggggccgtgccgagcaatgatctcccgctggtactttgatgtgactgaagggaagtgtgccccattcttttacggcggatgtggcggcaaccggaacaactttgacacagaagagtactgcatggccgtgtgtggcagcgccatgtcccaaagtttactcaagactacccaggaacctcttgcccgagatcctgttaaacttcctacaacagcagccagtacccctgatgccgttgacaagtatctcgagacacctggggatgagaatgaacatgcccatttccagaaagccaaagagaggcttgaggccaagcaccgagagagaatgtcccaggtcatgagagaatgggaagaggcagaacgtcaagcaaagaacttgcctaaagctgataagaaggcagttatccagcatttccaggagaaagtggaatctttggaacaggaagcagccaacgagagacagcagctggtggagacacacatggccagagtggaagccatgctcaatgaccgccgccgcctggccctggagaactacatcaccgctctgcaggctgttcctcctcggcctcgtcacgtgttcaatatgctaaagaagtatgtccgcgcagaacagaaggacagacagcacaccctaaagcatttcgagcatgtgcgcatggtggatcccaagaaagccgctcagatccggtcccaggttatgacacacctccgtgtgatttatgagcgcatgaatcagtctctctccctgctctacaacgtgcctgcagtggccgaggagattcaggatgaagttgatgagctgcttcagaaagagcaaaactattcagatgacgtcttggccaacatgattagtgaaccaaggatcagttacggaaacgatgctctcatgccatctttgaccgaaacgaaaaccaccgtggagctccttcccgtgaatggagagttcagcctggacgatctccagccgtggcattcttttggggctgactctgtgccagccaacacagaaaacgaagttgagcctgttgatgcccgccctgctgccgaccgaggactgaccactcgaccaggttctgggttgacaaatatcaagacggaggagatctctgaagtgaagatggatgcagaattccgacatgactcaggatatgaagttcatcatcaaaaattggtgttctttgcagaagatgtgggttcaaacaaaggtgcaatcattggactcatggtgggcggtgttgtcatagcgacagtgatcgtcatcaccttggtgatgctgaagaagaaacagtacacatccattcatcatggtgtggtggaggttgacgccgctgtcaccccagaggagcgccacctgtccaagatgcagcagaacggctacgaaaatccaacctacaagttctttgagcagatgcagaactagacccccgccacagcagcctctgaagttggacagcaaaaccattgcttcactacccatcggtgtccatttatagaataatgtgggaagaaacaaacccgttttatgatttactcattatcgccttttgacagctgtgctgtaacacaagtagatgcctgaacttgaattaatccacacatcagtaatgtattctatctctctttacattttggtctctatactacattattaatgggttttgtgtactgtaaagaatttagctgtatcaaactagtgcatgaatagattctctcctgattatttatcacatagccccttagccagttgtatattattcttgtggtttgtgacccaattaagtcctactttacatatgctttaagaatcgatgggggatgcttcatgtgaacgtgggagttcagctgcttctcttgcctaagtattcctttcctgatcactatgcattttaaagttaaacatttttaagtatttcagatgctttagagagattttttttccatgactgcattttactgtacagattgctgcttctgctatatttgtgatataggaattaagaggatacacacgtttgtttcttcgtgcctgttttatgtgcacacattaggcattgagacttcaagcttttctttttttgtccacgtatctttgggtctttgataaagaaaagaatccctgttcattgtaagcacttttacggggcgggtggggaggggtgctctgctggtcttcaattaccaagaattctccaaaacaattttctgcaggatgattgtacagaatcattgcttatgacatgatcgctttctacactgtattacataaataaattaaataaaataaccccgggcaagacttttctttgaaggatgactacagacattaaataatcgaagtaattttgggtggggagaagaggcagattcaattttctttaaccagtctgaagtttcatttatgatacaaaagaagatgaaaatggaagtggcaatataaggggatgaggaaggcatgcctggacaaacccttcttttaagatgtgtcttcaatttgtataaaatggtgttttcatgtaaataaatacattcttggaggagcaaaaaaaaaaaaaaaa

SEQ ID NO: 4067 - DNA, 3423 bp, Homo sapiens
  source 1..3423: mol_type = genomic DNA
ggatcagctgactcgcctggctctgagccccgccgccgcgctcgggctccgtcagtttcctcggcagcggtaggcgagagcacgcggaggagcgtgcgcgggggccccgggagacggcggcggtggcggcgcgggcagagcaaggacgcggcggatcccactcgcacagcagcgcactcggtgccccgcgcagggtcgcgatgctgcccggtttggcactgctcctgctggccgcctggacggctcgggcgctggaggtacccactgatggtaatgctggcctgctggctgaaccccagattgccatgttctgtggcagactgaacatgcacatgaatgtccagaatgggaagtgggattcagatccatcagggaccaaaacctgcattgataccaaggaaggcatcctgcagtattgccaagaagtctaccctgaactgcagatcaccaatgtggtagaagccaaccaaccagtgaccatccagaactggtgcaagcggggccgcaagcagtgcaagacccatccccactttgtgattccctaccgctgcttagttggtgagtttgtaagtgatgcccttctcgttcctgacaagtgcaaattcttacaccaggagaggatggatgtttgcgaaactcatcttcactggcacaccgtcgccaaagagacatgcagtgagaagagtaccaacttgcatgactacggcatgttgctgccctgcggaattgacaagttccgaggggtagagtttgtgtgttgcccactggctgaagaaagtgacaatgtggattctgctgatgcggaggaggatgactcggatgtctggtggggcggagcagacacagactatgcagatgggagtgaagacaaagtagtagaagtagcagaggaggaagaagtggctgaggtggaagaagaagaagccgatgatgacgaggacgatgaggatggtgatgaggtagaggaagaggctgaggaaccctacgaagaagccacagagagaaccaccagcattgccaccaccaccaccaccaccacagagtctgtggaagaggtggttcgagttcctacaacagcagccagtacccctgatgccgttgacaagtatctcgagacacctggggatgagaatgaacatgcccatttccagaaagccaaagagaggcttgaggccaagcaccgagagagaatgtcccaggtcatgagagaatgggaagaggcagaacgtcaagcaaagaacttgcctaaagctgataagaaggcagttatccagcatttccaggagaaagtggaatctttggaacaggaagcagccaacgagagacagcagctggtggagacacacatggccagagtggaagccatgctcaatgaccgccgccgcctggccctggagaactacatcaccgctctgcaggctgttcctcctcggcctcgtcacgtgttcaatatgctaaagaagtatgtccgcgcagaacagaaggacagacagcacaccctaaagcatttcgagcatgtgcgcatggtggatcccaagaaagccgctcagatccggtcccaggttatgacacacctccgtgtgatttatgagcgcatgaatcagtctctctccctgctctacaacgtgcctgcagtggccgaggagattcaggatgaagttgatgagctgcttcagaaagagcaaaactattcagatgacgtcttggccaacatgattagtgaaccaaggatcagttacggaaacgatgctctcatgccatctttgaccgaaacgaaaaccaccgtggagctccttcccgtgaatggagagttcagcctggacgatctccagccgtggcattcttttggggctgactctgtgccagccaacacagaaaacgaagttgagcctgttgatgcccgccctgctgccgaccgaggactgaccactcgaccaggttctgggttgacaaatatcaagacggaggagatctctgaagtgaagatggatgcagaattccgacatgactcaggatatgaagttcatcatcaaaaattggtgttctttgcagaagatgtgggttcaaacaaaggtgcaatcattggactcatggtgggcggtgttgtcatagcgacagtgatcgtcatcaccttggtgatgctgaagaagaaacagtacacatccattcatcatggtgtggtggaggttgacgccgctgtcaccccagaggagcgccacctgtccaagatgcagcagaacggctacgaaaatccaacctacaagttctttgagcagatgcagaactagacccccgccacagcagcctctgaagttggacagcaaaaccattgcttcactacccatcggtgtccatttatagaataatgtgggaagaaacaaacccgttttatgatttactcattatcgccttttgacagctgtgctgtaacacaagtagatgcctgaacttgaattaatccacacatcagtaatgtattctatctctctttacattttggtctctatactacattattaatgggttttgtgtactgtaaagaatttagctgtatcaaactagtgcatgaatagattctctcctgattatttatcacatagccccttagccagttgtatattattcttgtggtttgtgacccaattaagtcctactttacatatgctttaagaatcgatgggggatgcttcatgtgaacgtgggagttcagctgcttctcttgcctaagtattcctttcctgatcactatgcattttaaagttaaacatttttaagtatttcagatgctttagagagattttttttccatgactgcattttactgtacagattgctgcttctgctatatttgtgatataggaattaagaggatacacacgtttgtttcttcgtgcctgttttatgtgcacacattaggcattgagacttcaagcttttctttttttgtccacgtatctttgggtctttgataaagaaaagaatccctgttcattgtaagcacttttacggggcgggtggggaggggtgctctgctggtcttcaattaccaagaattctccaaaacaattttctgcaggatgattgtacagaatcattgcttatgacatgatcgctttctacactgtattacataaataaattaaataaaataaccccgggcaagacttttctttgaaggatgactacagacattaaataatcgaagtaattttgggtggggagaagaggcagattcaattttctttaaccagtctgaagtttcatttatgatacaaaagaagatgaaaatggaagtggcaatataaggggatgaggaaggcatgcctggacaaacccttcttttaagatgtgtcttcaatttgtataaaatggtgttttcatgtaaataaatacattcttggaggagcaaaaaaaaaaaaaaaa

SEQ ID NO: 4068 - DNA, 3310 bp, Homo sapiens
  source 1..3310: mol_type = genomic DNA
gtcggatgattcaagctcacggggacgagcaggagcgctctcgacttttctagagcctcagcgtcctaggactcacctttccctgatcctgcaccgtccctctcctggccccagactctccctcccactgttcacgaagcccaggtacccactgatggtaatgctggcctgctggctgaaccccagattgccatgttctgtggcagactgaacatgcacatgaatgtccagaatgggaagtgggattcagatccatcagggaccaaaacctgcattgataccaaggaaggcatcctgcagtattgccaagaagtctaccctgaactgcagatcaccaatgtggtagaagccaaccaaccagtgaccatccagaactggtgcaagcggggccgcaagcagtgcaagacccatccccactttgtgattccctaccgctgcttagttggtgagtttgtaagtgatgcccttctcgttcctgacaagtgcaaattcttacaccaggagaggatggatgtttgcgaaactcatcttcactggcacaccgtcgccaaagagacatgcagtgagaagagtaccaacttgcatgactacggcatgttgctgccctgcggaattgacaagttccgaggggtagagtttgtgtgttgcccactggctgaagaaagtgacaatgtggattctgctgatgcggaggaggatgactcggatgtctggtggggcggagcagacacagactatgcagatgggagtgaagacaaagtagtagaagtagcagaggaggaagaagtggctgaggtggaagaagaagaagccgatgatgacgaggacgatgaggatggtgatgaggtagaggaagaggctgaggaaccctacgaagaagccacagagagaaccaccagcattgccaccaccaccaccaccaccacagagtctgtggaagaggtggttcgagttcctacaacagcagccagtacccctgatgccgttgacaagtatctcgagacacctggggatgagaatgaacatgcccatttccagaaagccaaagagaggcttgaggccaagcaccgagagagaatgtcccaggtcatgagagaatgggaagaggcagaacgtcaagcaaagaacttgcctaaagctgataagaaggcagttatccagcatttccaggagaaagtggaatctttggaacaggaagcagccaacgagagacagcagctggtggagacacacatggccagagtggaagccatgctcaatgaccgccgccgcctggccctggagaactacatcaccgctctgcaggctgttcctcctcggcctcgtcacgtgttcaatatgctaaagaagtatgtccgcgcagaacagaaggacagacagcacaccctaaagcatttcgagcatgtgcgcatggtggatcccaagaaagccgctcagatccggtcccaggttatgacacacctccgtgtgatttatgagcgcatgaatcagtctctctccctgctctacaacgtgcctgcagtggccgaggagattcaggatgaagttgatgagctgcttcagaaagagcaaaactattcagatgacgtcttggccaacatgattagtgaaccaaggatcagttacggaaacgatgctctcatgccatctttgaccgaaacgaaaaccaccgtggagctccttcccgtgaatggagagttcagcctggacgatctccagccgtggcattcttttggggctgactctgtgccagccaacacagaaaacgaagttgagcctgttgatgcccgccctgctgccgaccgaggactgaccactcgaccaggttctgggttgacaaatatcaagacggaggagatctctgaagtgaagatggatgcagaattccgacatgactcaggatatgaagttcatcatcaaaaattggtgttctttgcagaagatgtgggttcaaacaaaggtgcaatcattggactcatggtgggcggtgttgtcatagcgacagtgatcgtcatcaccttggtgatgctgaagaagaaacagtacacatccattcatcatggtgtggtggaggttgacgccgctgtcaccccagaggagcgccacctgtccaagatgcagcagaacggctacgaaaatccaacctacaagttctttgagcagatgcagaactagacccccgccacagcagcctctgaagttggacagcaaaaccattgcttcactacccatcggtgtccatttatagaataatgtgggaagaaacaaacccgttttatgatttactcattatcgccttttgacagctgtgctgtaacacaagtagatgcctgaacttgaattaatccacacatcagtaatgtattctatctctctttacattttggtctctatactacattattaatgggttttgtgtactgtaaagaatttagctgtatcaaactagtgcatgaatagattctctcctgattatttatcacatagccccttagccagttgtatattattcttgtggtttgtgacccaattaagtcctactttacatatgctttaagaatcgatgggggatgcttcatgtgaacgtgggagttcagctgcttctcttgcctaagtattcctttcctgatcactatgcattttaaagttaaacatttttaagtatttcagatgctttagagagattttttttccatgactgcattttactgtacagattgctgcttctgctatatttgtgatataggaattaagaggatacacacgtttgtttcttcgtgcctgttttatgtgcacacattaggcattgagacttcaagcttttctttttttgtccacgtatctttgggtctttgataaagaaaagaatccctgttcattgtaagcacttttacggggcgggtggggaggggtgctctgctggtcttcaattaccaagaattctccaaaacaattttctgcaggatgattgtacagaatcattgcttatgacatgatcgctttctacactgtattacataaataaattaaataaaataaccccgggcaagacttttctttgaaggatgactacagacattaaataatcgaagtaattttgggtggggagaagaggcagattcaattttctttaaccagtctgaagtttcatttatgatacaaaagaagatgaaaatggaagtggcaatataaggggatgaggaaggcatgcctggacaaacccttcttttaagatgtgtcttcaatttgtataaaatggtgttttcatgtaaataaatacattcttggaggagcaaaaaaaaaaaaaaaa

SEQ ID NO: 4069 - DNA, 3591 bp, Homo sapiens
  source 1..3591: mol_type = genomic DNA
ggatcagctgactcgcctggctctgagccccgccgccgcgctcgggctccgtcagtttcctcggcagcggtaggcgagagcacgcggaggagcgtgcgcgggggccccgggagacggcggcggtggcggcgcgggcagagcaaggacgcggcggatcccactcgcacagcagcgcactcggtgccccgcgcagggtcgcgatgctgcccggtttggcactgctcctgctggccgcctggacggctcgggcgctggaggtacccactgatggtaatgctggcctgctggctgaaccccagattgccatgttctgtggcagactgaacatgcacatgaatgtccagaatgggaagtgggattcagatccatcagggaccaaaacctgcattgataccaaggaaggcatcctgcagtattgccaagaagtctaccctgaactgcagatcaccaatgtggtagaagccaaccaaccagtgaccatccagaactggtgcaagcggggccgcaagcagtgcaagacccatccccactttgtgattccctaccgctgcttagttggtgagtttgtaagtgatgcccttctcgttcctgacaagtgcaaattcttacaccaggagaggatggatgtttgcgaaactcatcttcactggcacaccgtcgccaaagagacatgcagtgagaagagtaccaacttgcatgactacggcatgttgctgccctgcggaattgacaagttccgaggggtagagtttgtgtgttgcccactggctgaagaaagtgacaatgtggattctgctgatgcggaggaggatgactcggatgtctggtggggcggagcagacacagactatgcagatgggagtgaagacaaagtagtagaagtagcagaggaggaagaagtggctgaggtggaagaagaagaagccgatgatgacgaggacgatgaggatggtgatgaggtagaggaagaggctgaggaaccctacgaagaagccacagagagaaccaccagcattgccaccaccaccaccaccaccacagagtctgtggaagaggtggttcgagaggtgtgctctgaacaagccgagacggggccgtgccgagcaatgatctcccgctggtactttgatgtgactgaagggaagtgtgccccattcttttacggcggatgtggcggcaaccggaacaactttgacacagaagagtactgcatggccgtgtgtggcagcgccattcctacaacagcagccagtacccctgatgccgttgacaagtatctcgagacacctggggatgagaatgaacatgcccatttccagaaagccaaagagaggcttgaggccaagcaccgagagagaatgtcccaggtcatgagagaatgggaagaggcagaacgtcaagcaaagaacttgcctaaagctgataagaaggcagttatccagcatttccaggagaaagtggaatctttggaacaggaagcagccaacgagagacagcagctggtggagacacacatggccagagtggaagccatgctcaatgaccgccgccgcctggccctggagaactacatcaccgctctgcaggctgttcctcctcggcctcgtcacgtgttcaatatgctaaagaagtatgtccgcgcagaacagaaggacagacagcacaccctaaagcatttcgagcatgtgcgcatggtggatcccaagaaagccgctcagatccggtcccaggttatgacacacctccgtgtgatttatgagcgcatgaatcagtctctctccctgctctacaacgtgcctgcagtggccgaggagattcaggatgaagttgatgagctgcttcagaaagagcaaaactattcagatgacgtcttggccaacatgattagtgaaccaaggatcagttacggaaacgatgctctcatgccatctttgaccgaaacgaaaaccaccgtggagctccttcccgtgaatggagagttcagcctggacgatctccagccgtggcattcttttggggctgactctgtgccagccaacacagaaaacgaagttgagcctgttgatgcccgccctgctgccgaccgaggactgaccactcgaccaggttctgggttgacaaatatcaagacggaggagatctctgaagtgaagatggatgcagaattccgacatgactcaggatatgaagttcatcatcaaaaattggtgttctttgcagaagatgtgggttcaaacaaaggtgcaatcattggactcatggtgggcggtgttgtcatagcgacagtgatcgtcatcaccttggtgatgctgaagaagaaacagtacacatccattcatcatggtgtggtggaggttgacgccgctgtcaccccagaggagcgccacctgtccaagatgcagcagaacggctacgaaaatccaacctacaagttctttgagcagatgcagaactagacccccgccacagcagcctctgaagttggacagcaaaaccattgcttcactacccatcggtgtccatttatagaataatgtgggaagaaacaaacccgttttatgatttactcattatcgccttttgacagctgtgctgtaacacaagtagatgcctgaacttgaattaatccacacatcagtaatgtattctatctctctttacattttggtctctatactacattattaatgggttttgtgtactgtaaagaatttagctgtatcaaactagtgcatgaatagattctctcctgattatttatcacatagccccttagccagttgtatattattcttgtggtttgtgacccaattaagtcctactttacatatgctttaagaatcgatgggggatgcttcatgtgaacgtgggagttcagctgcttctcttgcctaagtattcctttcctgatcactatgcattttaaagttaaacatttttaagtatttcagatgctttagagagattttttttccatgactgcattttactgtacagattgctgcttctgctatatttgtgatataggaattaagaggatacacacgtttgtttcttcgtgcctgttttatgtgcacacattaggcattgagacttcaagcttttctttttttgtccacgtatctttgggtctttgataaagaaaagaatccctgttcattgtaagcacttttacggggcgggtggggaggggtgctctgctggtcttcaattaccaagaattctccaaaacaattttctgcaggatgattgtacagaatcattgcttatgacatgatcgctttctacactgtattacataaataaattaaataaaataaccccgggcaagacttttctttgaaggatgactacagacattaaataatcgaagtaattttgggtggggagaagaggcagattcaattttctttaaccagtctgaagtttcatttatgatacaaaagaagatgaaaatggaagtggcaatataaggggatgaggaaggcatgcctggacaaacccttcttttaagatgtgtcttcaatttgtataaaatggtgttttcatgtaaataaatacattcttggaggagcaaaaaaaaaaaaaaaa

SEQ ID NO: 4070 - DNA, 3480 bp, Homo sapiens
  source 1..3480: mol_type = genomic DNA
ggatcagctgactcgcctggctctgagccccgccgccgcgctcgggctccgtcagtttcctcggcagcggtaggcgagagcacgcggaggagcgtgcgcgggggccccgggagacggcggcggtggcggcgcgggcagagcaaggacgcggcggatcccactcgcacagcagcgcactcggtgccccgcgcagggtcgcgatgctgcccggtttggcactgctcctgctggccgcctggacggctcgggcgctggaggtctaccctgaactgcagatcaccaatgtggtagaagccaaccaaccagtgaccatccagaactggtgcaagcggggccgcaagcagtgcaagacccatccccactttgtgattccctaccgctgcttagttggtgagtttgtaagtgatgcccttctcgttcctgacaagtgcaaattcttacaccaggagaggatggatgtttgcgaaactcatcttcactggcacaccgtcgccaaagagacatgcagtgagaagagtaccaacttgcatgactacggcatgttgctgccctgcggaattgacaagttccgaggggtagagtttgtgtgttgcccactggctgaagaaagtgacaatgtggattctgctgatgcggaggaggatgactcggatgtctggtggggcggagcagacacagactatgcagatgggagtgaagacaaagtagtagaagtagcagaggaggaagaagtggctgaggtggaagaagaagaagccgatgatgacgaggacgatgaggatggtgatgaggtagaggaagaggctgaggaaccctacgaagaagccacagagagaaccaccagcattgccaccaccaccaccaccaccacagagtctgtggaagaggtggttcgagaggtgtgctctgaacaagccgagacggggccgtgccgagcaatgatctcccgctggtactttgatgtgactgaagggaagtgtgccccattcttttacggcggatgtggcggcaaccggaacaactttgacacagaagagtactgcatggccgtgtgtggcagcgccatgtcccaaagtttactcaagactacccaggaacctcttgcccgagatcctgttaaacttcctacaacagcagccagtacccctgatgccgttgacaagtatctcgagacacctggggatgagaatgaacatgcccatttccagaaagccaaagagaggcttgaggccaagcaccgagagagaatgtcccaggtcatgagagaatgggaagaggcagaacgtcaagcaaagaacttgcctaaagctgataagaaggcagttatccagcatttccaggagaaagtggaatctttggaacaggaagcagccaacgagagacagcagctggtggagacacacatggccagagtggaagccatgctcaatgaccgccgccgcctggccctggagaactacatcaccgctctgcaggctgttcctcctcggcctcgtcacgtgttcaatatgctaaagaagtatgtccgcgcagaacagaaggacagacagcacaccctaaagcatttcgagcatgtgcgcatggtggatcccaagaaagccgctcagatccggtcccaggttatgacacacctccgtgtgatttatgagcgcatgaatcagtctctctccctgctctacaacgtgcctgcagtggccgaggagattcaggatgaagttgatgagctgcttcagaaagagcaaaactattcagatgacgtcttggccaacatgattagtgaaccaaggatcagttacggaaacgatgctctcatgccatctttgaccgaaacgaaaaccaccgtggagctccttcccgtgaatggagagttcagcctggacgatctccagccgtggcattcttttggggctgactctgtgccagccaacacagaaaacgaagttgagcctgttgatgcccgccctgctgccgaccgaggactgaccactcgaccaggttctgggttgacaaatatcaagacggaggagatctctgaagtgaagatggatgcagaattccgacatgactcaggatatgaagttcatcatcaaaaattggtgttctttgcagaagatgtgggttcaaacaaaggtgcaatcattggactcatggtgggcggtgttgtcatagcgacagtgatcgtcatcaccttggtgatgctgaagaagaaacagtacacatccattcatcatggtgtggtggaggttgacgccgctgtcaccccagaggagcgccacctgtccaagatgcagcagaacggctacgaaaatccaacctacaagttctttgagcagatgcagaactagacccccgccacagcagcctctgaagttggacagcaaaaccattgcttcactacccatcggtgtccatttatagaataatgtgggaagaaacaaacccgttttatgatttactcattatcgccttttgacagctgtgctgtaacacaagtagatgcctgaacttgaattaatccacacatcagtaatgtattctatctctctttacattttggtctctatactacattattaatgggttttgtgtactgtaaagaatttagctgtatcaaactagtgcatgaatagattctctcctgattatttatcacatagccccttagccagttgtatattattcttgtggtttgtgacccaattaagtcctactttacatatgctttaagaatcgatgggggatgcttcatgtgaacgtgggagttcagctgcttctcttgcctaagtattcctttcctgatcactatgcattttaaagttaaacatttttaagtatttcagatgctttagagagattttttttccatgactgcattttactgtacagattgctgcttctgctatatttgtgatataggaattaagaggatacacacgtttgtttcttcgtgcctgttttatgtgcacacattaggcattgagacttcaagcttttctttttttgtccacgtatctttgggtctttgataaagaaaagaatccctgttcattgtaagcacttttacggggcgggtggggaggggtgctctgctggtcttcaattaccaagaattctccaaaacaattttctgcaggatgattgtacagaatcattgcttatgacatgatcgctttctacactgtattacataaataaattaaataaaataaccccgggcaagacttttctttgaaggatgactacagacattaaataatcgaagtaattttgggtggggagaagaggcagattcaattttctttaaccagtctgaagtttcatttatgatacaaaagaagatgaaaatggaagtggcaatataaggggatgaggaaggcatgcctggacaaacccttcttttaagatgtgtcttcaatttgtataaaatggtgttttcatgtaaataaatacattcttggaggagcaaaaaaaaaaaaaaaa

SEQ ID NO: 4071 - DNA, 3572 bp, Homo sapiens
  source 1..3572: mol_type = genomic DNA
aaatagcacagccttgctgtgcgtggtagaagttgggttagtgttgacatgctgttgactcaccctcccgaggatggaagctctggcctgggtcaagttgtggtcactgcagttaacagtttgttgatctcagggagtattccacagttgctgatgtaattgacaatgattggagccagctcttccccagattcaaatggaccaattagaggacttgttggttctgtttatcaactatgtacccactgatggtaatgctggcctgctggctgaaccccagattgccatgttctgtggcagactgaacatgcacatgaatgtccagaatgggaagtgggattcagatccatcagggaccaaaacctgcattgataccaaggaaggcatcctgcagtattgccaagaagtctaccctgaactgcagatcaccaatgtggtagaagccaaccaaccagtgaccatccagaactggtgcaagcggggccgcaagcagtgcaagacccatccccactttgtgattccctaccgctgcttagttggtgagtttgtaagtgatgcccttctcgttcctgacaagtgcaaattcttacaccaggagaggatggatgtttgcgaaactcatcttcactggcacaccgtcgccaaagagacatgcagtgagaagagtaccaacttgcatgactacggcatgttgctgccctgcggaattgacaagttccgaggggtagagtttgtgtgttgcccactggctgaagaaagtgacaatgtggattctgctgatgcggaggaggatgactcggatgtctggtggggcggagcagacacagactatgcagatgggagtgaagacaaagtagtagaagtagcagaggaggaagaagtggctgaggtggaagaagaagaagccgatgatgacgaggacgatgaggatggtgatgaggtagaggaagaggctgaggaaccctacgaagaagccacagagagaaccaccagcattgccaccaccaccaccaccaccacagagtctgtggaagaggtggttcgagaggtgtgctctgaacaagccgagacggggccgtgccgagcaatgatctcccgctggtactttgatgtgactgaagggaagtgtgccccattcttttacggcggatgtggcggcaaccggaacaactttgacacagaagagtactgcatggccgtgtgtggcagcgccattcctacaacagcagccagtacccctgatgccgttgacaagtatctcgagacacctggggatgagaatgaacatgcccatttccagaaagccaaagagaggcttgaggccaagcaccgagagagaatgtcccaggtcatgagagaatgggaagaggcagaacgtcaagcaaagaacttgcctaaagctgataagaaggcagttatccagcatttccaggagaaagtggaatctttggaacaggaagcagccaacgagagacagcagctggtggagacacacatggccagagtggaagccatgctcaatgaccgccgccgcctggccctggagaactacatcaccgctctgcaggctgttcctcctcggcctcgtcacgtgttcaatatgctaaagaagtatgtccgcgcagaacagaaggacagacagcacaccctaaagcatttcgagcatgtgcgcatggtggatcccaagaaagccgctcagatccggtcccaggttatgacacacctccgtgtgatttatgagcgcatgaatcagtctctctccctgctctacaacgtgcctgcagtggccgaggagattcaggatgaagttgatgagctgcttcagaaagagcaaaactattcagatgacgtcttggccaacatgattagtgaaccaaggatcagttacggaaacgatgctctcatgccatctttgaccgaaacgaaaaccaccgtggagctccttcccgtgaatggagagttcagcctggacgatctccagccgtggcattcttttggggctgactctgtgccagccaacacagaaaacgaagttgagcctgttgatgcccgccctgctgccgaccgaggactgaccactcgaccaggttctgggttgacaaatatcaagacggaggagatctctgaagtgaagatggatgcagaattccgacatgactcaggatatgaagttcatcatcaaaaattggtgttctttgcagaagatgtgggttcaaacaaaggtgcaatcattggactcatggtgggcggtgttgtcatagcgacagtgatcgtcatcaccttggtgatgctgaagaagaaacagtacacatccattcatcatggtgtggtggaggttgacgccgctgtcaccccagaggagcgccacctgtccaagatgcagcagaacggctacgaaaatccaacctacaagttctttgagcagatgcagaactagacccccgccacagcagcctctgaagttggacagcaaaaccattgcttcactacccatcggtgtccatttatagaataatgtgggaagaaacaaacccgttttatgatttactcattatcgccttttgacagctgtgctgtaacacaagtagatgcctgaacttgaattaatccacacatcagtaatgtattctatctctctttacattttggtctctatactacattattaatgggttttgtgtactgtaaagaatttagctgtatcaaactagtgcatgaatagattctctcctgattatttatcacatagccccttagccagttgtatattattcttgtggtttgtgacccaattaagtcctactttacatatgctttaagaatcgatgggggatgcttcatgtgaacgtgggagttcagctgcttctcttgcctaagtattcctttcctgatcactatgcattttaaagttaaacatttttaagtatttcagatgctttagagagattttttttccatgactgcattttactgtacagattgctgcttctgctatatttgtgatataggaattaagaggatacacacgtttgtttcttcgtgcctgttttatgtgcacacattaggcattgagacttcaagcttttctttttttgtccacgtatctttgggtctttgataaagaaaagaatccctgttcattgtaagcacttttacggggcgggtggggaggggtgctctgctggtcttcaattaccaagaattctccaaaacaattttctgcaggatgattgtacagaatcattgcttatgacatgatcgctttctacactgtattacataaataaattaaataaaataaccccgggcaagacttttctttgaaggatgactacagacattaaataatcgaagtaattttgggtggggagaagaggcagattcaattttctttaaccagtctgaagtttcatttatgatacaaaagaagatgaaaatggaagtggcaatataaggggatgaggaaggcatgcctggacaaacccttcttttaagatgtgtcttcaatttgtataaaatggtgttttcatgtaaataaatacattcttggaggagcaaaaaaaaaaaaaaaa

SEQ ID NO: 4072 - DNA, 3255 bp, Homo sapiens
  source 1..3255: mol_type = genomic DNA
ggatcagctgactcgcctggctctgagccccgccgccgcgctcgggctccgtcagtttcctcggcagcggtaggcgagagcacgcggaggagcgtgcgcgggggccccgggagacggcggcggtggcggcgcgggcagagcaaggacgcggcggatcccactcgcacagcagcgcactcggtgccccgcgcagggtcgcgatgctgcccggtttggcactgctcctgctggccgcctggacggctcgggcgctggaggtctaccctgaactgcagatcaccaatgtggtagaagccaaccaaccagtgaccatccagaactggtgcaagcggggccgcaagcagtgcaagacccatccccactttgtgattccctaccgctgcttagttggtgagtttgtaagtgatgcccttctcgttcctgacaagtgcaaattcttacaccaggagaggatggatgtttgcgaaactcatcttcactggcacaccgtcgccaaagagacatgcagtgagaagagtaccaacttgcatgactacggcatgttgctgccctgcggaattgacaagttccgaggggtagagtttgtgtgttgcccactggctgaagaaagtgacaatgtggattctgctgatgcggaggaggatgactcggatgtctggtggggcggagcagacacagactatgcagatgggagtgaagacaaagtagtagaagtagcagaggaggaagaagtggctgaggtggaagaagaagaagccgatgatgacgaggacgatgaggatggtgatgaggtagaggaagaggctgaggaaccctacgaagaagccacagagagaaccaccagcattgccaccaccaccaccaccaccacagagtctgtggaagaggtggttcgagttcctacaacagcagccagtacccctgatgccgttgacaagtatctcgagacacctggggatgagaatgaacatgcccatttccagaaagccaaagagaggcttgaggccaagcaccgagagagaatgtcccaggtcatgagagaatgggaagaggcagaacgtcaagcaaagaacttgcctaaagctgataagaaggcagttatccagcatttccaggagaaagtggaatctttggaacaggaagcagccaacgagagacagcagctggtggagacacacatggccagagtggaagccatgctcaatgaccgccgccgcctggccctggagaactacatcaccgctctgcaggctgttcctcctcggcctcgtcacgtgttcaatatgctaaagaagtatgtccgcgcagaacagaaggacagacagcacaccctaaagcatttcgagcatgtgcgcatggtggatcccaagaaagccgctcagatccggtcccaggttatgacacacctccgtgtgatttatgagcgcatgaatcagtctctctccctgctctacaacgtgcctgcagtggccgaggagattcaggatgaagttgatgagctgcttcagaaagagcaaaactattcagatgacgtcttggccaacatgattagtgaaccaaggatcagttacggaaacgatgctctcatgccatctttgaccgaaacgaaaaccaccgtggagctccttcccgtgaatggagagttcagcctggacgatctccagccgtggcattcttttggggctgactctgtgccagccaacacagaaaacgaagttgagcctgttgatgcccgccctgctgccgaccgaggactgaccactcgaccaggttctgggttgacaaatatcaagacggaggagatctctgaagtgaagatggatgcagaattccgacatgactcaggatatgaagttcatcatcaaaaattggtgttctttgcagaagatgtgggttcaaacaaaggtgcaatcattggactcatggtgggcggtgttgtcatagcgacagtgatcgtcatcaccttggtgatgctgaagaagaaacagtacacatccattcatcatggtgtggtggaggttgacgccgctgtcaccccagaggagcgccacctgtccaagatgcagcagaacggctacgaaaatccaacctacaagttctttgagcagatgcagaactagacccccgccacagcagcctctgaagttggacagcaaaaccattgcttcactacccatcggtgtccatttatagaataatgtgggaagaaacaaacccgttttatgatttactcattatcgccttttgacagctgtgctgtaacacaagtagatgcctgaacttgaattaatccacacatcagtaatgtattctatctctctttacattttggtctctatactacattattaatgggttttgtgtactgtaaagaatttagctgtatcaaactagtgcatgaatagattctctcctgattatttatcacatagccccttagccagttgtatattattcttgtggtttgtgacccaattaagtcctactttacatatgctttaagaatcgatgggggatgcttcatgtgaacgtgggagttcagctgcttctcttgcctaagtattcctttcctgatcactatgcattttaaagttaaacatttttaagtatttcagatgctttagagagattttttttccatgactgcattttactgtacagattgctgcttctgctatatttgtgatataggaattaagaggatacacacgtttgtttcttcgtgcctgttttatgtgcacacattaggcattgagacttcaagcttttctttttttgtccacgtatctttgggtctttgataaagaaaagaatccctgttcattgtaagcacttttacggggcgggtggggaggggtgctctgctggtcttcaattaccaagaattctccaaaacaattttctgcaggatgattgtacagaatcattgcttatgacatgatcgctttctacactgtattacataaataaattaaataaaataaccccgggcaagacttttctttgaaggatgactacagacattaaataatcgaagtaattttgggtggggagaagaggcagattcaattttctttaaccagtctgaagtttcatttatgatacaaaagaagatgaaaatggaagtggcaatataaggggatgaggaaggcatgcctggacaaacccttcttttaagatgtgtcttcaatttgtataaaatggtgttttcatgtaaataaatacattcttggaggagcaaaaaaaaaaaaaaaa

SEQ ID NO: 4073 - DNA, 1368 bp, Homo sapiens
  source 1..1368: mol_type = genomic DNA
gaaatgctctcctttttcctaataaagctttccacagaagacaaactctgtacacaaaaaacaagaaatcagataaaaactacttggtgaaatgacttcttgtcacattgctgaagaacatatacaaaaggttgctatctttggaggaacccatgggaatgagctaaccggagtatttctggttaagcattggctagagaatggcgctgagattcagagaacagggctggaggtaaaaccatttattactaaccccagagcagtgaagaagtgtaccagatatattgactgtgacctgaatcgcatttttgaccttgaaaatcttggcaaaaaaatgtcagaagatttgccatatgaagtgagaagggctcaagaaataaatcatttatttggtccaaaagacagtgaagattcctatgacattatttttgaccttcacaacaccacctctaacatggggtgcactcttattcttgaggattccaggaataactttttaattcagatgtttcattacattaagacttctctggctccactaccctgctacgtttatctgattgagcatccttccctcaaatatgcgaccactcgttccatagccaagtatcctgtgggtatagaagttggtcctcagcctcaaggggttctgagagctgatatcttggatcaaatgagaaaaatgattaaacatgctcttgattttatacatcatttcaatgaaggaaaagaatttcctccctgcgccattgaggtctataaaattatagagaaagttgattacccccgggatgaaaatggagaaattgctgctatcatccatcctaatctgcaggatcaagactggaaaccactgcatcctggggatcccatgtttttaactcttgatgggaagacgatcccactgggcggagactgtaccgtgtaccccgtgtttgtgaatgaggccgcatattacgaaaagaaagaagcttttgcaaagacaactaaactaacgctcaatgcaaaaagtattcgctgctgtttacattagaaatcacttccagcttacatcttacacggtgtcttacaaattctgctagtctgtaagctccttaagagtagggttgtgccttattcaactgcatacatagctcctagcacagtgccttattcggtaggcatctaagcaaatttcttaaattaattaatatatctttaaagatatcatattttatgtatgtagcttattcaaagaagtgtttcctatttctatatagtttattatacatgatacttgggtagctcaacattcttaataaacagcctttgtattcagaatataaaattgaaatagatatatataaagttaaaaaaaaaaaaaaaaaa

SEQ ID NO: 4074 - DNA, 1435 bp, Homo sapiens
  source 1..1435: mol_type = genomic DNA
ttgtaacagaaaattaaaatatactccactcaagggaattctgtactttgccctttgggtaaagtctcatttacatttctaaacctttcttaagaaaatcgaatttcctttgatctctcttctgaattgcagaaatcagataaaaactacttggtgaaatgacttcttgtcacattgctgaagaacatatacaaaaggttgctatctttggaggaacccatgggaatgagctaaccggagtatttctggttaagcattggctagagaatggcgctgagattcagagaacagggctggaggtaaaaccatttattactaaccccagagcagtgaagaagtgtaccagatatattgactgtgacctgaatcgcatttttgaccttgaaaatcttggcaaaaaaatgtcagaagatttgccatatgaagtgagaagggctcaagaaataaatcatttatttggtccaaaagacagtgaagattcctatgacattatttttgaccttcacaacaccacctctaacatggggtgcactcttattcttgaggattccaggaataactttttaattcagatgtttcattacattaagacttctctggctccactaccctgctacgtttatctgattgagcatccttccctcaaatatgcgaccactcgttccatagccaagtatcctgtgggtatagaagttggtcctcagcctcaaggggttctgagagctgatatcttggatcaaatgagaaaaatgattaaacatgctcttgattttatacatcatttcaatgaaggaaaagaatttcctccctgcgccattgaggtctataaaattatagagaaagttgattacccccgggatgaaaatggagaaattgctgctatcatccatcctaatctgcaggatcaagactggaaaccactgcatcctggggatcccatgtttttaactcttgatgggaagacgatcccactgggcggagactgtaccgtgtaccccgtgtttgtgaatgaggccgcatattacgaaaagaaagaagcttttgcaaagacaactaaactaacgctcaatgcaaaaagtattcgctgctgtttacattagaaatcacttccagcttacatcttacacggtgtcttacaaattctgctagtctgtaagctccttaagagtagggttgtgccttattcaactgcatacatagctcctagcacagtgccttattcggtaggcatctaagcaaatttcttaaattaattaatatatctttaaagatatcatattttatgtatgtagcttattcaaagaagtgtttcctatttctatatagtttattatacatgatacttgggtagctcaacattcttaataaacagcctttgtattcagaatataaaattgaaatagatatatataaagttaaaaaaaaaaaaaaaaaa

SEQ ID NO: 4075 - DNA, 3050 bp, Homo sapiens
  source 1..3050: mol_type = genomic DNA
tttttttgcttctgccccagatctttcctggacagtgcgtctcagcagttcagatccgggggcccccagctgacagagggcgtggggggttaaggcattaacccctcccagcctcttcctgaagaaaccacccagccttggcgcggcgctgggtgacttcgcgtagcaggcagggaactggccgcggcgagcgggactggccattggagtgctccgctgcggagggaggggaccccgactcgagtaagtttgcgagagcactacgcagtcagtcgggggcagcagcaagatgcgaagcgagccgtacagatcccgggctctccgaacgcaacttcgccctgcttgagcgaggctgcggtttccgaggccctctccagccaaggaaaagctacacaaaaagcctggatcactcatcgaaccacccctgaagccagtgaaggctctctcgcctcgccctctagcgttcgtctggagtagcgccaccccggcttcctggggacacagggttggcaccatggggcccaccagcgtcccgctggtcaaggcccaccgcagctcggtctctgactacgtcaactatgatatcatcgtccggcattacaactacacgggaaagctgaatatcagcgcggacaaggagaacagcattaaactgacctcggtggtgttcattctcatctgctgctttatcatcctggagaacatctttgtcttgctgaccatttggaaaaccaagaaattccaccgacccatgtactattttattggcaatctggccctctcagacctgttggcaggagtagcctacacagctaacctgctcttgtctggggccaccacctacaagctcactcccgcccagtggtttctgcgggaagggagtatgtttgtggccctgtcagcctccgtgttcagtctcctcgccatcgccattgagcgctatatcacaatgctgaaaatgaaactccacaacgggagcaataacttccgcctcttcctgctaatcagcgcctgctgggtcatctccctcatcctgggtggcctgcctatcatgggctggaactgcatcagtgcgctgtccagctgctccaccgtgctgccgctctaccacaagcactatatcctcttctgcaccacggtcttcactctgcttctgctctccatcgtcattctgtactgcagaatctactccttggtcaggactcggagccgccgcctgacgttccgcaagaacatttccaaggccagccgcagctctgagaagtcgctggcgctgctcaagaccgtaattatcgtcctgagcgtcttcatcgcctgctgggcaccgctcttcatcctgctcctgctggatgtgggctgcaaggtgaagacctgtgacatcctcttcagagcggagtacttcctggtgttagctgtgctcaactccggcaccaaccccatcatttacactctgaccaacaaggagatgcgtcgggccttcatccggatcatgtcctgctgcaagtgcccgagcggagactctgctggcaaattcaagcgacccatcatcgccggcatggaattcagccgcagcaaatcggacaattcctcccacccccagaaagacgaaggggacaacccagagaccattatgtcttctggaaacgtcaactcttcttcctagaactggaagctgtccacccaccggaagcgctctttacttggtcgctggccaccccagtgtttggaaaaaaatctctgggcttcgactgctgccagggaggagctgctgcaagccagagggaggaagggggagaatacgaacagcctggtggtgtcgggtgttggtgggtagagttagttcctgtgaacaatgcactgggaagggtggagatcaggtcccggcctggaatatattttctacccccctggagctttgattttgcactgagccaaaggtctagcattgtcaagctcctaaagggttcatttggcccctcctcaaagactaatgtccccatgtgaaagcgtctctttgtctggagctttgaggagatgttttccttcactttagtttcaaacccaagtgagtgtgtgcacttctgcttctttagggatgccctgtacatcccacaccccaccctcccttcccttcatacccctcctcaacgttcttttactttatactttaactacctgagagttatcagagctggggttgtggaatgatcgatcatctatagcaaataggctatgttgagtacgtaggctgtgggaagatgaagatggtttggaggtgtaaaacaatgtccttcgctgaggccaaagtttccatgtaagcgggatccgttttttggaatttggttgaagtcactttgatttctttaaaaaacatcttttcaatgaaatgtgttaccatttcatatccattgaagccgaaatctgcataaggaagcccactttatctaaatgatattagccaggatccttggtgtcctaggagaaacagacaagcaaaacaaagtgaaaaccgaatggattaacttttgcaaaccaagggagatttcttagcaaatgagtctaacaaatatgacatctgtctttggcacttttgttgatgtttatttcagaatgttgtgtgattcatttcaagcaacaacatggttgtattttgttgtgttaaaagtacttttcttgatttttgaatgtatttgtttcagcagaagtcattttattggatttttctaacccgtgttaacaccattgaatgtgtatttcttaagaaaataccaccctcttgtgcccttaaaagcattactttaactggtagggaacgccagaaacttttcagtccagctattcattagatagtaattgaagatatgtataaatattacaaagaataaaaatatattactgtctctttagtatggttttcagtgcaattaaaccgagagatgtcttgtttttttaaaaagaatagtatttaataggtttctgacttttgtggatcattttgcacatagctttatcaacttttaaacattaataaactgatttttttaaagatc

SEQ ID NO: 4076 - DNA, 7595 bp, Homo sapiens
  source 1..7595: mol_type = genomic DNA
agaacccgccccggaggggagggacgcagggaagagtcgcacggacgcactcgcgctgcggccagcgcccgggcctgcgggcccgggcggcggctgtgttgcgcagtcttcatgggttcccgacgaggaggtctctgtggctgcggcggcggctgctaactgcgccacctgctgcagcctgtccccgccgctctgaagcggccgcgtcgaagccgaaatgccgccaccccggaccggccgaggccttctctggctgggtctggttctgagctccgtctgcgtcgccctcggatccgaaacgcaggccaactcgaccacagatgctctgaacgttcttctcatcatcgtggatgacctgcgcccctccctgggctgttatggggataagctggtgaggtccccaaatattgaccaactggcatcccacagcctcctcttccagaatgcctttgcgcaggagacctgacaccacccgcctgtacgacttcaactcctactggagggtgcacgctggaaacttctccaccatcccccagtacttcaaggagaatggctatgtgaccatgtcggtgggaaaagtctttcaccctgggatatcttctaaccataccgatgattctccgtatagctggtcttttccaccttatcatccttcctctgagaagtatgaaaacactaagacatgtcgagggccagatggagaactccatgccaacctgctttgccctgtggatgtgctggatgttcccgagggcaccttgcctgacaaacagagcactgagcaagccatacagttgttggaaaagatgaaaacgtcagccagtcctttcttcctggccgttgggtatcataagccacacatccccttcagataccccaaggaatttcagaagttgtatcccttggagaacatcaccctggcccccgatcccgaggtccctgatggcctaccccctgtggcctacaacccctggatggacatcaggcaacgggaagacgtccaagccttaaacatcagtgtgccgtatggtccaattcctgtggactttcagcggaaaatccgccagagctactttgcctctgtgtcatatttggatacacaggtcggccgcctcttgagtgctttggacgatcttcagctggccaacagcaccatcattgcatttacctcggatcatgggtgggctctaggtgaacatggagaatgggccaaatacagcaattttgatgttgctacccatgttcccctgatattctatgttcctggaaggacggcttcacttccggaggcaggcgagaagcttttcccttacctcgacccttttgattccgcctcacagttgatggagccaggcaggcaatccatggaccttgtggaacttgtgtctctttttcccacgctggctggacttgcaggactgcaggttccacctcgctgccccgttccttcatttcacgttgagctgtgcagagaaggcaagaaccttctgaagcattttcgattccgtgacttggaagaggatccgtacctccctggtaatccccgtgaactgattgcctatagccagtatccccggccttcagacatccctcagtggaattctgacaagccgagtttaaaagatataaagatcatgggctattccatacgcaccatagactataggtatactgtgtgggttggcttcaatcctgatgaatttctagctaacttttctgacatccatgcaggggaactgtattttgtggattctgacccattgcaggatcacaatatgtataatgattcccaaggtggagatcttttccagttgttgatgccttgagttttgccaaccatggatggcaaatgtgatgtgctcccttccagctggtgagaggaggagttagagctggtcgttttgtgattacccataatattggaagcagcctgagggctagttaatccaaacatgcatcaacaatttggcctgagaatatgtaacagccaaaccttttcgtttagtctttattaaaatttataattggtaattggaccagttttttttttaatttccctctttttaaaacagttacggcttatttactgaataaatacaaagcaaacaaactcaagttatgtcatacctttggatacgaagaccatacataataaccaaacataacattatacacaaagaatactttcattatttgtggaatttagtgcatttcaaaaagtaatcatatatcaaactaggcaccacactaagttcctgattattttgtttataatttaataatatatcttatgagccctatatattcaaaatattatgttaacatgtaatccatgtttctttttcaaatctaaagttaaaaaaaaatagcagaagccagtgtcttaaagtctatcttttgtttctaagaccatgggatttcataatctcaagataaaatatgtatgaagtaattaatgtagaatttttacaccaaataataaataatgcttaataaactagagatatgagatgtgtaggaaatttggttaaacttttttcagatactttctggcccaaataataatttgttagcaaataatatgacccttgaactcaatggccatctattaaaagactgttgttcacactggaaaacatttaaagatgtgactatatccatgggtggattgaatcactcaaaatatattagtatccttctttagggatggttggttacagacatgtatttattcaggaggcagaaaatattccattttaattgcttattaaagaaaacattaaattctaaattattttgaggactgtgaagacttttcattagtgtaatattaggtcattgtcaatctcccagaatgtagttctatattctctaaatatgaaagtatccagaaaggccagtggtagtaaaaagcttagtgtatataatctcaaaagggatggaatatttacaactcatatttataacatgttgaatcttctcagttatcagtagtcatcagaagtgtcaatagctttctaaataaatattaaatatctactgtcctgtagtgaaggagtaatttttagtaattttctctttacaaagtctccagtgtttccaggtaaatatttgtgaaacaaaatacagcaaactacattgttacttcagtgtattgttgccaaaaatgacaagatattatattaaaatcagtaaattttagacagattttaaaaattaattagcctacaatagaggttatatggtaacacggtgatcttctaagcagttaagtgactgactgttctggcaacaacgacttctccgtgactgaagggccctgttcatttcctgatcctgaagctcgtctctcttttgagcctccgcttgctttggtcgatggtttccctcagctttttctttgctgttcttcatcctcgttgttgctgtcatcatgttcactgtggcttttacaatacagcctgtaaattccttatgacatagttcagtgcatttggctttattgcctgctccacagttctttacctttacttggcttagagaaactgtatctttgttgcttcatataacctttccccaaccccactaagctggacataacttattagtggtcctcccgtcactttatttgtagaaatctctctttcacatgagcaggggttctttcatgtggtttagctgacagcagaactagtgattctagacattttgcatggccctcattcagtggctcacaaacatgagggagcatcagaactacttgaggggcttgttaaaacccagtgcgttagaagtcggatgcggtggctcacacctgtaatcccagcactttgggaggcccaggcaggcggatcacttgaggttaggagttcaagaccagcctggccaacatggtgaaaccccgtctctactaaaaatacaaaagttagccgggtgtggtggtgcatgcctgtaatcccagcttcttgggaggccaaggcacaagaatcgcttgaaccaggagacggaggtttcagtgaatgaagatcgtgccattgtattccagcctcggcaacacagcaggactgtgattttctttggagactcctagattttctgtggttttgaactgaatttgttggatgttggcaagtgcctcttatgagctgtttctttatcctgcatttgccccacaaagacttatctggaggtgagcaaagtatgtttggtagtgaggtcacaaaggcaatcagccccttcctccccactcccattgccatcttctcagtccttctccctttctttccaagtagtttacccacccctcctctttcctcccctgtccctaaaataatccacgtgtcttcctaaaatctctctttgatcctgtcctttgataacaccgtcagtgcctactactgggtctagacagacctctgttgagcagtcagagtcttccctgactccacaatgcccctttccttggctgaccagtatgactactggtccccacctttcccttgcctatccctacctccctcctactaggttgtcccatccctctcttcacccattcattcatgaccatttttcactaccaagctccccccctcccgaaggaggctgaggtttttgtgactctctagactctattgtgggatggaatgaacattgctaaagaatcttgtgttcgctttactttaaaaaggtatttttttcctaattataaaactgatgtgtcagttacggaaaaattagaaatgcagcacaaatacatgaatattttaccacaaaattgccatataatatcttgtcttttttgggggtgtgaattttttgcattgttctggtcatattctttatcatgtaatttatgttcttttttactaagtattatgtgtggttattatagattttcacaaagatatattgctggtaatatattttattgtgtagtcttataatttacttaaccttctttcaattgttagaaatttaggctatttccagattttcagtattgtaaataatgctgtgatgaccaattttgtgaataaaatgtttttatgtatttcagattattcccttaggatagtctctcagtgccaagttgtcaaaaacatctctattttgcttatcttcctgctctcttgctgccttagggggtagtaaactgaaacataaagtaaacatgcatacaaataaaaaacataaaacaaaaataagcaacctgatggtaataggtgaaagtggtaacctgttttaactttgaattcttgccgggcgcggtggctcacgcctgtaatcccagcactttgggaggctgaggcgggtggatcacgaggtcaggagttcaaaaccagcctggccaagatggtgaaatcccgtctctactaaaaatacaaaaattagccgggcgtggtggcgggcgcctgtaatcccagctacttgggaggctgaggcagagaattgcttgaacccaggaggcggaggttgcagtgagccaagatcgcgccactgcactccagcctgggtgacagagcgagactccgtctcaaataaaaaacaacaaaaaacaaaaaaaacttaaaattctttgcttgttagtgaccttgatcatggttctctttgtacgatagttgggcatctgtatttccacttgtgtgaatttgcctttaaattttggttatgggtttcaccttttaaaataatcaaacatatttatcttttcctgtgtgataggtttttttctgtatcttttcctgttaaacacacagacccctccccaatctggacattgaataaatattcattttcctttgcattgtttggggtttggttttatgcttactgtgtctctccaccccattatcagagtaatatatgctcattgcataaaatctggaacatgtgaaaactggagatgaaaagaagcccagcatttgagacatacccactgctgacatttgtatatttcctttcattcttttacctgcctaaagacatatatgcagatatggacatatttagctttacatacatgcagactaccacatataatctatatcttgtttttttgatctaacacaatgttagcttggttttttatgtcattgacagttcttgattaacagctgtaatggctgcacagccctgcttcattaatttttttttttggactgaaatgtatgtaccacgttccgcttatccattcatccaccagtgaccacttgggtcatttctaccttttggccattgcaataatgttgctgtcaacaaggatgtacaaatatctgttcgagtccctgctcttaattgttttgggtatacacccaacctacattaatctttaatcacttaagatgttggggtttgtgctgggaggtaaccaagtgactctggagcagcctcaccctagctacagagggaaactgactcttccctctctgcccaatcttttgccgcctgtcaggttcccaagctgtccataccttactgtgtgaagcgctttgggtataaactcccaaatagaggctcagccccttttcctttcccaagtccatcctgcaggttatagctcttcagaggaatctcttgaattctggcctgggatctgggattaaagtagaacccagggtgtcccttggggccttaggcatagcccgttgtggtggaacctgccatcagccccactgcactcagtggtcccctggtacttcaggacagtttctctcttctgcacatgagaacttcaagcagagaggactgtcagttgttgccttcacatcaccaatcgtttggccataatggccaagagccctcactgctcttgggtcttgcctttccacatgttactgaaagctcccgttggtgtccctgtccactaactcacctgatgggacagatgccactttcctctgagtgtctgataaaacacagtctgttgtggggagcccacgctcaagggttttctttgggatcagagtttcccggctattactccatgccctgcctgacatcactgtcatgtatggtgctaatcaccaaaggatgcccttgtttgattctggattctaggtgatagtccttatcctctgatgggggaagagtttgggtgggagagaacaaaccgacaagttggttccagatgaggtggctgggagccaaccctcaggtacttggctctgagtaatgtgacggcccaggcaagagggctcccactgccaatgaggaacaaaagctcaaggtctagtagtgtattcagcacatgctaggaaacaagagttgggacgtggacaaggagaggagcaaaggccaggggttaactgcttttggtttttcctctataaaagtcagggactatgatttatatgggtgagaaggtttggagtaggactgaagctgccatttacaaaccccttgccctaatttattgtagttttgggtgtgtttctgaaagaaccttttgcaggtgatttttattcagtactcattaacttacagcttttatgaattcacatcttctacactattgaaaaacataagtttgtattgtgttaagtgcagcatgagttattatatgaataaatcacattaaatttgcaaaaaaaaaaaaa

SEQ ID NO: 4077 - DNA, 1437 bp, Homo sapiens
  source 1..1437: mol_type = genomic DNA
agaacccgccccggaggggagggacgcagggaagagtcgcacggacgcactcgcgctgcggccagcgcccgggcctgcgggcccgggcggcggctgtgttgcgcagtcttcatgggttcccgacgaggaggtctctgtggctgcggcggcggctgctaactgcgccacctgctgcagcctgtccccgccgctctgaagcggccgcgtcgaagccgaaatgccgccaccccggaccggccgaggccttctctggctgggtctggttctgagctccgtctgcgtcgccctcggatccgaaacgcaggccaactcgaccacagatgctctgaacgttcttctcatcatcgtggatgacctgcgcccctccctgggctgttatggggataagctggtgaggtccccaaatattgaccaactggcatcccacagcctcctcttccagaatgcctttgcgcagcaagcagtgtgcgccccgagccgcgtttctttcctcactggcaggagacctgacaccacccgcctgtacgacttcaactcctactggagggtgcacgctggaaacttctccaccatcccccagtacttcaaggagaatggctatgtgaccatgtcggtgggaaaagtctttcaccctgggatatcttctaaccataccgatgattctccgtatagctggtcttttccaccttatcatccttcctctgagaagtatgaaaacactaagacatgtcgagggccagatggagaactccatgccaacctgctttgccctgtggatgtgctggatgttcccgagggcaccttgcctgacaaacagagcactgagcaagccatacagttgttggaaaagatgaaaacgtcagccagtcctttcttcctggccgttgggtatcataagccacacatccccttcagataccccaaggaatttcagaagttgtatcccttggagaacatcaccctggcccccgatcccgaggtccctgatggcctaccccctgtggcctacaacccctggatggacatcaggcaacgggaagacgtccaagccttaaacatcagtgtgccgtatggtccaattcctgtggactttcagcggaaaatccgccagagctactttgcctctgtgtcatatttggatacacaggtcggccgcctcttgagtgctttggacgatcttcagctggccaacagcaccatcattgcatttacctcggatcatggtttcctcatgaggacaaatacctgattttgaataaagcagcattcagttgaaataaccctttctgtggtaattccaagtgaatatttttcttctaggtgatgagtttctacttcctctggtttttacaacaggaaatgaaatggtatctaaaataaacaagctgtggtatgatgattattcaaaaaaaaaaaaaaaaaaaaaaaaaaaaaaaa

SEQ ID NO: 4078 - DNA, 7639 bp, Homo sapiens
  source 1..7639: mol_type = genomic DNA
agaacccgccccggaggggagggacgcagggaagagtcgcacggacgcactcgcgctgcggccagcgcccgggcctgcgggcccgggcggcggctgtgttgcgcagtcttcatgggttcccgacgaggaggtctctgtggctgcggcggcggctgctaactgcgccacctgctgcagcctgtccccgccgctctgaagcggccgcgtcgaagccgaaatgccgccaccccggaccggccgaggccttctctggctgggtctggttctgagctccgtctgcgtcgccctcggatccgaaacgcaggccaactcgaccacagatgctctgaacgttcttctcatcatcgtggatgacctgcgcccctccctgggctgttatggggataagctggtgaggtccccaaatattgaccaactggcatcccacagcctcctcttccagaatgcctttgcgcagcaagcagtgtgcgccccgagccgcgtttctttcctcactggcaggagacctgacaccacccgcctgtacgacttcaactcctactggagggtgcacgctggaaacttctccaccatcccccagtacttcaaggagaatggctatgtgaccatgtcggtgggaaaagtctttcaccctgggatatcttctaaccataccgatgattctccgtatagctggtcttttccaccttatcatccttcctctgagaagtatgaaaacactaagacatgtcgagggccagatggagaactccatgccaacctgctttgccctgtggatgtgctggatgttcccgagggcaccttgcctgacaaacagagcactgagcaagccatacagttgttggaaaagatgaaaacgtcagccagtcctttcttcctggccgttgggtatcataagccacacatccccttcagataccccaaggaatttcagaagttgtatcccttggagaacatcaccctggcccccgatcccgaggtccctgatggcctaccccctgtggcctacaacccctggatggacatcaggcaacgggaagacgtccaagccttaaacatcagtgtgccgtatggtccaattcctgtggactttcagcggaaaatccgccagagctactttgcctctgtgtcatatttggatacacaggtcggccgcctcttgagtgctttggacgatcttcagctggccaacagcaccatcattgcatttacctcggatcatgggtgggctctaggtgaacatggagaatgggccaaatacagcaattttgatgttgctacccatgttcccctgatattctatgttcctggaaggacggcttcacttccggaggcaggcgagaagcttttcccttacctcgacccttttgattccgcctcacagttgatggagccaggcaggcaatccatggaccttgtggaacttgtgtctctttttcccacgctggctggacttgcaggactgcaggttccacctcgctgccccgttccttcatttcacgttgagctgtgcagagaaggcaagaaccttctgaagcattttcgattccgtgacttggaagaggatccgtacctccctggtaatccccgtgaactgattgcctatagccagtatccccggccttcagacatccctcagtggaattctgacaagccgagtttaaaagatataaagatcatgggctattccatacgcaccatagactataggtatactgtgtgggttggcttcaatcctgatgaatttctagctaacttttctgacatccatgcaggggaactgtattttgtggattctgacccattgcaggatcacaatatgtataatgattcccaaggtggagatcttttccagttgttgatgccttgagttttgccaaccatggatggcaaatgtgatgtgctcccttccagctggtgagaggaggagttagagctggtcgttttgtgattacccataatattggaagcagcctgagggctagttaatccaaacatgcatcaacaatttggcctgagaatatgtaacagccaaaccttttcgtttagtctttattaaaatttataattggtaattggaccagttttttttttaatttccctctttttaaaacagttacggcttatttactgaataaatacaaagcaaacaaactcaagttatgtcatacctttggatacgaagaccatacataataaccaaacataacattatacacaaagaatactttcattatttgtggaatttagtgcatttcaaaaagtaatcatatatcaaactaggcaccacactaagttcctgattattttgtttataatttaataatatatcttatgagccctatatattcaaaatattatgttaacatgtaatccatgtttctttttcaaatctaaagttaaaaaaaaatagcagaagccagtgtcttaaagtctatcttttgtttctaagaccatgggatttcataatctcaagataaaatatgtatgaagtaattaatgtagaatttttacaccaaataataaataatgcttaataaactagagatatgagatgtgtaggaaatttggttaaacttttttcagatactttctggcccaaataataatttgttagcaaataatatgacccttgaactcaatggccatctattaaaagactgttgttcacactggaaaacatttaaagatgtgactatatccatgggtggattgaatcactcaaaatatattagtatccttctttagggatggttggttacagacatgtatttattcaggaggcagaaaatattccattttaattgcttattaaagaaaacattaaattctaaattattttgaggactgtgaagacttttcattagtgtaatattaggtcattgtcaatctcccagaatgtagttctatattctctaaatatgaaagtatccagaaaggccagtggtagtaaaaagcttagtgtatataatctcaaaagggatggaatatttacaactcatatttataacatgttgaatcttctcagttatcagtagtcatcagaagtgtcaatagctttctaaataaatattaaatatctactgtcctgtagtgaaggagtaatttttagtaattttctctttacaaagtctccagtgtttccaggtaaatatttgtgaaacaaaatacagcaaactacattgttacttcagtgtattgttgccaaaaatgacaagatattatattaaaatcagtaaattttagacagattttaaaaattaattagcctacaatagaggttatatggtaacacggtgatcttctaagcagttaagtgactgactgttctggcaacaacgacttctccgtgactgaagggccctgttcatttcctgatcctgaagctcgtctctcttttgagcctccgcttgctttggtcgatggtttccctcagctttttctttgctgttcttcatcctcgttgttgctgtcatcatgttcactgtggcttttacaatacagcctgtaaattccttatgacatagttcagtgcatttggctttattgcctgctccacagttctttacctttacttggcttagagaaactgtatctttgttgcttcatataacctttccccaaccccactaagctggacataacttattagtggtcctcccgtcactttatttgtagaaatctctctttcacatgagcaggggttctttcatgtggtttagctgacagcagaactagtgattctagacattttgcatggccctcattcagtggctcacaaacatgagggagcatcagaactacttgaggggcttgttaaaacccagtgcgttagaagtcggatgcggtggctcacacctgtaatcccagcactttgggaggcccaggcaggcggatcacttgaggttaggagttcaagaccagcctggccaacatggtgaaaccccgtctctactaaaaatacaaaagttagccgggtgtggtggtgcatgcctgtaatcccagcttcttgggaggccaaggcacaagaatcgcttgaaccaggagacggaggtttcagtgaatgaagatcgtgccattgtattccagcctcggcaacacagcaggactgtgattttctttggagactcctagattttctgtggttttgaactgaatttgttggatgttggcaagtgcctcttatgagctgtttctttatcctgcatttgccccacaaagacttatctggaggtgagcaaagtatgtttggtagtgaggtcacaaaggcaatcagccccttcctccccactcccattgccatcttctcagtccttctccctttctttccaagtagtttacccacccctcctctttcctcccctgtccctaaaataatccacgtgtcttcctaaaatctctctttgatcctgtcctttgataacaccgtcagtgcctactactgggtctagacagacctctgttgagcagtcagagtcttccctgactccacaatgcccctttccttggctgaccagtatgactactggtccccacctttcccttgcctatccctacctccctcctactaggttgtcccatccctctcttcacccattcattcatgaccatttttcactaccaagctccccccctcccgaaggaggctgaggtttttgtgactctctagactctattgtgggatggaatgaacattgctaaagaatcttgtgttcgctttactttaaaaaggtatttttttcctaattataaaactgatgtgtcagttacggaaaaattagaaatgcagcacaaatacatgaatattttaccacaaaattgccatataatatcttgtcttttttgggggtgtgaattttttgcattgttctggtcatattctttatcatgtaatttatgttcttttttactaagtattatgtgtggttattatagattttcacaaagatatattgctggtaatatattttattgtgtagtcttataatttacttaaccttctttcaattgttagaaatttaggctatttccagattttcagtattgtaaataatgctgtgatgaccaattttgtgaataaaatgtttttatgtatttcagattattcccttaggatagtctctcagtgccaagttgtcaaaaacatctctattttgcttatcttcctgctctcttgctgccttagggggtagtaaactgaaacataaagtaaacatgcatacaaataaaaaacataaaacaaaaataagcaacctgatggtaataggtgaaagtggtaacctgttttaactttgaattcttgccgggcgcggtggctcacgcctgtaatcccagcactttgggaggctgaggcgggtggatcacgaggtcaggagttcaaaaccagcctggccaagatggtgaaatcccgtctctactaaaaatacaaaaattagccgggcgtggtggcgggcgcctgtaatcccagctacttgggaggctgaggcagagaattgcttgaacccaggaggcggaggttgcagtgagccaagatcgcgccactgcactccagcctgggtgacagagcgagactccgtctcaaataaaaaacaacaaaaaacaaaaaaaacttaaaattctttgcttgttagtgaccttgatcatggttctctttgtacgatagttgggcatctgtatttccacttgtgtgaatttgcctttaaattttggttatgggtttcaccttttaaaataatcaaacatatttatcttttcctgtgtgataggtttttttctgtatcttttcctgttaaacacacagacccctccccaatctggacattgaataaatattcattttcctttgcattgtttggggtttggttttatgcttactgtgtctctccaccccattatcagagtaatatatgctcattgcataaaatctggaacatgtgaaaactggagatgaaaagaagcccagcatttgagacatacccactgctgacatttgtatatttcctttcattcttttacctgcctaaagacatatatgcagatatggacatatttagctttacatacatgcagactaccacatataatctatatcttgtttttttgatctaacacaatgttagcttggttttttatgtcattgacagttcttgattaacagctgtaatggctgcacagccctgcttcattaatttttttttttggactgaaatgtatgtaccacgttccgcttatccattcatccaccagtgaccacttgggtcatttctaccttttggccattgcaataatgttgctgtcaacaaggatgtacaaatatctgttcgagtccctgctcttaattgttttgggtatacacccaacctacattaatctttaatcacttaagatgttggggtttgtgctgggaggtaaccaagtgactctggagcagcctcaccctagctacagagggaaactgactcttccctctctgcccaatcttttgccgcctgtcaggttcccaagctgtccataccttactgtgtgaagcgctttgggtataaactcccaaatagaggctcagccccttttcctttcccaagtccatcctgcaggttatagctcttcagaggaatctcttgaattctggcctgggatctgggattaaagtagaacccagggtgtcccttggggccttaggcatagcccgttgtggtggaacctgccatcagccccactgcactcagtggtcccctggtacttcaggacagtttctctcttctgcacatgagaacttcaagcagagaggactgtcagttgttgccttcacatcaccaatcgtttggccataatggccaagagccctcactgctcttgggtcttgcctttccacatgttactgaaagctcccgttggtgtccctgtccactaactcacctgatgggacagatgccactttcctctgagtgtctgataaaacacagtctgttgtggggagcccacgctcaagggttttctttgggatcagagtttcccggctattactccatgccctgcctgacatcactgtcatgtatggtgctaatcaccaaaggatgcccttgtttgattctggattctaggtgatagtccttatcctctgatgggggaagagtttgggtgggagagaacaaaccgacaagttggttccagatgaggtggctgggagccaaccctcaggtacttggctctgagtaatgtgacggcccaggcaagagggctcccactgccaatgaggaacaaaagctcaaggtctagtagtgtattcagcacatgctaggaaacaagagttgggacgtggacaaggagaggagcaaaggccaggggttaactgcttttggtttttcctctataaaagtcagggactatgatttatatgggtgagaaggtttggagtaggactgaagctgccatttacaaaccccttgccctaatttattgtagttttgggtgtgtttctgaaagaaccttttgcaggtgatttttattcagtactcattaacttacagcttttatgaattcacatcttctacactattgaaaaacataagtttgtattgtgttaagtgcagcatgagttattatatgaataaatcacattaaatttgcaaaaaaaaaaaaa

SEQ ID NO: 4079 - DNA, 2550 bp, Homo sapiens
  source 1..2550: mol_type = genomic DNA
cgtggatcccgagaaagaggcgcaggacgaggaggcagaacccgactggcgcgtagagcagcagcacgagcagtaggaagcagtcacccggaagcctgggggcgagaggcgaagtggtcaggcgccgaaggccgagagcacgcggggatcggtctcttcccgccgggtctcttaccggtgcgagtcaaagagccgctccggccccggccctgagggaagctccataactgctgcttcaggagcgcccggccgtcgccgccgccgccattttcgcgcccggccgcaggggctcttgggaaggcggagtctttgggcatccgcccggggtgaggggacccgaagtcctgaggcgcgccggaagggctagcggtcccagcataccccgcggccccttgggccgtctcacaactcgcgtccggcggagaccacaattcccggcattcgtggggcagggaggagtcggcctcccggaatcctggtcccggcgtgcacttctgaaggacttcaggtaccggcgtgccccgcgtcctactgtccgcctgctcgcgtcctgggtgccgcctctgagtagggcgggcgaggaggcagccaaggcggagctgatggctgcgccgagggcggggcggggtgcaggctggagccttcgggcatggcgggctttggggggcattcgctgggggaggagaccccgtttgacccctgacctccgggccctgctgacgtcaggaacttctgacccccgggcccgagtgacttatgggacccccagtctctgggcccggttgtctgttggggtcactgaaccccgagcatgcctgacgtctgggaccccgggtccccgggcacaactgactgcggtgaccccagataccaggacccgggaggcctcagagaactctggaacccgttcgcgcgcgtggctggcggtggcgctgggcgctgggggggcagtgctgttgttgttgtggggcgggggtcggggtcctccggccgtcctcgccgccgtccctagcccgccgcccgcttctccccggagtcagtacaacttcatcgcagatgtggtggagaagacagcacctgccgtggtctatatcgagatcctggaccggcaccctttcttgggccgcgaggtccctatctcgaacggctcaggattcgtggtggctgccgatgggctcattgtcaccaacgcccatgtggtggctgatcggcgcagagtccgtgtgagactgctaagcggcgacacgtatgaggccgtggtcacagctgtggatcccgtggcagacatcgcaacgctgaggattcagactaaggagcctctccccacgctgcctctgggacgctcagctgatgtccggcaaggggagtttgttgttgccatgggaagtccctttgcactgcagaacacgatcacatccggcattgttagctctgctcagcgtccagccagagacctgggactcccccaaaccaatgtggaatacattcaaactgatgcagctattgattttggaaactctggaggtcccctggttaacctggatggggaggtgattggagtgaacaccatgaaggtcacagctggaatctcctttgccatcccttctgatcgtcttcgagagtttctgcatcgtggggaaaagaagaattcctcctccggaatcagtgggtcccagcggcgctacattggggtgatgatgctgaccctgagtcccagcatccttgctgaactacagcttcgagaaccaagctttcccgatgttcagcatggtgtactcatccataaagtcatcctgggctcccctgcacaccgggctggtctgcggcctggtgatgtgattttggccattggggagcagatggtacaaaatgctgaagatgtttatgaagctgttcgaacccaatcccagttggcagtgcagatccggcggggacgagaaacactgaccttatatgtgacccctgaggtcacagaatgaatagatcaccaagagtatgaggctcctgctctgatttcctccttgcctttctggctgaggttctgagggcaccgagacagagggttaaatgaaccagtgggggcaggtccctccaaccaccagcactgactcctgggctctgaagaatcacagaaacactttttatataaaataaaattatacctagcaacatattatagtaaaaaatgaggtgggagggctggatcttttcccccaccaaaaggctagaggtaaagctgtatccccctaaacttaggggagatactggagctgaccatcctgacctcctattaaagaaaatgagctgctgccatcttttgtgggcagttagtcaggtgctgctctttgtggtgtggtgggctctggtctgttctgctcggtgctgggcctgggagcaaagattcccatgcttggctacagatactgacagctggcctctgaaggagggtgaaaacttctgcttgacagttccacatccatagtgcatggtctgatgagtgcggttgctgacatgggtttcttggtaagctcctgaggtaatggcagcctc

SEQ ID NO: 4080 - DNA, 2259 bp, Homo sapiens
  source 1..2259: mol_type = genomic DNA
cgtggatcccgagaaagaggcgcaggacgaggaggcagaacccgactggcgcgtagagcagcagcacgagcagtaggaagcagtcacccggaagcctgggggcgagaggcgaagtggtcaggcgccgaaggccgagagcacgcggggatcggtctcttcccgccgggtctcttaccggtgcgagtcaaagagccgctccggccccggccctgagggaagctccataactgctgcttcaggagcgcccggccgtcgccgccgccgccattttcgcgcccggccgcaggggctcttgggaaggcggagtctttgggcatccgcccggggtgaggggacccgaagtcctgaggcgcgccggaagggctagcggtcccagcataccccgcggccccttgggccgtctcacaactcgcgtccggcggagaccacaattcccggcattcgtggggcagggaggagtcggcctcccggaatcctggtcccggcgtgcacttctgaaggacttcaggtaccggcgtgccccgcgtcctactgtccgcctgctcgcgtcctgggtgccgcctctgagtagggcgggcgaggaggcagccaaggcggagctgatggctgcgccgagggcggggcggggtgcaggctggagccttcgggcatggcgggctttggggggcattcgctgggggaggagaccccgtttgacccctgacctccgggccctgctgacgtcaggaacttctgacccccgggcccgagtgacttatgggacccccagtctctgggcccggttgtctgttggggtcactgaaccccgagcatgcctgacgtctgggaccccgggtccccgggcacaactgactgcggtgaccccagataccaggacccgggaggcctcagagaactctggaacccgttcgcgcgcgtggctggcggtggcgctgggcgctgggggggcagtgctgttgttgttgtggggcgggggtcggggtcctccggccgtcctcgccgccgtccctagcccgccgcccgcttctccccggagtcagtacaacttcatcgcagatgtggtggagaagacagcacctgccgtggtctatatcgagatcctggaccggcaccctttcttgggccgcgaggtccctatctcgaacggctcaggattcgtggtggctgccgatgggctcattgtcaccaacgcccatgtggtggctgatcggcgcagagtccgtgtgagactgctaagcggcgacacgtatgaggccgtggtcacagctgtggatcccgtggcagacatcgcaacgctgaggattcagactaagtttggaaactctggaggtcccctggttaacctggatggggaggtgattggagtgaacaccatgaaggtcacagctggaatctcctttgccatcccttctgatcgtcttcgagagtttctgcatcgtggggaaaagaagaattcctcctccggaatcagtgggtcccagcggcgctacattggggtgatgatgctgaccctgagtcccagggctggtctgcggcctggtgatgtgattttggccattggggagcagatggtacaaaatgctgaagatgtttatgaagctgttcgaacccaatcccagttggcagtgcagatccggcggggacgagaaacactgaccttatatgtgacccctgaggtcacagaatgaatagatcaccaagagtatgaggctcctgctctgatttcctccttgcctttctggctgaggttctgagggcaccgagacagagggttaaatgaaccagtgggggcaggtccctccaaccaccagcactgactcctgggctctgaagaatcacagaaacactttttatataaaataaaattatacctagcaacatattatagtaaaaaatgaggtgggagggctggatcttttcccccaccaaaaggctagaggtaaagctgtatccccctaaacttaggggagatactggagctgaccatcctgacctcctattaaagaaaatgagctgctgccatcttttgtgggcagttagtcaggtgctgctctttgtggtgtggtgggctctggtctgttctgctcggtgctgggcctgggagcaaagattcccatgcttggctacagatactgacagctggcctctgaaggagggtgaaaacttctgcttgacagttccacatccatagtgcatggtctgatgagtgcggttgctgacatgggtttcttggtaagctcctgaggtaatggcagcctc

SEQ ID NO: 4081 - DNA, 1330 bp, Homo sapiens
  source 1..1330: mol_type = genomic DNA
gcgcgggtggcggaggcgattgaagctgctggcccagcatgtggtgcgcgagcccagttgctgtggtggccttttgcgccgggcttttggtctctcacccggtgctgacgcagggccaggaggccggggggcggccaggggccgactgtgaagtatgtaaagaattcttgaaccgattctacaagtcactgatagacagaggagttaacttttcgctggacactatagagaaagaattgatcagtttttgcttggacaccaaaggaaaagaaaaccgcctgtgctattatctaggagccacaaaagacgcagccacaaagatcctaagtgaagtcactcgcccaatgagtgtgcatatgcctgcaatgaagatttgtgagaagctgaagaagttggatagccagatctgtgagctgaaatatgaaaaaacactggacttggcatcagttgacctgcggaagatgagagtggcagagctgaagcagatcctgcatagctggggggaggagtgcagggcctgtgcagaaaaaactgactatgtgaatctcattcaagagctggcccccaagtatgcagcgacacaccccaaaacagagctctgatctccaatgccagcacatttgtgacttgtaattagagagaaaagtgactctctaggatatggacatgttgattaaggataactgggaatgcatcatatttggtctcatgctttttgtgttggtattattcctcagaattttgttacgtgggtttatgagtgaaactaatactactgataacttacatttgcagtgtaccaaaagctaaaagttcctttctcataagtttcttggaatgactatgccagttttcattgcctgtctcctaaaagtgacctactgacaaattgatggagtaaattgattccaagaaagaagaaggcattcagagactcctctctggatgcaattttaaaatatattggactaaaacaaaagacacaacagtcagcttatctaatgcacaacttcaatcccaaatacagaatcaaaagtttttttcaagtgaattttctgttttcactctatattgtagctctctttggtatcagaaatggtcaggcaggagtactcgtttttcccattggaagaaaacccacttaaacctacttaaagaaaatagagagatcaagaaaccgtataagtatagccaatgtttggcaattatatcaacatttacattgttaattgaaccaagctcaaggtctttttcattccttacagtcacatatcagacaagtttttgatggaagattaaagcatattaaaaacactcataggcaacttgg

SEQ ID NO: 4082 - DNA, 5307 bp, Homo sapiens
  source 1..5307: mol_type = genomic DNA
gggagcgcgcgcgccggtgcgggtgcgtgcgtgagcgtgctcgtctccgctgccgctgccgctgccgctgccggtgccgcacccgcgccctctgccgccgccgccgccgccgcccggggtctccaggctgaggagtgcgtcggccgctgcccagcagcgccgcgaatcggggagcggagccgcggagccggcgggagggcgggcgggcgggcggacgggcagaatagcctaacatggcagaccagagacagcgctcactgtctacctctggggagtcattgtaccacgtccttgggttggacaagaacgcaacctcagatgacattaaaaagtcctatcggaagcttgccttgaaatatcaccccgacaagaaccccgacaacccggaggccgcggacaagtttaaggagatcaacaacgcgcacgccatcctcacggacgccacaaaaaggaacatctacgacaagtacggctcgctgggtctctacgtggccgagcagtttggggaagagaacgtgaacacctacttcgtgctgtccagctggtgggccaaggccctgtttgtcttctgcggcctcctcacgtgctgctactgctgctgctgtctgtgctgctgcttcaactgctgctgcgggaagtgtaagcccaaggcgcctgaaggcgaggagacggagttctacgtgtcccccgaggatctggaggcacagctgcagtctgacgagagggaggccacagacacgccgatcgtcatacagccggcatccgccaccgagaccacccagctcacagccgactcccaccccagctaccacactgacgggttcaactaaatccaggaggagctgtggtcagaggaggagccggcgcctggccacgccaaccttagaatcatgaactgtagtcacagagatgggaaggcagcctcctgcctgccctggccttgctggggcccctcctgcctccacgcccacccagcgtcgacccttgacccacgaagtgcgtagcatgcagtatttaaagcagtgtagctacggtcttctgtttttttcccttttttaatagcatgtatggggttctgttccatgtctgtgttgtggacattccgcggcatgaccgcgtgaactgcacggtggagctgcctcagggctgtcggtcaggttggtccagtgaggggtgactgcagccggtcaggtgggcgaggagaaggggggctgcccctttcctacctgtgcttgaggggccggaggcaggtgctgcctggcagagctgtgttaccgtcttggcctcggggtctggtccacactctgtgctcccagccttgaggctgcagtaggactctgatctcacctgccagaagagaggcggggccgcgtcctcctggcgtcaccggcgtcactgtcattccttggtgtctgtgctgggcatggttggcttgggggtctgtggtttcctgggccttgtggcagggtttctcccgtgggagaatttggtgtggaaagcataggaggccccttccgaggttgacaccgtgtcctccgcggtgtttctcgcctggtcgtctcgtcgtgtggacgctgccgttctggttctcggaggtgtgtccttcgccgtgttggggttatttgtctgtgttcctgcacttttcccgggctctgagctggattgatggggccagtctcccccctcccatcttgaggtcgttctccacattccttccagcacacctgtcctttccatagccctttttggacctttagaaccacagatgataggaccagcccaatgagccacagtcagagagtagattgtgcatgtgtgagcacccagctactggggacgggggctctcccacgacccctcctcctgtgtttgccagagctcccatctgccccactcgcctttgccccgtcatcgatgattcaggcagagccagattcgttaggtccctggaggaaggactgactggaccagagggaccctctggctcaggagggttgggtccctgggaggccggcagccaggccacagaatccacacgtggaccattgtgggtccctgggaggccggcagccaggccacggaatccacacgtggaccattgtgggtcccttgggaggccagcagccagactacggaatccacatgtggaccatgggaagtcagtctcttgcgtgtcctagaccttgtgggtggcgccctgcataggggagcagggggaacgggtctgatgtccctgtgctggctgagggctcagagctgcccgcactccgtagctcatgggatgtgctgggcctgcctttggcgccatgctgcagactccagtgggcctggtttctgcagaatgtccatggtggccgctgcagagttgcagaggtccctgtagagataaagctgaggaggaggctgtgtgtgatggctctggctcggaccaaccagatgagcctcctgaagcccccttccctgcctgcctgctgacccgtggccccagctcactcattgccctcagcagccacccgaggctgtgcagaagggtaggttcaggttgaccaggaagctgccaaaagggacatggatatgaggatacatctggacgtgcttaggaacagggtgctggttgagggcccccagctgacccctactgcagatccgcatgtggaccatgagccggctgccagcactaggtcctgggcagctttgtttgtcccacttttctttgtttcttctcactaaaatgatcacgaagacctttgacaagaggagagatatgcactgtgatattaaattagaaataatttatcaaaatcagacctctcctaaaagaataagaaattcattgtttggcccatcctgaaaggtgaggtggcgagacagtggggtgcctccgtgccgcttcgtgcagcagcaagttcagcctgagatgctggctgtactcagcctttgcaatttttgtagatgtagcttaggacgtgagttatttttccgcagactggccaagagccaggttctaagcttggacctaaggtagaaagctgcccatcgggggccctagctcagccccaccaggccctctgttgggcctgcacacagctctgtggctagaacactccaaggcccttcggtacccatcagagtgggccccttgccaggtggcttttcagttacagagtccagtggaccattttgtagaaccatgcagctccctgcggaaggtggggtagggtgggaaagaggagcaggtctggaggtttgtggaacccagtcccctgcagaatctgtaaaacctaataaatcatggttgtggccattctcacggtggtgattgtgattagacgacccccgggaagcccagacactcggggcctggagttcctccccctgcctgacctagaagcagaaccgttttcagcgctctgccctgttggctttaaggctttgtcttaatttaaggaaaaagatcctcccgggttttatttctctctttcttgagtggactgtttccctataattaaaagaggtggtgagtcctggggcagcttccgcgcctccctgtccacgtgctaacagatcaggacgcccccagcacccctgcctgcttttgctggtggcagtgacgggaccccgactcctcactctcgggccgcagacaatgctgtgagcaagtgtggccatgggcacagaatgtccctttggacgccgctgctgggggctgccaggggccctctggggtcgtgctttgaggcccgtccggttcacgagggggtccgggcagcactgactgcttccgacctgcaggaggcgtaggagcggccctgcgggccctttcacggcagctgctgctgtatagatttgtctccactcagtgacgtgggatttttttgtcttccttttggctttatttttaaactgctttagatattactgctcagtgtttgtgaactttcctagttctctatgttgttagtgcagccagcacccagtggggacctactagaaaaaggaactggcatgcacacgtgcccagcaggaaaagcttcgtcttcacgtcggctgctgccatccagaagaggccctggagcctcacgccgtcgaggctgctctcaggcgttctgttccgggcgaggcttgtgctgcaaggaagggcaccagcatgcaggctgccactggagggtccgggtgctgcgggcagagttcagcgcttgtccaccctcccttagctctgactcagtgcatcctactgtggggacatctcgtgaggggacacgaaatgactgatctcaccctttcccagtattcagagctgtgaacccctgtggcgcaggactggcctgtgtctgttattttggttgtaaatcattctcctgtggaattggcaaaagctacatttttactgtccttaccagcaacagtttgcgtcgtcacatgctgtgagtgtgggctgtggtgtgtccgtgtgtgtacatatgtgtatatgtatatatcacgcagcaggagtgtcattcatgctgctgtcccctggtgaagtgacaagtacaattaaaggtggctctgaaatggcctctggtttcttgggagtcgggcagggacctgcaggaggctttcccagcaggtgcacagaaggaagcgctgagcccactgtgtgcagagggtgtgtgcccagggcactgccacggcccccaccagcattggcctctgctctgcagggtggggtgcccatcctgggggctgtgtgtcatgctcacctgacccaggtgtgtgtcccggtgtgaaatcgaggaggggactggaagcccttccctgccttgaaacatgaaagctgattttctgagcagcagatacggtcagtggcaaagctgcatctgaagggcggcctgggaaggggccctgtgctggccccgggtccgccccagaggagtccacacagcaccacctccagaaggggctgggcccggggtcctgcaggcggcaccttttggtagagtttgtttccctggaaaatggggaaaatgtttcaagccaggtgaggggggaagttaacactgaaatatgtattgtttttaaaaatcaaatgcacacgcatggaagctgcttgtccatgcactggttttgtcactggcgtcctggaatccgaccgtgttggggtgcaggcgctgtcagactccggctgatcctggctcgagcacacacatctaagggccaggctggttccgcatggtgatctccgtcttgtatgtctgaatgttggcctaaaataaagattactgttgtaaaataaatgttttcactgcggaccccaaaaaaaaaaaaaaa

SEQ ID NO: 4083 - DNA, 2214 bp, Homo sapiens
  source 1..2214: mol_type = genomic DNA
gtcacatggggtgcgcgcccagactccgacccggaggcggaaccggcagtgcagcccgaagccccgcagtccccgagcacgcgtggccatgcgtcccctgcgcccccgcgccgcgctgctggcgctcctggcctcgctcctggccgcgcccccggtggccccggccgaggccccgcacctggtgcatgtggacgcggcccgcgcgctgtggcccctgcggcgcttctggaggagcacaggcttctgccccccgctgccacacagccaggctgaccagtacgtcctcagctgggaccagcagctcaacctcgcctatgtgggcgccgtccctcaccgcggcatcaagcaggtccggacccactggctgctggagcttgtcaccaccagggggtccactggacggggcctgagctacaacttcacccacctggacgggtacctggaccttctcagggagaaccagctcctcccagggtttgagctgatgggcagcgcctcgggccacttcactgactttgaggacaagcagcaggtgtttgagtggaaggacttggtctccagcctggccaggagatacatcggtaggtacggactggcgcatgtttccaagtggaacttcgagacgtggaatgagccagaccaccacgactttgacaacgtctccatgaccatgcaaggcttcctgaactactacgatgcctgctcggagggtctgcgcgccgccagccccgccctgcggctgggaggccccggcgactccttccacaccccaccgcgatccccgctgagctggggcctcctgcgccactgccacgacggtaccaacttcttcactggggaggcgggcgtgcggctggactacatctccctccacaggaagggtgcgcgcagctccatctccatcctggagcaggagaaggtcgtcgcgcagcagatccggcagctcttccccaagttcgcggacacccccatttacaacgacgaggcggacccgctggtgggctggtccctgccacagccgtggagggcggacgtgacctacgcggccatggtggtgaaggtcatcgcgcagcatcagaacctgctactggccaacaccacctccgccttcccctacgcgctcctgagcaacgacaatgccttcctgagctaccacccgcaccccttcgcgcagcgcacgctcaccgcgcgcttccaggtcaacaacacccgcccgccgcacgtgcagctgttgcgcaagccggtgctcacggccatggggctgctggcgctgctggatgaggagcagctctgggccgaagtgtcgcaggccgggaccgtcctggacagcaaccacacggtgggcgtcctggccagcgcccaccgcccccagggcccggccgacgcctggcgcgccgcggtgctgatctacgcgagcgacgacacccgcgcccaccccaaccgcagcgtcgcggtgaccctgcggctgcgcggggtgccccccggcccgggcctggtctacgtcacgcgctacctggacaacgggctctgcagccccgacggcgagtggcggcgcctgggccggcccgtcttccccacggcagagcagttccggcgcatgcgcgcggctgaggacccggtggccgcggcgccccgccccttacccgccggcggccgcctgaccctgcgccccgcgctgcggctgccgtcgcttttgctggtgcacgtgtgtgcgcgccccgagaagccgcccgggcaggtcacgcggctccgcgccctgcccctgacccaagggcagctggttctggtctggtcggatgaacacgtgggctccaagtgcctgtggacatacgagatccagttctctcaggacggtaaggcgtacaccccggtcagcaggaagccatcgaccttcaacctctttgtgttcagcccagacacaggtgctgtctctggctcctaccgagttcgagccctggactactgggcccgaccaggccccttctcggaccctgtgccgtacctggaggtccctgtgccaagagggcccccatccccgggcaatccatgagcctgtgctgagccccagtgggttgcacctccaccggcagtcagcgagctggggctgcactgtgcccatgctgccctcccatcaccccctttgcaatatatttttatattttattattttcttttatatcttggtaccaacgccccctttaaagcggctttgca

SEQ ID NO: 4084 - DNA, 5154 bp, Homo sapiens
  source 1..5154: mol_type = genomic DNA
gcaaaatcagccctccctcctcccgctccttcgccgcggccctcccctcctcgcgctgctctcgttcgcttggctcagctcagctcagctcagcgcagctccgcggccgccaagccgaggcgggcacggtctccgagtcgcggacgccagctccgagctccctctctccgccgcgcctccgccaggtcgcgccttcgtcgggaccacttcgggcaggagtcgcgtggcgaaggcctgcggccgcggcacaaagttgggggccgcgaagatgaggctgtccccggcgcccctgaagctgagccggactccggcactgctggccctggcgctgcccctggccgcggcgctggccttctccgacgagaccctggacaaagtgcccaagtcagagggctactgcagccgtatcctgcgcgcccagggcacgcggcgcgagggctacaccgagttcagcctccgcgtggagggcgaccccgacttctacaagccgggaaccagctaccgcgtaacactttcagctgctcctccctcctacttcagaggattcacattaattgccctcagagagaacagagagggtgataaggaagaagaccatgctgggaccttccagatcatagacgaagaagaaactcagtttatgagcaattgccctgttgcagtcactgaaagcactccacggaggaggacccggatccaggtgttttggatagcaccaccagcgggaacaggctgcgtgattctgaaggccagcatcgtacaaaaacgcattatttattttcaagatgagggctctctgaccaagaaactttgtgaacaagattccacatttgatggggtgactgacaaacccatcttagactgctgtgcctgcggaactgccaagtacagactcacattttatgggaattggtccgagaagacacacccaaaggattaccctcgtcgggccaaccactggtctgcgatcatcggaggatcccactccaagaattatgtactgtgggaatatggaggatatgccagcgaaggcgtcaaacaagttgcagaattgggctcacccgtgaaaatggaggaagaaattcgacaacagagtgatgaggtcctcaccgtcatcaaagccaaagcccaatggccagcctggcagcctctcaacgtgagagcagcaccttcagctgaattttccgtggacagaacgcgccatttaatgtccttcctgaccatgatgggccctagtcccgactggaacgtaggcttatctgcagaagatctgtgcaccaaggaatgtggctgggtccagaaggtggtgcaagacctgattccctgggacgctggcaccgacagcggggtgacctatgagtcacccaacaaacccaccattccccaggagaaaatccggcccctgaccagcctggaccatcctcagagtcctttctatgacccagagggtgggtccatcactcaagtagccagagttgtcatcgagagaatcgcacggaagggtgaacaatgcaatattgtacctgacaatgtcgatgatattgtagctgacctggctccagaagagaaagatgaagatgacacccctgaaacctgcatctactccaactggtccccatggtccgcctgcagctcctccacctgtgacaaaggcaagaggatgcgacagcgcatgctgaaagcacagctggacctcagcgtcccctgccctgacacccaggacttccagccctgcatgggccctggctgcagtgacgaagacggctccacctgcaccatgtccgagtggatcacctggtcgccctgcagcatctcctgcggcatgggcatgaggtcccgggagaggtatgtgaagcagttcccggaggacggctccgtgtgcacgctgcccactgaggaaacggagaagtgcacggtcaacgaggagtgctctcccagcagctgcctgatgaccgagtggggcgagtgggacgagtgcagcgccacctgcggcatgggcatgaagaagcggcaccgcatgatcaagatgaaccccgcagatggctccatgtgcaaagccgagacatcacaggcagagaagtgcatgatgccagagtgccacaccatcccatgcttgctgtccccatggtccgagtggagtgactgcagcgtgacctgcgggaagggcatgcgaacccgacagcggatgctcaagtctctggcagaacttggagactgcaatgaggatctggagcaggtggagaagtgcatgctccctgaatgccccattgactgtgagctcaccgagtggtcccagtggtcggaatgtaacaagtcatgtgggaaaggccacgtgattcgaacccggatgatccaaatggagcctcagtttggaggtgcaccctgcccagagactgtgcagcgaaaaaagtgccgcatccgaaaatgccttcgaaatccatccatccaaaagctacgctggagggaggcccgagagagccggcggagtgagcagctgaaggaagagtctgaaggggagcagttcccaggttgtaggatgcgcccatggacggcctggtcagaatgcaccaaactgtgcggaggtggaattcaggaacgttacatgactgtaaagaagagattcaaaagctcccagtttaccagctgcaaagacaagaaggagatcagagcatgcaatgttcatccttgttagcaagggtacgagttccccagggctgcactctagattccagagtcaccaatggctggattatttgcttgtttaagacaatttaaattgtgtacgctagttttcatttttgcagtgtggttcgcccagtagtcttgtggatgccagagacatcctttctgaatacttcttgatgggtacaggctgagtggggcgccctcacctccagccagcctcttcctgcagaggagtagtgtcagccaccttgtactaagctgaaacatgtccctctggagcttccacctggccagggaggacggagactttgacctactccacatggagaggcaaccatgtctggaagtgactatgcctgagtcccagggtgcggcaggtaggaaacattcacagatgaagacagcagattccccacattctcatctttggcctgttcaatgaaaccattgtttgcccatctcttcttagtggaactttaggtctcttttcaagtctcctcagtcatcaatagttcctggggaaaaacagagctggtagacttgaagaggagcattgatgttgggtggcttttgttctttcactgagaaattcggaatacatttgtctcacccctgatattggttcctgatgcccccccaacaaaaataaataaataaattatggctgctttatttaaatataaggtagctagtttttacacctgagataaataataagcttagagtgtatttttcccttgcttttgggggttcagaggagtatgtacaattcttctgggaagccagccttctgaactttttggtactaaatccttattggaaccaagacaaaggaagcaaaattggtctctttagagaccaatttgcctaaattttaaaatcttcctacacacatctagacgttcaagtttgcaaatcagtttttagcaagaaaacatttttgctatacaaacattttgctaagtctgcccaaagcccccccaatgcattccttcaacaaaatacaatctctgtactttaaagttattttagtcatgaaattttatatgcagagagaaaaagttaccgagacagaaaacaaatctaagggaaaggaatattatgggattaagctgagcaagcaattctggtggaaagtcaaacctgtcagtgctccacaccagggctgtggtcctcccagacatgcataggaatggccacaggtttacactgccttcccagcaattataagcacaccagattcagggagactgaccaccaagggatagtgtaaaaggacattttctcagttgggtccatcagcagtttttcttcctgcatttattgttgaaaactattgtttcatttcttcttttataggccttattactgcttaatccaaatgtgtaccattggtgagacacatacaatgctctgaatacactacgaatttgtattaaacacatcagaatatttccaaatacaacatagtatagtcctgaatatgtacttttaacacaagagagactattcaataaaaactcactgggtctttcatgtctttaagctaagtaagtgttcagaaggttcttttttatattgtcctccacctccatcattttcaataaaagatagggcttttgctcccttgttcttggagggaccattattacatctctgaactacctttgtatccaacatgttttaaatccttaaatgaattgctttctcccaaaaaaagcacaatataaagaaacacaagatttaattatttttctacttggggggaaaaaagtcctcatgtagaagcacccacttttgcaatgttgttctaagctatctatctaactctcagcccatgataaagttccttaagctggtgattcctaatcaaggacaagccaccctagtgtctcatgtttgtatttggtcccagttgggtacattttaaaatcctgattttggagacttaaaaccaggttaatggctaagaatgggtaacatgactcttgttggattgttattttttgtttgcaatggggaatttataagaagcatcaagtctctttcttaccaaagtcttgttaggtggtttatagttcttttggctaacaaatcattttggaaataaagattttttactacaaaaatgaaatttgtttggacttccacttgagacagtaaagagagtattagacacccagtaaaaactgccatataaagaagttgtaattgtttgttgtgtatgtatttttttcaatgccaaaccagctgtgatccaatttacatccacattttaggtccaacagcaagaagttcagagagagatttcccaaccagacattgggtcactcactggtcaccttgccagtgcattttattagaagggaatctgttgtagcaaatgggaataaacctgggtttctatagacccagaactgaaaaaataaacatcgtgctgtttttaatttgaaaaaaaaaaaaaaaaaa

SEQ ID NO: 4085 - DNA, 5579 bp, Homo sapiens
  source 1..5579: mol_type = genomic DNA
gagagcgaccgaggagagaagagagcagagcaatacaaaagcagcctcggatctagccggagctgcaagcgttaaggggaggcggagagtgacgcggtttgcgtctggagcggctccttggagtccacagcatccaccgccggagcctcgccttcctttctccctctgcagacacaacgagacacaaaaagagaggcaacccctagaccaccgcgaaggacccatctgcaccatgaccgagaccaccaagacccacgttatcttgctcgcctgcggcagcttcaatcccatcaccaaagggcacattcagatgtttgaaagagccagggattatctgcacaaaactggaaggtttattgtgattggcgggattgtctcccctgtccacgactcctatggaaaacagggcctcgtgtcaagccggcaccgtctcatcatgtgtcagctggccgtccagaattctgattggatcagggtggacccttgggagtgctaccaggacacctggcagacgacctgcagcgtgttggaacaccaccgggacctcatgaagagggtgactggctgcatcctctccaatgtcaacacaccttccatgacacctgtgatcggacagccacaaaacgagaccccccagcccatttaccagaacagcaacgtggccaccaagcccactgcagccaagatcttggggaaggtgggagaaagcctcagccggatctgctgtgtccgcccgccggtggagcgtttcacctttgtagatgagaatgccaatctgggcacggtgatgcggtatgaagagattgagctacggatcctgctgctgtgtggtagtgacctgctggagtccttctgcatcccagggctctggaacgaggcagatatggaggtgattgttggtgactttgggattgtggtggtgccccgggatgcagccgacacagaccgaatcatgaatcactcctcaatactccgcaaatacaaaaacaacatcatggtggtgaaggatgacatcaaccatcccatgtctgttgtcagctcaaccaagagcaggctggccctgcagcatggggacggccatgttgtggattacctgtcccagccggtcatcgactacatcctcaaaagccagctgtacatcaatgcctccggctagcagcccctcgtcctccggcaacacaatggcccctccatctttgtcagccccctgtttctctcctgcctctctgtttctccatctcctcgtcttgactgttttccctacttgctgacttaaccccccatagtgtgggggacctgcagagaaccatggcattccctattccacagtcatctttggacagactttcctctagtctccgggttgggggtgggtgagggaatggggtgggagtcgggggaagtgcagtccttggagatgtactggtgtccgtctcccagcatgctctagagaggcggctctggtgcccatcctcccagcacgctctggggaggcggctctggtgcccatcctcccagcatgctctagagaggcggctctggtgcccctcctcccagcatgctctggggaggcggctctggctcttgccttcccagcatgccctttactacaaagggctatttttcttttctttcttttgtttatttatttttctttgttcactccctgtagaacttggatgaaatcagtgtccatggttctttatgtttgtagtcttgatgtgctcctgtggtattacttcccctctgataggacattgtagccagcctcagcactcagtgagttcatcagggccacacccagtagagaaggccaagcaacctccacttcttcagcaccacacacacgcacacacacacacacgcacacatgcgtgtgcacccgcgcacgcacatacacacacacatatagcagtagcagcagcagcagcagcagcagcaacctttgatcaggagtgagattttcgggttctgaaacctgggacacgagtctgtgaatagtcggttttctcagaataatttgaatctgttttcttagtttcaaatgaccatttccctgatgctctgagcttatgatcacacagagccagtccatcctcatttcctggtggcatctgttcatttacctttgtggactgtagctgatggcacagtgcgggttccctaccagccaggggtttccaagggacctttggaggccatgcttagacacattcctgtacctgagaacaaccacataggcaggaccagatccacatcgtgcagtcgtgtcataaaaaaacaaaacaaaacaaaaaaacactaggagtccactcaaccctggaggtctttgctaattggaattatgtattgtctgttgggctgggaaatgtctctttcatattgtaagtccaggatgaactaggagaaagcaatttgttgccctgatgataactgatgattttcaccctctctagctgaggtaactcagacagtgcatgaggtcagtttcttcttgagaagcagtgccttggtcttgtttctgtggttggttctagcccctgcagagcctgggagctgcaggaactgtctgagaaaatctccctaataggggagtgggttcccagaagggagatctgggaggggtcaggagccactaagttgcttcactccttttttctctaattttctaccttcctctctgttcctgcagacagttttgccagctttgcttctggttactagggtctcatgcgtgtcctgcttggagagccataaggaaattgctgtcttgtgctttgtgtctctcatccagtctctggctcttgggattctggtctttgagaaatagtccctgagtattaggatacttttatcaaaatctagtaccagctacggccagaaagggccaggtgggacctgaaagcaaagacaatgttctttaccacacgtttcacatctgcaacatccttcaattgcgggaaaaggaacttgatttaacagaagaacatggtagagcagcatccagaaagtctgttattcctcttggattttttgaaataatcttcagaggaaggaaggaaaatcctattttggggtatcagtgtttgactagggatcatgaaataataaactgaaaaaaactttagagttcagttgatccaacactttcctttaaaagttgagggagcagaggcccatgggattaaatggctggtccaggtcagccagcaggtgtagggcctgacaagaacatattgtttccctgacccctaggccgtcacaccacaccctccatttcctcatgttgctgaccaggtgcccatatgatttctacacttcccaagccttaccctggcatctttcttttaaattatatctgtcccaggtgctctccacacataggatggtaatgccagtcccaggggagggtgtgatagtaaggaaggccactgttaggtttcctttagaaataaagagatctcagcagcttggaagaaatcccagaagcggactccatcaatccaagaaagagttgctttgtggaaggtgaaggaagacccacagagtgctcaggatgatgctattgctggagagcgaaagatggaacagccttgtccaggcagaacagtcataagccaggaaatgaaacaaaggaaaacaggtgcctgaatttcctggggaaacatggcttgtttaaggacttggagttatggatggaatttatgggacccacgtgagcagacctgaggaaggctcgatttcttttgtttcttggtccactctgtcactctgctctggtcaagccccatttggtctacagcccatgagaaggaatgaggctggttctgcactctcagcatgcagtccgaaagcatgtgggagtggggagggaaagtgagatgaattaagacaaagaacaggtgccatagaagtagatttctaggaatgaagtggggcagatcttatctttgtggattacaggcactgtactaaaaacaggtttcctatttaatataaaaagaaagtgaatcttcttttggatagaatcatccattcccatcgccgcaccccctaccccccaaacacacacacacacacacacacacacacacacacacacacacacacacacgccctactcttcatttgctaggggaaggtcacagcacaactaaatccaggacaggacattgtgaccatgacccagccacagtcaataccagaaagatgattcagagtctgaagtggtgccccaggtgccaacaggataacctctaccccccgactttgtctctggggtcctgttccttcctgcaaagcccaatccaagactggcatggctcagaggttgtgagaaaggcatggactggaacaatcatgtccagaggggtctggagctttgtttcctgttcaccagcaaaaaatgtctctcccatttttctgaaagtggctgatgtaagaacaggcagaaggaaaaccctttttgtcaataactctgtccttaaggaatggtcctctgggagggctgtgctgctagtgggtacctcagtcacacacccccaaccccaggcagcctctagagccttcttgctttcattttccttgaatgtacataggaacaagggggaaagtctcttactgaagtgcctgaaacccaaagctagagcttctagagacgccgttcttcctgtctcagcttggccagcctttcaacaatgttctctagtttcaagctccagcttctcagaaagaattaaagaacttgctgttcaaattaagtagaaagtgagactcaataataactgaactacagcaaaaggcagagaattacagggagaaaaaacttgtacttaccagcccaattctactctcctcaaactgacacacacacacacacacacacacacacacacacacacacactcttttaggggactaagagagagaagcatgttattacattttactcatccaaacagtaatgcaaaaataaaacggtagaatatgaaaagctcaggatctctcccaaggctacctactgcaggagggccaacaggtgagatgggaagaatggaaacagggaccgattttgtagctcatacaattaggacaccttaggaatagcattgtagtaatggtgatgaatatgctctgccaaattcatccagtctgcaccatcttatagctgcccagcacactcgactgttcatgtggtctctttgtagtgtgagtttggagtgtcctattagcctgttctggttaggaatgagttaacggctctttccctcaaccttagtctagtcccagggctgaggattcagctggatccacatggtcttgagggttggcatgaggagggggaagcttttttgaatcgctttttgatcacataatctgccattttaagagtaagatttgctttatggaaatcaattcattaataaaaaatgatattcaagttgcaataccatttcacagtgaaatattttgagtacaattttgttgctagaatagtcatgggcaagagttttatgcaaaatgtttcaattatgttaataaataagacaatgctacaagaaaaaaaaaaaaaaaaaaaa

SEQ ID NO: 4086 - DNA, 5467 bp, Homo sapiens
  source 1..5467: mol_type = genomic DNA
ttcaaattctcccaagctggaggtagtggagcaaacaagatcagcaacaatgagggagcagctgcaccactttgtgttactctctgatggccagcacagggctgcaagtagtggctgcaaaaaccagacaaatagatggaaatccaggaactagaggaaattcaggcctgccaggggctctgggaagtgtttgttactctctcagaaagagccagggattatctgcacaaaactggaaggtttattgtgattggcgggattgtctcccctgtccacgactcctatggaaaacagggcctcgtgtcaagccggcaccgtctcatcatgtgtcagctggccgtccagaattctgattggatcagggtggacccttgggagtgctaccaggacacctggcagacgacctgcagcgtgttggaacaccaccgggacctcatgaagagggtgactggctgcatcctctccaatgtcaacacaccttccatgacacctgtgatcggacagccacaaaacgagaccccccagcccatttaccagaacagcaacgtggccaccaagcccactgcagccaagatcttggggaaggtgggagaaagcctcagccggatctgctgtgtccgcccgccggtggagcgtttcacctttgtagatgagaatgccaatctgggcacggtgatgcggtatgaagagattgagctacggatcctgctgctgtgtggtagtgacctgctggagtccttctgcatcccagggctctggaacgaggcagatatggaggtgattgttggtgactttgggattgtggtggtgccccgggatgcagccgacacagaccgaatcatgaatcactcctcaatactccgcaaatacaaaaacaacatcatggtggtgaaggatgacatcaaccatcccatgtctgttgtcagctcaaccaagagcaggctggccctgcagcatggggacggccatgttgtggattacctgtcccagccggtcatcgactacatcctcaaaagccagctgtacatcaatgcctccggctagcagcccctcgtcctccggcaacacaatggcccctccatctttgtcagccccctgtttctctcctgcctctctgtttctccatctcctcgtcttgactgttttccctacttgctgacttaaccccccatagtgtgggggacctgcagagaaccatggcattccctattccacagtcatctttggacagactttcctctagtctccgggttgggggtgggtgagggaatggggtgggagtcgggggaagtgcagtccttggagatgtactggtgtccgtctcccagcatgctctagagaggcggctctggtgcccatcctcccagcacgctctggggaggcggctctggtgcccatcctcccagcatgctctagagaggcggctctggtgcccctcctcccagcatgctctggggaggcggctctggctcttgccttcccagcatgccctttactacaaagggctatttttcttttctttcttttgtttatttatttttctttgttcactccctgtagaacttggatgaaatcagtgtccatggttctttatgtttgtagtcttgatgtgctcctgtggtattacttcccctctgataggacattgtagccagcctcagcactcagtgagttcatcagggccacacccagtagagaaggccaagcaacctccacttcttcagcaccacacacacgcacacacacacacacgcacacatgcgtgtgcacccgcgcacgcacatacacacacacatatagcagtagcagcagcagcagcagcagcagcaacctttgatcaggagtgagattttcgggttctgaaacctgggacacgagtctgtgaatagtcggttttctcagaataatttgaatctgttttcttagtttcaaatgaccatttccctgatgctctgagcttatgatcacacagagccagtccatcctcatttcctggtggcatctgttcatttacctttgtggactgtagctgatggcacagtgcgggttccctaccagccaggggtttccaagggacctttggaggccatgcttagacacattcctgtacctgagaacaaccacataggcaggaccagatccacatcgtgcagtcgtgtcataaaaaaacaaaacaaaacaaaaaaacactaggagtccactcaaccctggaggtctttgctaattggaattatgtattgtctgttgggctgggaaatgtctctttcatattgtaagtccaggatgaactaggagaaagcaatttgttgccctgatgataactgatgattttcaccctctctagctgaggtaactcagacagtgcatgaggtcagtttcttcttgagaagcagtgccttggtcttgtttctgtggttggttctagcccctgcagagcctgggagctgcaggaactgtctgagaaaatctccctaataggggagtgggttcccagaagggagatctgggaggggtcaggagccactaagttgcttcactccttttttctctaattttctaccttcctctctgttcctgcagacagttttgccagctttgcttctggttactagggtctcatgcgtgtcctgcttggagagccataaggaaattgctgtcttgtgctttgtgtctctcatccagtctctggctcttgggattctggtctttgagaaatagtccctgagtattaggatacttttatcaaaatctagtaccagctacggccagaaagggccaggtgggacctgaaagcaaagacaatgttctttaccacacgtttcacatctgcaacatccttcaattgcgggaaaaggaacttgatttaacagaagaacatggtagagcagcatccagaaagtctgttattcctcttggattttttgaaataatcttcagaggaaggaaggaaaatcctattttggggtatcagtgtttgactagggatcatgaaataataaactgaaaaaaactttagagttcagttgatccaacactttcctttaaaagttgagggagcagaggcccatgggattaaatggctggtccaggtcagccagcaggtgtagggcctgacaagaacatattgtttccctgacccctaggccgtcacaccacaccctccatttcctcatgttgctgaccaggtgcccatatgatttctacacttcccaagccttaccctggcatctttcttttaaattatatctgtcccaggtgctctccacacataggatggtaatgccagtcccaggggagggtgtgatagtaaggaaggccactgttaggtttcctttagaaataaagagatctcagcagcttggaagaaatcccagaagcggactccatcaatccaagaaagagttgctttgtggaaggtgaaggaagacccacagagtgctcaggatgatgctattgctggagagcgaaagatggaacagccttgtccaggcagaacagtcataagccaggaaatgaaacaaaggaaaacaggtgcctgaatttcctggggaaacatggcttgtttaaggacttggagttatggatggaatttatgggacccacgtgagcagacctgaggaaggctcgatttcttttgtttcttggtccactctgtcactctgctctggtcaagccccatttggtctacagcccatgagaaggaatgaggctggttctgcactctcagcatgcagtccgaaagcatgtgggagtggggagggaaagtgagatgaattaagacaaagaacaggtgccatagaagtagatttctaggaatgaagtggggcagatcttatctttgtggattacaggcactgtactaaaaacaggtttcctatttaatataaaaagaaagtgaatcttcttttggatagaatcatccattcccatcgccgcaccccctaccccccaaacacacacacacacacacacacacacacacacacacacacacacacacacgccctactcttcatttgctaggggaaggtcacagcacaactaaatccaggacaggacattgtgaccatgacccagccacagtcaataccagaaagatgattcagagtctgaagtggtgccccaggtgccaacaggataacctctaccccccgactttgtctctggggtcctgttccttcctgcaaagcccaatccaagactggcatggctcagaggttgtgagaaaggcatggactggaacaatcatgtccagaggggtctggagctttgtttcctgttcaccagcaaaaaatgtctctcccatttttctgaaagtggctgatgtaagaacaggcagaaggaaaaccctttttgtcaataactctgtccttaaggaatggtcctctgggagggctgtgctgctagtgggtacctcagtcacacacccccaaccccaggcagcctctagagccttcttgctttcattttccttgaatgtacataggaacaagggggaaagtctcttactgaagtgcctgaaacccaaagctagagcttctagagacgccgttcttcctgtctcagcttggccagcctttcaacaatgttctctagtttcaagctccagcttctcagaaagaattaaagaacttgctgttcaaattaagtagaaagtgagactcaataataactgaactacagcaaaaggcagagaattacagggagaaaaaacttgtacttaccagcccaattctactctcctcaaactgacacacacacacacacacacacacacacacacacacacacactcttttaggggactaagagagagaagcatgttattacattttactcatccaaacagtaatgcaaaaataaaacggtagaatatgaaaagctcaggatctctcccaaggctacctactgcaggagggccaacaggtgagatgggaagaatggaaacagggaccgattttgtagctcatacaattaggacaccttaggaatagcattgtagtaatggtgatgaatatgctctgccaaattcatccagtctgcaccatcttatagctgcccagcacactcgactgttcatgtggtctctttgtagtgtgagtttggagtgtcctattagcctgttctggttaggaatgagttaacggctctttccctcaaccttagtctagtcccagggctgaggattcagctggatccacatggtcttgagggttggcatgaggagggggaagcttttttgaatcgctttttgatcacataatctgccattttaagagtaagatttgctttatggaaatcaattcattaataaaaaatgatattcaagttgcaataccatttcacagtgaaatattttgagtacaattttgttgctagaatagtcatgggcaagagttttatgcaaaatgtttcaattatgttaataaataagacaatgctacaagaaaaaaaaaaaaaaaaaaaa

SEQ ID NO: 4087 - DNA, 4411 bp, Homo sapiens
  source 1..4411: mol_type = genomic DNA
acttccggtggagggccgcctctgagcgggcggcgggccgacggcgagcgcgggcggcggcggtgacggaggcgccgctgccagggggcgtgcggcagcgcggcggcggcggcggcggcggcggcggcggaggcggcggcggcggcggcggcggcggcggctgggcctcgagcgcccgcagcccacctctcgggggcgggctcccggcgctagcagggctgaagagaagatggaggagctggtggtggaagtgcggggctccaatggcgctttctacaaggcatttgtaaaggatgttcatgaagattcaataacagttgcatttgaaaacaactggcagcctgataggcagattccatttcatgatgtcagattcccacctcctgtaggttataataaagatataaatgaaagtgatgaagttgaggtgtattccagagcaaatgaaaaagagccttgctgttggtggttagctaaagtgaggatgataaagggtgagttttatgtgatagaatatgcagcatgtgatgcaacttacaatgaaattgtcacaattgaacgtctaagatctgttaatcccaacaaacctgccacaaaagatactttccataagatcaagctggatgtgccagaagacttacggcaaatgtgtgccaaagaggcggcacataaggattttaaaaaggcagttggtgccttttctgtaacttatgatccagaaaattatcagcttgtcattttgtccatcaatgaagtcacctcaaagcgagcacatatgctgattgacatgcactttcggagtctgcgcactaagttgtctctgataatgagaaatgaagaagctagtaagcagctggagagttcaaggcagcttgcctcgagatttcatgaacagtttatcgtaagagaagatctgatgggtctagctattggtactcatggtgctaatattcagcaagctagaaaagtacctggggtcactgctattgatctagatgaagatacctgcacatttcatatttatggagaggatcaggatgcagtgaaaaaagctagaagctttctcgaatttgctgaagatgtaatacaagttccaaggaacttagtaggcaaagtaataggaaaaaatggaaagctgattcaggagattgtggacaagtcaggagttgtgagggtgaggattgaggctgaaaatgagaaaaatgttccacaagaagaggaaattatgccaccaaattcccttccttccaataattcaagggttggacctaatgccccagaagaaaaaaaacatttagatataaaggaaaacagcacccatttttctcaacctaacagtacaaaagtccagagggtgttagtggcttcatcagttgtagcaggggaatcccagaaacctgaactcaaggcttggcagggtatggtaccatttgtttttgtgggaacaaaggacagcatcgctaatgccactgttcttttggattatcacctgaactatttaaaggaagtagaccagttgcgtttggagagattacaaattgatgagcagttgcgacagattggagctagttctagaccaccaccaaatcgtacagataaggaaaaaagctatgtgactgatgatggtcaaggaatgggtcgaggtagtagaccttacagaaatagggggcacggcagacgcggtcctggatatacttcaggaactaattctgaagcatcaaatgcttctgaaacagaatctgaccacagagacgaactcagtgattggtcattagctccaacagaggaagagagggagagcttcctgcgcagaggagacggacggcggcgtggagggggaggaagaggacaaggaggaagaggacgtggaggaggcttcaaaggaaacgacgatcactcccgaacagataatcgtccacgtaatccaagagaggctaaaggaagaacaacagatggatcccttcagatcagagttgactgcaataatgaaaggagtgtccacactaaaacattacagaatacctccagtgaaggtagtcggctgcgcacgggtaaagatcgtaaccagaagaaagagaagccagacagcgtggatggtcagcaaccactcgtgaatggagtaccctaaactgcataattctgaagttatatttcctataccatttccgtaattcttattccatattagaaaactttgttaggccaaagacaaatagtaggcaagatggcacagggcatgaaatgaacacaaattatgctaagaattttttattttttggtattggccataagcaacaattttcagatttgcacaaaaagataccttaaaatttgaaacattgcttttaaaactacttagcacttcagggcagattttagttttattttctaaagtactgagcagtgatattctttgttaatttggaccattttcctgcattgggtgatcattcaccagtacattctcagtttttcttaatatatagcatttatggtaatcatattagacttctgttttcaatctcgtatagaagtcttcatgaaatgctatgtcatttcatgtcctgtgtcagtttatgttttggtccacttttccagtattttagtggaccctgaaatgtgtgtgatgtgacatttgtcattttcattagcaaaaaaagttgtatgatctgtgccttttttatatcttggcaggtaggaatattatatttggatgcagagttcagggaagataagttggaaacactaaatgttaaagatgtagcaaaccctgtcaaacattagtactttatagaagaatgcatgctttccatatttttttccttacataaacatcaggttaggcagtataaagaataggacttgtttttgtttttgttttgttgcactgaagtttgataaatagtgttattgagagagatgtgtaatttttctgtatagacaggagaagaaagaactatcttcatctgagagaggctaaaatgttttcagctaggaacaaatcttcctggtcgaaagttagtaggatatgcctgctctttggcctgatgaccaattttaacttagagctttttttttttaattttgtctgccccaagttttgtgaaatttttcatattttaatttcaagcttattttggagagataggaaggtcatttccatgtatgcataataatcctgcaaagtacaggtactttgtctaagaaacattggaagcaggttaaatgttttgtaaactttgaaatatatggtctaatgtttaagcagaattggaaaagactaagatcggttaacaaataacaacttttttttctttttttcttttgttttttgaagtgttggggtttggttttgttttttgagtcttttttttttaagtgaaatttattgaggaaaaatatgtgaaggaccttcactctaagatgttatatttttcttaaaaagtaactcctagtaggggtaccactgaatctgtacagagccgtaaaaactgaagttctgcctctgatgtattttgtgagtttgtttctttgaattttcattttacagttacttttccttgcatacaaacaagcatataaaatggcaacaaactgcacatgatttcacaaatattaaaaagtcttttaaaaagtattgccaaacattaatgttgatttctagttatttattctgggaatgtatagtatttgaaaacagaaattggtaccttgcacacatcatctgtaagctgtttggttttaaaatactgtagataattaaccaaggtagaatgaccttgtaatgtaactgctcttgggcaatattctctgtacatattagcgacaacagattggattttatgttgacatttgtttggttatagtgcaatatattttgtatgcaagcagtttcaataaagtttgatcttcctctgctaaattgatgttgatgcaatccttacaaatgattgcttttaaaattttaagctaggaaaagaaatctatagaaagtgttctgttacaaaatgtaactgttaccattggaaatttcacgtcataggaagttagcctttatctaccaactttcaagaacttgtttaataaagcgaaaaactcaaccaaatggtacaaaaccacagtgtaccattaaaatatgcactaagtctcttttttacaaaggctgtattcagcaaggcgctaacttgcttaaatgtgaattactaacttctaaaactgtactttgattcacatgttttcaaatggagttggagttcattcatattacaatatttgtgtgctaaacgtgtatgtttttcagttcaaagtcatgatgtttttaaaatcttattaaagtttcaaaaatctgaagattgtttatctagatgtaaatttttattaaaaagttgcacttatgaaaaagcaaaaaatt

SEQ ID NO: 4088 - DNA, 1734 bp, Homo sapiens
  source 1..1734: mol_type = genomic DNA
ccggcgtcggcggcgcgcgcgctccctcctctcggagagagggctgtggtaaaagccgtccggaaaatggccgccgccgccgccgccgcgccgagcggaggaggaggaggaggcgaggaggagagactggaagaaaagtcagaagaccaggacctccagggcctcaaggacaaacccctcaagtttaaaaaggtgaagaaagataagaaagaagagaaagagggcaagcatgagcccgtgcagccatcagcccaccactctgctgagcccgcagaggcaggcaaagcagagacatcagaagggtcaggctccgccccggctgtgccggaagcttctgcctcccccaaacagcggcgctccatcatccgtgaccggggacccatgtatgatgaccccaccctgcctgaaggctggacacggaagcttaagcaaaggaaatctggccgctctgctgggaagtatgatgtgtatttgatcaatccccagggaaaagcctttcgctctaaagtggagttgattgcgtacttcgaaaaggtaggcgacacatccctggaccctaatgattttgacttcacggtaactgggagagggagcccctcccggcgagagcagaaaccacctaagaagcccaaatctcccaaagctccaggaactggcagaggccggggacgccccaaagggagcggcaccacgagacccaaggcggccacgtcagagggtgtgcaggtgaaaagggtcctggagaaaagtcctgggaagctccttgtcaagatgccttttcaaacttcgccagggggcaaggctgaggggggtggggccaccacatccacccaggtcatggtgatcaaacgccccggcaggaagcgaaaagctgaggccgaccctcaggccattcccaagaaacggggccgaaagccggggagtgtggtggcagccgctgccgccgaggccaaaaagaaagccgtgaaggagtcttctatccgatctgtgcaggagaccgtactccccatcaagaagcgcaagacccgggagacggtcagcatcgaggtcaaggaagtggtgaagcccctgctggtgtccaccctcggtgagaagagcgggaaaggactgaagacctgtaagagccctgggcggaaaagcaaggagagcagccccaaggggcgcagcagcagcgcctcctcaccccccaagaaggagcaccaccaccatcaccaccactcagagtccccaaaggcccccgtgccactgctcccacccctgcccccacctccacctgagcccgagagctccgaggaccccaccagcccccctgagccccaggacttgagcagcagcgtctgcaaagaggagaagatgcccagaggaggctcactggagagcgacggctgccccaaggagccagctaagactcagcccgcggttgccaccgccgccacggccgcagaaaagtacaaacaccgaggggagggagagcgcaaagacattgtttcatcctccatgccaaggccaaacagagaggagcctgtggacagccggacgcccgtgaccgagagagttagctgactttacacggagcggattgcaaagcaaaccaacaagaataaaggcagctgttgtctcttctccttatgggtagggctctgacaaagcttcccgattaactgaaataaaaaatatttttttttctttcagtaaaaaaaaaaaaaaaaaaaaaaaaaaaaaaaaaaaaaaaaa

SEQ ID NO: 4089 - DNA, 10241 bp, Homo sapiens
  source 1..10241: mol_type = genomic DNA
ccggcgtcggcggcgcgcgcgctccctcctctcggagagagggctgtggtaaaagccgtccggaaaatggccgccgccgccgccgccgcgccgagcggaggaggaggaggaggcgaggaggagagactgctccataaaaatacagactcaccagttcctgctttgatgtgacatgtgactccccagaatacaccttgcttctgtagaccagctccaacaggattccatggtagctgggatgttagggctcagggaagaaaagtcagaagaccaggacctccagggcctcaaggacaaacccctcaagtttaaaaaggtgaagaaagataagaaagaagagaaagagggcaagcatgagcccgtgcagccatcagcccaccactctgctgagcccgcagaggcaggcaaagcagagacatcagaagggtcaggctccgccccggctgtgccggaagcttctgcctcccccaaacagcggcgctccatcatccgtgaccggggacccatgtatgatgaccccaccctgcctgaaggctggacacggaagcttaagcaaaggaaatctggccgctctgctgggaagtatgatgtgtatttgatcaatccccagggaaaagcctttcgctctaaagtggagttgattgcgtacttcgaaaaggtaggcgacacatccctggaccctaatgattttgacttcacggtaactgggagagggagcccctcccggcgagagcagaaaccacctaagaagcccaaatctcccaaagctccaggaactggcagaggccggggacgccccaaagggagcggcaccacgagacccaaggcggccacgtcagagggtgtgcaggtgaaaagggtcctggagaaaagtcctgggaagctccttgtcaagatgccttttcaaacttcgccagggggcaaggctgaggggggtggggccaccacatccacccaggtcatggtgatcaaacgccccggcaggaagcgaaaagctgaggccgaccctcaggccattcccaagaaacggggccgaaagccggggagtgtggtggcagccgctgccgccgaggccaaaaagaaagccgtgaaggagtcttctatccgatctgtgcaggagaccgtactccccatcaagaagcgcaagacccgggagacggtcagcatcgaggtcaaggaagtggtgaagcccctgctggtgtccaccctcggtgagaagagcgggaaaggactgaagacctgtaagagccctgggcggaaaagcaaggagagcagccccaaggggcgcagcagcagcgcctcctcaccccccaagaaggagcaccaccaccatcaccaccactcagagtccccaaaggcccccgtgccactgctcccacccctgcccccacctccacctgagcccgagagctccgaggaccccaccagcccccctgagccccaggacttgagcagcagcgtctgcaaagaggagaagatgcccagaggaggctcactggagagcgacggctgccccaaggagccagctaagactcagcccgcggttgccaccgccgccacggccgcagaaaagtacaaacaccgaggggagggagagcgcaaagacattgtttcatcctccatgccaaggccaaacagagaggagcctgtggacagccggacgcccgtgaccgagagagttagctgactttacacggagcggattgcaaagcaaaccaacaagaataaaggcagctgttgtctcttctccttatgggtagggctctgacaaagcttcccgattaactgaaataaaaaatatttttttttctttcagtaaacttagagtttcgtggcttcagggtgggagtagttggagcattggggatgtttttcttaccgacaagcacagtcaggttgaagacctaaccagggccagaagtagctttgcacttttctaaactaggctccttcaacaaggcttgctgcagatactactgaccagacaagctgttgaccaggcacctcccctcccgcccaaacctttcccccatgtggtcgttagagacagagcgacagagcagttgagaggacactcccgttttcggtgccatcagtgccccgtctacagctcccccagctccccccacctcccccactcccaaccacgttgggacagggaggtgtgaggcaggagagacagttggattctttagagaagatggatatgaccagtggctatggcctgtgcgatcccacccgtggtggctcaagtctggccccacaccagccccaatccaaaactggcaaggacgcttcacaggacaggaaagtggcacctgtctgctccagctctggcatggctaggaggggggagtcccttgaactactgggtgtagactggcctgaaccacaggagaggatggcccagggtgaggtggcatggtccattctcaagggacgtcctccaacgggtggcgctagaggccatggaggcagtaggacaaggtgcaggcaggctggcctggggtcaggccgggcagagcacagcggggtgagagggattcctaatcactcagagcagtctgtgacttagtggacaggggagggggcaaagggggaggagaagaaaatgttcttccagttactttccaattctcctttagggacagcttagaattatttgcactattgagtcttcatgttcccacttcaaaacaaacagatgctctgagagcaaactggcttgaattggtgacatttagtccctcaagccaccagatgtgacagtgttgagaactacctggatttgtatatatacctgcgcttgttttaaagtgggctcagcacatagggttcccacgaagctccgaaactctaagtgtttgctgcaattttataaggacttcctgattggtttctcttctccccttccatttctgccttttgttcatttcatcctttcacttctttcccttcctccgtcctcctccttcctagttcatcccttctcttccaggcagccgcggtgcccaaccacacttgtcggctccagtccccagaactctgcctgccctttgtcctcctgctgccagtaccagccccaccctgttttgagccctgaggaggccttgggctctgctgagtccgacctggcctgtctgtgaagagcaagagagcagcaaggtcttgctctcctaggtagccccctcttccctggtaagaaaaagcaaaaggcatttcccaccctgaacaacgagccttttcacccttctactctagagaagtggactggaggagctgggcccgatttggtagttgaggaaagcacagaggcctcctgtggcctgccagtcatcgagtggcccaacaggggctccatgccagccgaccttgacctcactcagaagtccagagtctagcgtagtgcagcagggcagtagcggtaccaatgcagaactcccaagacccgagctgggaccagtacctgggtccccagcccttcctctgctcccccttttccctcggagttcttcttgaatggcaatgttttgcttttgctcgatgcagacagggggccagaacaccacacatttcactgtctgtctggtccatagctgtggtgtaggggcttagaggcatgggcttgctgtgggtttttaattgatcagttttcatgtgggatcccatctttttaacctctgttcaggaagtccttatctagctgcatatcttcatcatattggtatatccttttctgtgtttacagagatgtctcttatatctaaatctgtccaactgagaagtaccttatcaaagtagcaaatgagacagcagtcttatgcttccagaaacacccacaggcatgtcccatgtgagctgctgccatgaactgtcaagtgtgtgttgtcttgtgtatttcagttattgtccctggcttccttactatggtgtaatcatgaaggagtgaaacatcatagaaactgtctagcacttccttgccagtctttagtgatcaggaaccatagttgacagttccaatcagtagcttaagaaaaaaccgtgtttgtctcttctggaatggttagaagtgagggagtttgccccgttctgtttgtagagtctcatagttggactttctagcatatatgtgtccatttccttatgctgtaaaagcaagtcctgcaaccaaactcccatcagcccaatccctgatccctgatcccttccacctgctctgctgatgacccccccagcttcacttctgactcttccccaggaagggaaggggggtcagaagagagggtgagtcctccagaactcttcctccaaggacagaaggctcctgcccccatagtggcctcgaactcctggcactaccaaaggacacttatccacgagagcgcagcatccgaccaggttgtcactgagaagatgtttattttggtcagttgggtttttatgtattatacttagtcaaatgtaatgtggcttctggaatcattgtccagagctgcttccccgtcacctgggcgtcatctggtcctggtaagaggagtgcgtggcccaccaggcccccctgtcacccatgacagttcattcagggccgatggggcagtcgtggttgggaacacagcatttcaagcgtcactttatttcattcgggccccacctgcagctccctcaaagaggcagttgcccagcctctttcccttccagtttattccagagctgccagtggggcctgaggctccttagggttttctctctatttccccctttcttcctcattccctcgtctttcccaaaggcatcacgagtcagtcgcctttcagcaggcagccttggcggtttatcgccctggcaggcaggggccctgcagctctcatgctgcccctgccttggggtcaggttgacaggaggttggagggaaagccttaagctgcaggattctcaccagctgtgtccggcccagttttggggtgtgacctcaatttcaattttgtctgtacttgaacattatgaagatgggggcctctttcagtgaatttgtgaacagcagaattgaccgacagctttccagtacccatggggctaggtcattaaggccacatccacagtctcccccacccttgttccagttgttagttactacctcctctcctgacaatactgtatgtcgtcgagctccccccaggtctacccctcccggccctgcctgctggtgggcttgtcatagccagtgggattgccggtcttgacagctcagtgagctggagatacttggtcacagccaggcgctagcacagctcccttctgttgatgctgtattcccatatcaaaagacacaggggacacccagaaacgccacatcccccaatccatcagtgccaaactagccaacggccccagcttctcagctcgctggatggcggaagctgctactcgtgagcgccagtgcgggtgcagacaatcttctgttgggtggcatcattccaggcccgaagcatgaacagtgcacctgggacagggagcagccccaaattgtcacctgcttctctgcccagcttttcattgctgtgacagtgatggcgaaagagggtaataaccagacacaaactgccaagttgggtggagaaaggagtttctttagctgacagaatctctgaattttaaatcacttagtaagcggctcaagcccaggagggagcagagggatacgagcggagtcccctgcgcgggaccatctggaattggtttagcccaagtggagcctgacagccagaactctgtgtcccccgtctaaccacagctccttttccagagcattccagtcaggctctctgggctgactgggccaggggaggttacaggtaccagttctttaagaagatctttgggcatatacatttttagcctgtgtcattgccccaaatggattcctgtttcaagttcacacctgcagattctaggacctgtgtcctagacttcagggagtcagctgtttctagagttcctaccatggagtgggtctggaggacctgcccggtgggggggcagagccctgctccctccgggtcttcctactcttctctctgctctgacgggatttgttgattctctccattttggtgtctttctcttttagatattgtatcaatctttagaaaaggcatagtctacttgttataaatcgttaggatactgcctcccccagggtctaaaattacatattagaggggaaaagctgaacactgaagtcagttctcaacaatttagaaggaaaacctagaaaacatttggcagaaaattacatttcgatgtttttgaatgaatacgagcaagcttttacaacagtgctgatctaaaaatacttagcacttggcctgagatgcctggtgagcattacaggcaaggggaatctggaggtagccgacctgaggacatggcttctgaacctgtcttttgggagtggtatggaaggtggagcgttcaccagtgacctggaaggcccagcaccaccctccttcccactcttctcatcttgacagagcctgccccagcgctgacgtgtcaggaaaacacccagggaactaggaaggcacttctgcctgaggggcagcctgccttgcccactcctgctctgctcgcctcggatcagctgagccttctgagctggcctctcactgcctccccaaggccccctgcctgccctgtcaggaggcagaaggaagcaggtgtgagggcagtgcaaggagggagcacaacccccagctcccgctccgggctccgacttgtgcacaggcagagcccagaccctggaggaaatcctacctttgaattcaagaacatttggggaatttggaaatctctttgcccccaaacccccattctgtcctacctttaatcaggtcctgctcagcagtgagagcagatgaggtgaaaaggccaagaggtttggctcctgcccactgatagcccctctccccgcagtgtttgtgtgtcaagtggcaaagctgttcttcctggtgaccctgattatatccagtaacacatagactgtgcgcataggcctgctttgtctcctctatcctgggcttttgttttgctttttagttttgcttttagtttttctgtcccttttatttaacgcaccgactagacacacaaagcagttgaatttttatatatatatctgtatattgcacaattataaactcattttgcttgtggctccacacacacaaaaaaagacctgttaaaattatacctgttgcttaattacaatatttctgataaccatagcataggacaagggaaaataaaaaaagaaaaaaaagaaaaaaaaacgacaaatctgtctgctggtcacttcttctgtccaagcagattcgtggtcttttcctcgcttctttcaagggctttcctgtgccaggtgaaggaggctccaggcagcacccaggttttgcactcttgtttctcccgtgcttgtgaaagaggtcccaaggttctgggtgcaggagcgctcccttgacctgctgaagtccggaacgtagtcggcacagcctggtcgccttccacctctgggagctggagtccactggggtggcctgactcccccagtccccttcccgtgacctggtcagggtgagcccatgtggagtcagcctcgcaggcctccctgccagtagggtccgagtgtgtttcatccttcccactctgtcgagcctgggggctggagcggagacgggaggcctggcctgtctcggaacctgtgagctgcaccaggtagaacgccagggaccccagaatcatgtgcgtcagtccaaggggtcccctccaggagtagtgaagactccagaaatgtccctttcttctcccccatcctacgagtaattgcatttgcttttgtaattcttaatgagcaatatctgctagagagtttagctgtaacagttctttttgatcatctttttttaataattagaaacaccaaaaaaatccagaaacttgttcttccaaagcagagagcattataatcaccagggccaaaagcttccctccctgctgtcattgcttcttctgaggcctgaatccaaaagaaaaacagccataggccctttcagtggccgggctacccgtgagcccttcggaggaccagggctggggcagcctctgggcccacatccggggccagctccggcgtgtgttcagtgttagcagtgggtcatgatgctctttcccacccagcctgggataggggcagaggaggcgaggaggccgttgccgctgatgtttggccgtgaacaggtgggtgtctgcgtgcgtccacgtgcgtgttttctgactgacatgaaatcgacgcccgagttagcctcacccggtgacctctagccctgcccggatggagcggggcccacccggttcagtgtttctggggagctggacagtggagtgcaaaaggcttgcagaacttgaagcctgctccttcccttgctaccacggcctcctttccgtttgatttgtcactgcttcaatcaataacagccgctccagagtcagtagtcaatgaatatatgaccaaatatcaccaggactgttactcaatgtgtgccgagcccttgcccatgctgggctcccgtgtatctggacactgtaacgtgtgctgtgtttgctccccttccccttccttctttgccctttacttgtctttctggggtttttctgtttgggtttggtttggtttttatttctccttttgtgttccaaacatgaggttctctctactggtcctcttaactgtggtgttgaggcttatatttgtgtaatttttggtgggtgaaaggaattttgctaagtaaatctcttctgtgtttgaactgaagtctgtattgtaactatgtttaaagtaattgttccagagacaaatatttctagacactttttctttacaaacaaaagcattcggagggagggggatggtgactgagatgagaggggagagctgaacagatgacccctgcccagatcagccagaagccacccaaagcagtggagcccaggagtcccactccaagccagcaagccgaatagctgatgtgttgccactttccaagtcactgcaaaaccaggttttgttccgcccagtggattcttgttttgcttcccctccccccgagattattaccaccatcccgtgcttttaaggaaaggcaagattgatgtttccttgaggggagccaggaggggatgtgtgtgtgcagagctgaagagctggggagaatggggctgggcccacccaagcaggaggctgggacgctctgctgtgggcacaggtcaggctaatgttggcagatgcagctcttcctggacaggccaggtggtgggcattctctctccaaggtgtgccccgtgggcattactgtttaagacacttccgtcacatcccaccccatcctccagggctcaacactgtgacatctctattccccaccctccccttcccagggcaataaaatgaccatggagggggcttgcactctcttggctgtcacccgatcgccagcaaaacttagatgtgagaaaaccccttcccattccatggcgaaaacatctccttagaaaagccattaccctcattaggcatggttttgggctcccaaaacacctgacagcccctccctcctctgagaggcggagagtgctgactgtagtgaccattgcatgccgggtgcagcatctggaagagctaggcagggtgtctgccccctcctgagttgaagtcatgctcccctgtgccagcccagaggccgagagctatggacagcattgccagtaacacaggccaccctgtgcagaagggagctggctccagcctggaaacctgtctgaggttgggagaggtgcacttggggcacagggagaggccgggacacacttagctggagatgtctctaaaagccctgtatcgtattcaccttcagtttttgtgttttgggacaattactttagaaaataagtaggtcgttttaaaaacaaaaattattgattgcttttttgtagtgttcagaaaaaaggttctttgtgtatagccaaatgactgaaagcactgatatatttaaaaacaaaaggcaatttattaaggaaatttgtaccatttcagtaaacctgtctgaatgtacctgtatacgtttcaaaaacaccccccccccactgaatccctgtaacctatttattatataaagagtttgccttataaattt

SEQ ID NO: 4090 - DNA, 5144 bp, Homo sapiens
  source 1..5144: mol_type = genomic DNA
ccctgtccctggctcacgtgatcgcgcctagggagaaaacgtctgactccagccaccggccttcaaggcacggctttttattccttcggctggtcggcctctcgcccttcagctacctgtgcgtccctccgtcccgtcccgtcccggggtcaccccggagcctgtccgctatgcggctcctgcctctagccccaggtcggctccggcggggcagcccccgccacctgccctcctgcagcccagcgctgctactgctggtgctgggcggctgcctgggggtcttcggggtggctgcgggaacccggaggcccaacgtggtgctgctcctcacggacgaccaggacgaagtgctcggcggcatgacaccgctaaagaaaaccaaagctctcatcggagagatggggatgactttttccagtgcttatgtgccaagtgctctctgctgccccagcagagccagtatcctgacaggaaagtacccacataatcatcacgttgtgaacaacactctggaggggaactgcagtagtaagtcctggcagaagatccaagaaccaaatactttcccagcaattctcagatcaatgtgtggttatcagaccttttttgcagggaaatatttaaatgagtacggagccccagatgcaggtggactagaacacgttcctctgggttggagttactggtatgccttggaaaagaattctaagtattataattacaccctgtctatcaatgggaaggcacggaagcatggtgaaaactatagtgtggactacctgacagatgttttggctaatgtctccttggactttctggactacaagtccaactttgagcccttcttcatgatgatcgccactccagcgcctcattcgccttggacagctgcacctcagtaccagaaggctttccagaatgtctttgcaccaagaaacaagaacttcaacatccatggaacgaacaagcactggttaattaggcaagccaagactccaatgactaattcttcaatacagtttttagataatgcatttaggaaaaggtggcaaactctcctctcagttgatgaccttgtggagaaactggtcaagaggctggagttcactggggagctcaacaacacttacatcttctatacctcagacaatggctatcacacaggacagttttccttgccaatagacaagagacagctgtatgagtttgatatcaaagttccactgttggttcgaggacctgggatcaaaccaaatcagacaagcaagatgctggttgccaacattgacttgggtcctactattttggacattgctggctacgacctaaataagacacagatggatgggatgtccttattgcccattttgagaggtgccagtaacttgacctggcgatcagatgtcctggtggaataccaaggagaaggccgtaacgtcactgacccaacatgcccttccctgagtcctggcgtatctcaatgcttcccagactgtgtatgtgaagatgcttataacaatacctatgcctgtgtgaggacaatgtcagcattgtggaatttgcagtattgcgagtttgatgaccaggaggtgtttgtagaagtctataatctgactgcagacccagaccagatcactaacattgctaaaaccatagacccagagcttttaggaaagatgaactatcggttaatgatgttacagtcctgttctgggccaacctgtcgcactccaggggtttttgaccccggatacaggtttgacccccgtctcatgttcagcaatcgcggcagtgtcaggactcgaagattttccaaacatcttctgtagcgacctcacacagcctctgcagatggatccctgcacgcctctttctgatgaagtgattgtagtaggtgtctgtagctagtcttcaagaccacacctggaagagtttctgggctggctttaagtcctgtttgaaaaagcaacccagtcagctgacttcctcgtgcaatgtgttaaactgtgaactctgcccatgtgtcaggagtggctgtctctggtctcttcctttagctgacaaggacactcctgaggtctttgttctcactgtattctttttatcctggggccacagttcttgattattcctcttgtggttaaagactgaatttgtaaacccattcagataaatggcagtactttaggacacacacaaacacacagacacaccttttgatatgtaagcttgacctaaagtcaaaggacctgtgtagcatttcagattgagcacttcactatcaaaaatactaacatcacatggcttgaagagtaaccatcagagctgaatcatccaagtaagaacaagtaccattgttgattgataagtagagatacattttttatgatgttcatcacagtgtggtaaggttgcaaattcaaaacatgtcacccaagctctgttcatgtttttgtgaattctaggctggtgctgcactgaaatagagcagtaagcttgtgataaaggccaattccaggtagctcttgaaggtgatagccatctactttccagtggctgccaaccacagggagtgccagttaacactggaaggattaaggcaaggtcccttctcttgagactcccctctgagatctgaaaaatgaagtggcttaggaacatcagcagtgaagaactgccaagagttggtgaaggttgtctcttccgagggccttctgaagacagggctcttgaacagacaagtggaagggctgtaccagggataaaggaaagaagtgcctgtccagcagggagcttgaatttaagttccatgtatgaagtcattggctctatctgcatttttctgtcattctcttcatttgttttaaggtggaaaattttcttacagttgatgcaaagtatcaactactttaccctaccttctccccttttagatgggttcttcctgagttttggagtcttgtatgattatcagtattcccctgtcaaaatcaaatctattcaggtttcttcactgttgagaacacctaaatgtttttatttttgagaagtggggacagagtctcactatgtcacccaggctggagtgcaatggcatgatctcagctcactgcaaccttcgcctcctgggttcaagcgattctcctgcctccgcctcctgagtagctgggattataggcacgcaccaccacgcccagctaattttttgtatttttagtagagacagagtttcaccatgttggccaggctggtcttgaactcctgaccttgtgatccacccacctcggcctcccagagtgctgggattacaggcatgagccaccacgcttggctaagaacacctaaatttttatgtttcttggctcaaaaaccagttccatttctaatgttgtcctcacaagaaggctaattggtggtgagacagcaggggaggaggaagagctgtggtttgtaacttgttcaactcaggcaataagcgattttagctttatttaaagtcttctgtccagctttaagcactttgtaagacatggctgaaagtagcttttctatcagaattgcagatagtcatgttgggctaacagtcaattggatatattcctttacctcacatgaccccagcaactgtggtggtatctagaggtgaaacaggcaagtgaaatggacacctctgctgtgaatgttttagagaaggaaattcaaaaaatgttgtaactgaaagcactgttgaatatgggtatcggctttctttttcactttgactcttaacattatcagtcaacttccacattaatgaaagttgaccatagttatttccaaataaaaagaaaccaactcttaccaggtcttggactgtgatgtcatattattcagttttatgcttgttcctgagcagaactcataagagtgacatagtcagctgctgacggcacctcagccacgccactcttactcagttcagtgggtgtgcttgcgtggtaggatgtggtgcagccctctctacgctcttctatttttggtatatttcctatctaaccttcaaatagcttccaattctttttttcttggactggcttcattctgaatttgtgctaaaataatctttcataaagagacctcagtttatagcgtaacagactacacaatgcactgatgttttcataatgtttaagggacccactgcaagaagcttgctgcctccttttaattgtattcatttagattttgattttccatgttaagaaggtgaggtccatgttggtgcccttcagagtagagaaccatgtaaacattaggaatgaacagaggccttaggaatgaatagagagtttgccttatacaatttcctgttacaaagctctccctctcatgcaaagtagggaacaccttttgagcatctttgaatttgacaaatggtgctgttgcaaacactttttttttgagatgaagtctcgcggttgtcacccgggctggagtgcagtggcgtgatctcggctcactgcaacttccacctcctgggttccagcagttctcctgcctcagcctcccaagtagctgagattacaggcgcctgccaccccacctggctgatttttgtaattttagtagagacggggtttcaccatgttggccaggctgattaactcctgacctcaggtgatccacctttctcggcctcccaaagtgctgggattacgggtgtgagccaccgtgcccggcctgcaaacacattttaattgacaacactagggctgttgtacaaaatagtaatgatagccatggaagttttaccttattctgtgagaagtgttcttaaacttattaagtgtctaaactaaggtttagtgcttttttaaaggaaagttgtcccaggattcatcctaaagaaagcaaaagttaattcaactgatccaccaatggaattagatgggtagagttgggttcttgagttttaccaccacttagttcccactgaattttgtaacttcctgtgtttgcatcctctgttcctattctgcccttgctctgtgtcatctcagtcatttgacttagaaagtgcccttcaaaaggaccctgttcactgctgcacttttcaatgaattaaaatttatttctgttctagtgggaaaaaaaaaaaaaaaaaa

SEQ ID NO: 4091 - DNA, 1822 bp, Homo sapiens
  source 1..1822: mol_type = genomic DNA
gccgtccccgccgccgctgcccgccgccaccggccgcccgcccgcccggctcctccggccgcctccgctgcgctgcgctgcgctgcctgcacccagggctcgggagggggccgcggaggagtcgccccccgcgcccggcccccgcccgccgcgcccgggcccgcgccatggggctctggctgtcgccgccccccgcgccgccgggctagggcgatgcgggcgcccccggcgggcggccccggcgggcaccatgagccctctgctccgccgcctgctgctcgccgcactcctgcagctggcccccgcccaggcccctgtctcccagcctgatgcccctggccaccagaggaaagtggtgtcatggatagatgtgtatactcgcgctacctgccagccccgggaggtggtggtgcccttgactgtggagctcatgggcaccgtggccaaacagctggtgcccagctgcgtgactgtgcagcgctgtggtggctgctgccctgacgatggcctggagtgtgtgcccactgggcagcaccaagtccggatgcagatcctcatgatccggtacccgagcagtcagctgggggagatgtccctggaagaacacagccagtgtgaatgcagacctaaaaaaaaggacagtgctgtgaagccagacagggctgccactccccaccaccgtccccagccccgttctgttccgggctgggactctgcccccggagcaccctccccagctgacatcacccatcccactccagccccaggcccctctgcccacgctgcacccagcaccaccagcgccctgacccccggacctgccgctgccgctgccgacgccgcagcttcctccgttgccaagggcggggcttagagctcaacccagacacctgcaggtgccggaagctgcgaaggtgacacatggcttttcagactcagcagggtgacttgcctcagaggctatatcccagtgggggaacaaagaggagcctggtaaaaaacagccaagcccccaagacctcagcccaggcagaagctgctctaggacctgggcctctcagagggctcttctgccatcccttgtctccctgaggccatcatcaaacaggacagagttggaagaggagactgggaggcagcaagaggggtcacataccagctcaggggagaatggagtactgtctcagtttctaaccactctgtgcaagtaagcatcttacaactggctcttcctcccctcactaagaagacccaaacctctgcataatgggatttgggctttggtacaagaactgtgacccccaaccctgataaaagagatggaaggagctgtccctgcctgtgtcactgtttgtcactgtccaggctggctggtttgggcatgaatgtctgcatcactaaatccagagcttgtcttgctccctcattgtgcagatggaggaaatgaggactaaggccccacagcagatcccaggcagggccagaattatgtattcatcactttcaagttattgccacgcatgggagtcagggatagcccagtcaatacagactgcctgccctcctgctcttcaccagggttcttttctagaaggagacagccttctgtggccagagagcttggggtaggacccagatctactgagtgaccttgcttgtcactacccctgcctctctgagcagcagtttccacatgtgcacatagagggaacagaagattgctgtggttggcgtcctcgggccccagagaagtttgagactatctttacgtaatagaaaagaacacttgttcttcctgccaggcaaaaaaaaaaaaaaaaaa

SEQ ID NO: 4092 - DNA, 3955 bp, Homo sapiens
  source 1..3955: mol_type = genomic DNA
gcgcgcgccggcctgggcaggcgagcgggcgcgctcccgccccctctcccctccccgcgcgcccgagcgcgcctccgcccttgcccgccccctgacgctgcctcagctcctcagtgcacagtgctgcctcgtctgaggggacaggaggatcaccctcttcgtcgcttcggccagtgtgtcgggctgggccctgacaagccacctgaggagaggctcggagccgggcccggaccccggcgattgccgcccgcttctctctagtctcacgaggggtttcccgcctcgcacccccacctctggacttgcctttccttctcttctccgcgtgtggagggagccagcgcttaggccggagcgagcctgggggccgcccgccgtgaagacatcgcggggaccgattcaccatggagggcgccggcggcgcgaacgacaagaaaaagataagttctgaacgtcgaaaagaaaagtctcgagatgcagccagatctcggcgaagtaaagaatctgaagttttttatgagcttgctcatcagttgccacttccacataatgtgagttcgcatcttgataaggcctctgtgatgaggcttaccatcagctatttgcgtgtgaggaaacttctggatgctggtgatttggatattgaagatgacatgaaagcacagatgaattgcttttatttgaaagccttggatggttttgttatggttctcacagatgatggtgacatgatttacatttctgataatgtgaacaaatacatgggattaactcagtttgaactaactggacacagtgtgtttgattttactcatccatgtgaccatgaggaaatgagagaaatgcttacacacagaaatggccttgtgaaaaagggtaaagaacaaaacacacagcgaagcttttttctcagaatgaagtgtaccctaactagccgaggaagaactatgaacataaagtctgcaacatggaaggtattgcactgcacaggccacattcacgtatatgataccaacagtaaccaacctcagtgtgggtataagaaaccacctatgacctgcttggtgctgatttgtgaacccattcctcacccatcaaatattgaaattcctttagatagcaagactttcctcagtcgacacagcctggatatgaaattttcttattgtgatgaaagaattaccgaattgatgggatatgagccagaagaacttttaggccgctcaatttatgaatattatcatgctttggactctgatcatctgaccaaaactcatcatgatatgtttactaaaggacaagtcaccacaggacagtacaggatgcttgccaaaagaggtggatatgtctgggttgaaactcaagcaactgtcatatataacaccaagaattctcaaccacagtgcattgtatgtgtgaattacgttgtgagtggtattattcagcacgacttgattttctcccttcaacaaacagaatgtgtccttaaaccggttgaatcttcagatatgaaaatgactcagctattcaccaaagttgaatcagaagatacaagtagcctctttgacaaacttaagaaggaacctgatgctttaactttgctggccccagccgctggagacacaatcatatctttagattttggcagcaacgacacagaaactgatgaccagcaacttgaggaagtaccattatataatgatgtaatgctcccctcacccaacgaaaaattacagaatataaatttggcaatgtctccattacccaccgctgaaacgccaaagccacttcgaagtagtgctgaccctgcactcaatcaagaagttgcattaaaattagaaccaaatccagagtcactggaactttcttttaccatgccccagattcaggatcagacacctagtccttccgatggaagcactagacaaagttcacctgagcctaatagtcccagtgaatattgtttttatgtggatagtgatatggtcaatgaattcaagttggaattggtagaaaaactttttgctgaagacacagaagcaaagaacccattttctactcaggacacagatttagacttggagatgttagctccctatatcccaatggatgatgacttccagttacgttccttcgatcagttgtcaccattagaaagcagttccgcaagccctgaaagcgcaagtcctcaaagcacagttacagtattccagcagactcaaatacaagaacctactgctaatgccaccactaccactgccaccactgatgaattaaaaacagtgacaaaagaccgtatggaagacattaaaatattgattgcatctccatctcctacccacatacataaagaaactactagtgccacatcatcaccatatagagatactcaaagtcggacagcctcaccaaacagagcaggaaaaggagtcatagaacagacagaaaaatctcatccaagaagccctaacgtgttatctgtcgctttgagtcaaagaactacagttcctgaggaagaactaaatccaaagatactagctttgcagaatgctcagagaaagcgaaaaatggaacatgatggttcactttttcaagcagtaggaattatttagcatgtagactgctggggcaatcaatggatgaaagtggattaccacagctgaccagttatgattgtgaagttaatgctcctatacaaggcagcagaaacctactgcagggtgaagaattactcagagctttggatcaagttaactgagctttttcttaatttcattcctttttttggacactggtggctcattacctaaagcagtctatttatattttctacatctaattttagaagcctggctacaatactgcacaaacttggttagttcaattttgatcccctttctacttaatttacattaatgctcttttttagtatgttctttaatgctggatcacagacagctcattttctcagttttttggtatttaaaccattgcattgcagtagcatcattttaaaaaatgcacctttttatttatttatttttggctagggagtttatccctttttcgaattatttttaagaagatgccaatataatttttgtaagaaggcagtaacctttcatcatgatcataggcagttgaaaaatttttacaccttttttttcacattttacataaataataatgctttgccagcagtacgtggtagccacaattgcacaatatattttcttaaaaaataccagcagttactcatggaatatattctgcgtttataaaactagtttttaagaagaaattttttttggcctatgaaattgttaaacctggaacatgacattgttaatcatataataatgattcttaaatgctgtatggtttattatttaaatgggtaaagccatttacataatatagaaagatatgcatatatctagaaggtatgtggcatttatttggataaaattctcaattcagagaaatcatctgatgtttctatagtcactttgccagctcaaaagaaaacaataccctatgtagttgtggaagtttatgctaatattgtgtaactgatattaaacctaaatgttctgcctaccctgttggtataaagatattttgagcagactgtaaacaagaaaaaaaaaatcatgcattcttagcaaaattgcctagtatgttaatttgctcaaaatacaatgtttgattttatgcactttgtcgctattaacatcctttttttcatgtagatttcaataattgagtaattttagaagcattattttaggaatatatagttgtcacagtaaatatcttgttttttctatgtacattgtacaaatttttcattccttttgctctttgtggttggatctaacactaactgtattgttttgttacatcaaataaacatcttctgtggaccaggcaaaaaaaaaaaaaaaaaaaaaaa

SEQ ID NO: 4093 - DNA, 4082 bp, Homo sapiens
  source 1..4082: mol_type = genomic DNA
gcgcgcgccggcctgggcaggcgagcgggcgcgctcccgccccctctcccctccccgcgcgcccgagcgcgcctccgcccttgcccgccccctgacgctgcctcagctcctcagtgcacagtgctgcctcgtctgaggggacaggaggatcaccctcttcgtcgcttcggccagtgtgtcgggctgggccctgacaagccacctgaggagaggctcggagccgggcccggaccccggcgattgccgcccgcttctctctagtctcacgaggggtttcccgcctcgcacccccacctctggacttgcctttccttctcttctccgcgtgtggagggagccagcgcttaggccggagcgagcctgggggccgcccgccgtgaagacatcgcggggaccgattcaccatggagggcgccggcggcgcgaacgacaagaaaaagataagttctgaacgtcgaaaagaaaagtctcgagatgcagccagatctcggcgaagtaaagaatctgaagttttttatgagcttgctcatcagttgccacttccacataatgtgagttcgcatcttgataaggcctctgtgatgaggcttaccatcagctatttgcgtgtgaggaaacttctggatgctggtgatttggatattgaagatgacatgaaagcacagatgaattgcttttatttgaaagccttggatggttttgttatggttctcacagatgatggtgacatgatttacatttctgataatgtgaacaaatacatgggattaactcagtttgaactaactggacacagtgtgtttgattttactcatccatgtgaccatgaggaaatgagagaaatgcttacacacagaaatggccttgtgaaaaagggtaaagaacaaaacacacagcgaagcttttttctcagaatgaagtgtaccctaactagccgaggaagaactatgaacataaagtctgcaacatggaaggtattgcactgcacaggccacattcacgtatatgataccaacagtaaccaacctcagtgtgggtataagaaaccacctatgacctgcttggtgctgatttgtgaacccattcctcacccatcaaatattgaaattcctttagatagcaagactttcctcagtcgacacagcctggatatgaaattttcttattgtgatgaaagaattaccgaattgatgggatatgagccagaagaacttttaggccgctcaatttatgaatattatcatgctttggactctgatcatctgaccaaaactcatcatgatatgtttactaaaggacaagtcaccacaggacagtacaggatgcttgccaaaagaggtggatatgtctgggttgaaactcaagcaactgtcatatataacaccaagaattctcaaccacagtgcattgtatgtgtgaattacgttgtgagtggtattattcagcacgacttgattttctcccttcaacaaacagaatgtgtccttaaaccggttgaatcttcagatatgaaaatgactcagctattcaccaaagttgaatcagaagatacaagtagcctctttgacaaacttaagaaggaacctgatgctttaactttgctggccccagccgctggagacacaatcatatctttagattttggcagcaacgacacagaaactgatgaccagcaacttgaggaagtaccattatataatgatgtaatgctcccctcacccaacgaaaaattacagaatataaatttggcaatgtctccattacccaccgctgaaacgccaaagccacttcgaagtagtgctgaccctgcactcaatcaagaagttgcattaaaattagaaccaaatccagagtcactggaactttcttttaccatgccccagattcaggatcagacacctagtccttccgatggaagcactagacaaagttcacctgagcctaatagtcccagtgaatattgtttttatgtggatagtgatatggtcaatgaattcaagttggaattggtagaaaaactttttgctgaagacacagaagcaaagaacccattttctactcaggacacagatttagacttggagatgttagctccctatatcccaatggatgatgacttccagttacgttccttcgatcagttgtcaccattagaaagcagttccgcaagccctgaaagcgcaagtcctcaaagcacagttacagtattccagcagactcaaatacaagaacctactgctaatgccaccactaccactgccaccactgatgaattaaaaacagtgacaaaagaccgtatggaagacattaaaatattgattgcatctccatctcctacccacatacataaagaaactactagtgccacatcatcaccatatagagatactcaaagtcggacagcctcaccaaacagagcaggaaaaggagtcatagaacagacagaaaaatctcatccaagaagccctaacgtgttatctgtcgctttgagtcaaagaactacagttcctgaggaagaactaaatccaaagatactagctttgcagaatgctcagagaaagcgaaaaatggaacatgatggttcactttttcaagcagtaggaattggaacattattacagcagccagacgatcatgcagctactacatcactttcttggaaacgtgtaaaaggatgcaaatctagtgaacagaatggaatggagcaaaagacaattattttaataccctctgatttagcatgtagactgctggggcaatcaatggatgaaagtggattaccacagctgaccagttatgattgtgaagttaatgctcctatacaaggcagcagaaacctactgcagggtgaagaattactcagagctttggatcaagttaactgagctttttcttaatttcattcctttttttggacactggtggctcattacctaaagcagtctatttatattttctacatctaattttagaagcctggctacaatactgcacaaacttggttagttcaattttgatcccctttctacttaatttacattaatgctcttttttagtatgttctttaatgctggatcacagacagctcattttctcagttttttggtatttaaaccattgcattgcagtagcatcattttaaaaaatgcacctttttatttatttatttttggctagggagtttatccctttttcgaattatttttaagaagatgccaatataatttttgtaagaaggcagtaacctttcatcatgatcataggcagttgaaaaatttttacaccttttttttcacattttacataaataataatgctttgccagcagtacgtggtagccacaattgcacaatatattttcttaaaaaataccagcagttactcatggaatatattctgcgtttataaaactagtttttaagaagaaattttttttggcctatgaaattgttaaacctggaacatgacattgttaatcatataataatgattcttaaatgctgtatggtttattatttaaatgggtaaagccatttacataatatagaaagatatgcatatatctagaaggtatgtggcatttatttggataaaattctcaattcagagaaatcatctgatgtttctatagtcactttgccagctcaaaagaaaacaataccctatgtagttgtggaagtttatgctaatattgtgtaactgatattaaacctaaatgttctgcctaccctgttggtataaagatattttgagcagactgtaaacaagaaaaaaaaaatcatgcattcttagcaaaattgcctagtatgttaatttgctcaaaatacaatgtttgattttatgcactttgtcgctattaacatcctttttttcatgtagatttcaataattgagtaattttagaagcattattttaggaatatatagttgtcacagtaaatatcttgttttttctatgtacattgtacaaatttttcattccttttgctctttgtggttggatctaacactaactgtattgttttgttacatcaaataaacatcttctgtggaccaggcaaaaaaaaaaaaaaaaaaaaaaa

SEQ ID NO: 4094 - DNA, 1552 bp, Homo sapiens
  source 1..1552: mol_type = genomic DNA
ggtcgctttaagaaaggagtagctgtaatctgaagcctgctggacgctggattagaaggcagcaaaaaaagctctgtgctggctggagccccctcagtgtgcaggcttagagggactaggctgggtgtggagctgcagcgtatccacaggccccaggatgcaggccctggtgctactcctctgcattggagccctcctcgggcacagcagctgccagaaccctgccagccccccggaggagggctccccagaccccgacagcacaggggcgctggtggaggaggaggatcctttcttcaaagtccccgtgaacaagctggcagcggctgtctccaacttcggctatgacctgtaccgggtgcgatccagcacgagccccacgaccaacgtgctcctgtctcctctcagtgtggccacggccctctcggccctctcgctgggagcggagcagcgaacagaatccatcattcaccgggctctctactatgacttgatcagcagcccagacatccatggtacctataaggagctccttgacacggtcactgccccccagaagaacctcaagagtgcctcccggatcgtctttgagaagaagctgcgcataaaatccagctttgtggcacctctggaaaagtcatatgggaccaggcccagagtcctgacgggcaaccctcgcttggacctgcaagagatcaacaactgggtgcaggcgcagatgaaagggaagctcgccaggtccacaaaggaaattcccgatgagatcagcattctccttctcggtgtggcgcacttcaaggggcagtgggtaacaaagtttgactccagaaagacttccctcgaggatttctacttggatgaagagaggaccgtgagggtccccatgatgtcggaccctaaggctgttttacgctatggcttggattcagatctcagctgcaagattgcccagctgcccttgaccggaagcatgagtatcatcttcttcctgcccctgaaagtgacccagaatttgaccttgatagaggagagcctcacctccgagttcattcatgacatagaccgagaactgaagaccgtgcaggcggtcctcactgtccccaagctgaagctgagttatgaaggcgaagtcaccaagtccctgcaggagatgaagctgcaatccttgtttgattcaccagactttagcaagatcacaggcaaacccatcaagctgactcaggtggaacaccgggctggctttgagtggaacgaggatggggcgggaaccacccccagcccagggctgcagcctgcccacctcaccttcccgctggactatcaccttaaccagcctttcatcttcgtactgagggacacagacacaggggcccttctcttcattggcaagattctggaccccaggggcccctaatatcccagtttaatattccaataccctagaagaaaacccgagggacagcagattccacaggacacgaaggctgcccctgtaaggtttcaatgcatacaataaaagagctttatccctaaaaaaaaaaaaaaaaaaaaa

SEQ ID NO: 4095 - DNA, 3519 bp, Homo sapiens
  source 1..3519: mol_type = genomic DNA
tcgcggaggcttggggcagccgggtagctcggaggtcgtggcgctgggggctagcaccagcgctctgtcgggaggcgcagcggttaggtggaccggtcagcggactcaccggccagggcgctcggtgctggaatttgatattcattgatccgggttttatccctcttcttttttcttaaacatttttttttaaaactgtattgtttctcgttttaatttatttttgcttgccattccccacttgaatcgggccgacggcttggggagattgctctacttccccaaatcactgtggattttggaaaccagcagaaagaggaaagaggtagcaagagctccagagagaagtcgaggaagagagagacggggtcagagagagcgcgcgggcgtgcgagcagcgaaagcgacaggggcaaagtgagtgacctgcttttgggggtgaccgccggagcgcggcgtgagccctcccccttgggatcccgcagctgaccagtcgcgctgacggacagacagacagacaccgcccccagccccagctaccacctcctccccggccggcggcggacagtggacgcggcggcgagccgcgggcaggggccggagcccgcgcccggaggcggggtggagggggtcggggctcgcggcgtcgcactgaaacttttcgtccaacttctgggctgttctcgcttcggaggagccgtggtccgcgcgggggaagccgagccgagcggagccgcgagaagtgctagctcgggccgggaggagccgcagccggaggagggggaggaggaagaagagaaggaagaggagagggggccgcagtggcgactcggcgctcggaagccgggctcatggacgggtgaggcggcggtgtgcgcagacagtgctccagccgcgcgcgctccccaggccctggcccgggcctcgggccggggaggaagagtagctcgccgaggcgccgaggagagcgggccgccccacagcccgagccggagagggagcgcgagccgcgccggccccggtcgggcctccgaaaccatgaactttctgctgtcttgggtgcattggagccttgccttgctgctctacctccaccatgccaagtggtcccaggctgcacccatggcagaaggaggagggcagaatcatcacgaagtggtgaagttcatggatgtctatcagcgcagctactgccatccaatcgagaccctggtggacatcttccaggagtaccctgatgagatcgagtacatcttcaagccatcctgtgtgcccctgatgcgatgcgggggctgctgcaatgacgagggcctggagtgtgtgcccactgaggagtccaacatcaccatgcagattatgcggatcaaacctcaccaaggccagcacataggagagatgagcttcctacagcacaacaaatgtgaatgcagaccaaagaaagatagagcaagacaagaaaatccctgtgggccttgctcagagcggagaaagcatttgtttgtacaagatccgcagacgtgtaaatgttcctgcaaaaacacagactcgcgttgcaagatgtgacaagccgaggcggtgagccgggcaggaggaaggagcctccctcagggtttcgggaaccagatctctcaccaggaaagactgatacagaacgatcgatacagaaaccacgctgccgccaccacaccatcaccatcgacagaacagtccttaatccagaaacctgaaatgaaggaagaggagactctgcgcagagcactttgggtccggagggcgagactccggcggaagcattcccgggcgggtgacccagcacggtccctcttggaattggattcgccattttatttttcttgctgctaaatcaccgagcccggaagattagagagttttatttctgggattcctgtagacacacccacccacatacatacatttatatatatatatattatatatatataaaaataaatatctctattttatatatataaaatatatatattctttttttaaattaacagtgctaatgttattggtgtcttcactggatgtatttgactgctgtggacttgagttgggaggggaatgttcccactcagatcctgacagggaagaggaggagatgagagactctggcatgatcttttttttgtcccacttggtggggccagggtcctctcccctgcccaggaatgtgcaaggccagggcatgggggcaaatatgacccagttttgggaacaccgacaaacccagccctggcgctgagcctctctaccccaggtcagacggacagaaagacagatcacaggtacagggatgaggacaccggctctgaccaggagtttggggagcttcaggacattgctgtgctttggggattccctccacatgctgcacgcgcatctcgcccccaggggcactgcctggaagattcaggagcctgggcggccttcgcttactctcacctgcttctgagttgcccaggagaccactggcagatgtcccggcgaagagaagagacacattgttggaagaagcagcccatgacagctccccttcctgggactcgccctcatcctcttcctgctccccttcctggggtgcagcctaaaaggacctatgtcctcacaccattgaaaccactagttctgtccccccaggagacctggttgtgtgtgtgtgagtggttgaccttcctccatcccctggtccttcccttcccttcccgaggcacagagagacagggcaggatccacgtgcccattgtggaggcagagaaaagagaaagtgttttatatacggtacttatttaatatccctttttaattagaaattaaaacagttaatttaattaaagagtagggttttttttcagtattcttggttaatatttaatttcaactatttatgagatgtatcttttgctctctcttgctctcttatttgtaccggtttttgtatataaaattcatgtttccaatctctctctccctgatcggtgacagtcactagcttatcttgaacagatatttaattttgctaacactcagctctgccctccccgatcccctggctccccagcacacattcctttgaaataaggtttcaatatacatctacatactatatatatatttggcaacttgtatttgtgtgtatatatatatatatatgtttatgtatatatgtgattctgataaaatagacattgctattctgttttttatatgtaaaaacaaaacaagaaaaaatagagaattctacatactaaatctctctccttttttaattttaatatttgttatcatttatttattggtgctactgtttatccgtaataattgtggggaaaagatattaacatcacgtctttgtctctagtgcagtttttcgagatattccgtagtacatatttatttttaaacaacgacaaagaaatacagatatatcttaaaaaaaaaaaagcattttgtattaaagaatttaattctgatctcaaaaaaaaaaaaaaaaaa

SEQ ID NO: 4096 - DNA, 3677 bp, Homo sapiens
  source 1..3677: mol_type = genomic DNA
tcgcggaggcttggggcagccgggtagctcggaggtcgtggcgctgggggctagcaccagcgctctgtcgggaggcgcagcggttaggtggaccggtcagcggactcaccggccagggcgctcggtgctggaatttgatattcattgatccgggttttatccctcttcttttttcttaaacatttttttttaaaactgtattgtttctcgttttaatttatttttgcttgccattccccacttgaatcgggccgacggcttggggagattgctctacttccccaaatcactgtggattttggaaaccagcagaaagaggaaagaggtagcaagagctccagagagaagtcgaggaagagagagacggggtcagagagagcgcgcgggcgtgcgagcagcgaaagcgacaggggcaaagtgagtgacctgcttttgggggtgaccgccggagcgcggcgtgagccctcccccttgggatcccgcagctgaccagtcgcgctgacggacagacagacagacaccgcccccagccccagctaccacctcctccccggccggcggcggacagtggacgcggcggcgagccgcgggcaggggccggagcccgcgcccggaggcggggtggagggggtcggggctcgcggcgtcgcactgaaacttttcgtccaacttctgggctgttctcgcttcggaggagccgtggtccgcgcgggggaagccgagccgagcggagccgcgagaagtgctagctcgggccgggaggagccgcagccggaggagggggaggaggaagaagagaaggaagaggagagggggccgcagtggcgactcggcgctcggaagccgggctcatggacgggtgaggcggcggtgtgcgcagacagtgctccagccgcgcgcgctccccaggccctggcccgggcctcgggccggggaggaagagtagctcgccgaggcgccgaggagagcgggccgccccacagcccgagccggagagggagcgcgagccgcgccggccccggtcgggcctccgaaaccatgaactttctgctgtcttgggtgcattggagccttgccttgctgctctacctccaccatgccaagtggtcccaggctgcacccatggcagaaggaggagggcagaatcatcacgaagtggtgaagttcatggatgtctatcagcgcagctactgccatccaatcgagaccctggtggacatcttccaggagtaccctgatgagatcgagtacatcttcaagccatcctgtgtgcccctgatgcgatgcgggggctgctgcaatgacgagggcctggagtgtgtgcccactgaggagtccaacatcaccatgcagattatgcggatcaaacctcaccaaggccagcacataggagagatgagcttcctacagcacaacaaatgtgaatgcagaccaaagaaagatagagcaagacaagaaaaaaaatcagttcgaggaaagggaaaggggcaaaaacgaaagcgcaagaaatcccggtataagtcctggagcgtgtacgttggtgcccgctgctgtctaatgccctggagcctccctggcccccatccctgtgggccttgctcagagcggagaaagcatttgtttgtacaagatccgcagacgtgtaaatgttcctgcaaaaacacagactcgcgttgcaaggcgaggcagcttgagttaaacgaacgtacttgcagatgtgacaagccgaggcggtgagccgggcaggaggaaggagcctccctcagggtttcgggaaccagatctctcaccaggaaagactgatacagaacgatcgatacagaaaccacgctgccgccaccacaccatcaccatcgacagaacagtccttaatccagaaacctgaaatgaaggaagaggagactctgcgcagagcactttgggtccggagggcgagactccggcggaagcattcccgggcgggtgacccagcacggtccctcttggaattggattcgccattttatttttcttgctgctaaatcaccgagcccggaagattagagagttttatttctgggattcctgtagacacacccacccacatacatacatttatatatatatatattatatatatataaaaataaatatctctattttatatatataaaatatatatattctttttttaaattaacagtgctaatgttattggtgtcttcactggatgtatttgactgctgtggacttgagttgggaggggaatgttcccactcagatcctgacagggaagaggaggagatgagagactctggcatgatcttttttttgtcccacttggtggggccagggtcctctcccctgcccaggaatgtgcaaggccagggcatgggggcaaatatgacccagttttgggaacaccgacaaacccagccctggcgctgagcctctctaccccaggtcagacggacagaaagacagatcacaggtacagggatgaggacaccggctctgaccaggagtttggggagcttcaggacattgctgtgctttggggattccctccacatgctgcacgcgcatctcgcccccaggggcactgcctggaagattcaggagcctgggcggccttcgcttactctcacctgcttctgagttgcccaggagaccactggcagatgtcccggcgaagagaagagacacattgttggaagaagcagcccatgacagctccccttcctgggactcgccctcatcctcttcctgctccccttcctggggtgcagcctaaaaggacctatgtcctcacaccattgaaaccactagttctgtccccccaggagacctggttgtgtgtgtgtgagtggttgaccttcctccatcccctggtccttcccttcccttcccgaggcacagagagacagggcaggatccacgtgcccattgtggaggcagagaaaagagaaagtgttttatatacggtacttatttaatatccctttttaattagaaattaaaacagttaatttaattaaagagtagggttttttttcagtattcttggttaatatttaatttcaactatttatgagatgtatcttttgctctctcttgctctcttatttgtaccggtttttgtatataaaattcatgtttccaatctctctctccctgatcggtgacagtcactagcttatcttgaacagatatttaattttgctaacactcagctctgccctccccgatcccctggctccccagcacacattcctttgaaataaggtttcaatatacatctacatactatatatatatttggcaacttgtatttgtgtgtatatatatatatatatgtttatgtatatatgtgattctgataaaatagacattgctattctgttttttatatgtaaaaacaaaacaagaaaaaatagagaattctacatactaaatctctctccttttttaattttaatatttgttatcatttatttattggtgctactgtttatccgtaataattgtggggaaaagatattaacatcacgtctttgtctctagtgcagtttttcgagatattccgtagtacatatttatttttaaacaacgacaaagaaatacagatatatcttaaaaaaaaaaaagcattttgtattaaagaatttaattctgatctcaaaaaaaaaaaaaaaaaa

SEQ ID NO: 4097 - DNA, 3608 bp, Homo sapiens
  source 1..3608: mol_type = genomic DNA
tcgcggaggcttggggcagccgggtagctcggaggtcgtggcgctgggggctagcaccagcgctctgtcgggaggcgcagcggttaggtggaccggtcagcggactcaccggccagggcgctcggtgctggaatttgatattcattgatccgggttttatccctcttcttttttcttaaacatttttttttaaaactgtattgtttctcgttttaatttatttttgcttgccattccccacttgaatcgggccgacggcttggggagattgctctacttccccaaatcactgtggattttggaaaccagcagaaagaggaaagaggtagcaagagctccagagagaagtcgaggaagagagagacggggtcagagagagcgcgcgggcgtgcgagcagcgaaagcgacaggggcaaagtgagtgacctgcttttgggggtgaccgccggagcgcggcgtgagccctcccccttgggatcccgcagctgaccagtcgcgctgacggacagacagacagacaccgcccccagccccagctaccacctcctccccggccggcggcggacagtggacgcggcggcgagccgcgggcaggggccggagcccgcgcccggaggcggggtggagggggtcggggctcgcggcgtcgcactgaaacttttcgtccaacttctgggctgttctcgcttcggaggagccgtggtccgcgcgggggaagccgagccgagcggagccgcgagaagtgctagctcgggccgggaggagccgcagccggaggagggggaggaggaagaagagaaggaagaggagagggggccgcagtggcgactcggcgctcggaagccgggctcatggacgggtgaggcggcggtgtgcgcagacagtgctccagccgcgcgcgctccccaggccctggcccgggcctcgggccggggaggaagagtagctcgccgaggcgccgaggagagcgggccgccccacagcccgagccggagagggagcgcgagccgcgccggccccggtcgggcctccgaaaccatgaactttctgctgtcttgggtgcattggagccttgccttgctgctctacctccaccatgccaagtggtcccaggctgcacccatggcagaaggaggagggcagaatcatcacgaagtggtgaagttcatggatgtctatcagcgcagctactgccatccaatcgagaccctggtggacatcttccaggagtaccctgatgagatcgagtacatcttcaagccatcctgtgtgcccctgatgcgatgcgggggctgctgcaatgacgagggcctggagtgtgtgcccactgaggagtccaacatcaccatgcagattatgcggatcaaacctcaccaaggccagcacataggagagatgagcttcctacagcacaacaaatgtgaatgcagaccaaagaaagatagagcaagacaagaaaaaaaatcagttcgaggaaagggaaaggggcaaaaacgaaagcgcaagaaatcccgtccctgtgggccttgctcagagcggagaaagcatttgtttgtacaagatccgcagacgtgtaaatgttcctgcaaaaacacagactcgcgttgcaaggcgaggcagcttgagttaaacgaacgtacttgcagatgtgacaagccgaggcggtgagccgggcaggaggaaggagcctccctcagggtttcgggaaccagatctctcaccaggaaagactgatacagaacgatcgatacagaaaccacgctgccgccaccacaccatcaccatcgacagaacagtccttaatccagaaacctgaaatgaaggaagaggagactctgcgcagagcactttgggtccggagggcgagactccggcggaagcattcccgggcgggtgacccagcacggtccctcttggaattggattcgccattttatttttcttgctgctaaatcaccgagcccggaagattagagagttttatttctgggattcctgtagacacacccacccacatacatacatttatatatatatatattatatatatataaaaataaatatctctattttatatatataaaatatatatattctttttttaaattaacagtgctaatgttattggtgtcttcactggatgtatttgactgctgtggacttgagttgggaggggaatgttcccactcagatcctgacagggaagaggaggagatgagagactctggcatgatcttttttttgtcccacttggtggggccagggtcctctcccctgcccaggaatgtgcaaggccagggcatgggggcaaatatgacccagttttgggaacaccgacaaacccagccctggcgctgagcctctctaccccaggtcagacggacagaaagacagatcacaggtacagggatgaggacaccggctctgaccaggagtttggggagcttcaggacattgctgtgctttggggattccctccacatgctgcacgcgcatctcgcccccaggggcactgcctggaagattcaggagcctgggcggccttcgcttactctcacctgcttctgagttgcccaggagaccactggcagatgtcccggcgaagagaagagacacattgttggaagaagcagcccatgacagctccccttcctgggactcgccctcatcctcttcctgctccccttcctggggtgcagcctaaaaggacctatgtcctcacaccattgaaaccactagttctgtccccccaggagacctggttgtgtgtgtgtgagtggttgaccttcctccatcccctggtccttcccttcccttcccgaggcacagagagacagggcaggatccacgtgcccattgtggaggcagagaaaagagaaagtgttttatatacggtacttatttaatatccctttttaattagaaattaaaacagttaatttaattaaagagtagggttttttttcagtattcttggttaatatttaatttcaactatttatgagatgtatcttttgctctctcttgctctcttatttgtaccggtttttgtatataaaattcatgtttccaatctctctctccctgatcggtgacagtcactagcttatcttgaacagatatttaattttgctaacactcagctctgccctccccgatcccctggctccccagcacacattcctttgaaataaggtttcaatatacatctacatactatatatatatttggcaacttgtatttgtgtgtatatatatatatatatgtttatgtatatatgtgattctgataaaatagacattgctattctgttttttatatgtaaaaacaaaacaagaaaaaatagagaattctacatactaaatctctctccttttttaattttaatatttgttatcatttatttattggtgctactgtttatccgtaataattgtggggaaaagatattaacatcacgtctttgtctctagtgcagtttttcgagatattccgtagtacatatttatttttaaacaacgacaaagaaatacagatatatcttaaaaaaaaaaaagcattttgtattaaagaatttaattctgatctcaaaaaaaaaaaaaaaaaa

SEQ ID NO: 4098 - DNA, 3554 bp, Homo sapiens
  source 1..3554: mol_type = genomic DNA
tcgcggaggcttggggcagccgggtagctcggaggtcgtggcgctgggggctagcaccagcgctctgtcgggaggcgcagcggttaggtggaccggtcagcggactcaccggccagggcgctcggtgctggaatttgatattcattgatccgggttttatccctcttcttttttcttaaacatttttttttaaaactgtattgtttctcgttttaatttatttttgcttgccattccccacttgaatcgggccgacggcttggggagattgctctacttccccaaatcactgtggattttggaaaccagcagaaagaggaaagaggtagcaagagctccagagagaagtcgaggaagagagagacggggtcagagagagcgcgcgggcgtgcgagcagcgaaagcgacaggggcaaagtgagtgacctgcttttgggggtgaccgccggagcgcggcgtgagccctcccccttgggatcccgcagctgaccagtcgcgctgacggacagacagacagacaccgcccccagccccagctaccacctcctccccggccggcggcggacagtggacgcggcggcgagccgcgggcaggggccggagcccgcgcccggaggcggggtggagggggtcggggctcgcggcgtcgcactgaaacttttcgtccaacttctgggctgttctcgcttcggaggagccgtggtccgcgcgggggaagccgagccgagcggagccgcgagaagtgctagctcgggccgggaggagccgcagccggaggagggggaggaggaagaagagaaggaagaggagagggggccgcagtggcgactcggcgctcggaagccgggctcatggacgggtgaggcggcggtgtgcgcagacagtgctccagccgcgcgcgctccccaggccctggcccgggcctcgggccggggaggaagagtagctcgccgaggcgccgaggagagcgggccgccccacagcccgagccggagagggagcgcgagccgcgccggccccggtcgggcctccgaaaccatgaactttctgctgtcttgggtgcattggagccttgccttgctgctctacctccaccatgccaagtggtcccaggctgcacccatggcagaaggaggagggcagaatcatcacgaagtggtgaagttcatggatgtctatcagcgcagctactgccatccaatcgagaccctggtggacatcttccaggagtaccctgatgagatcgagtacatcttcaagccatcctgtgtgcccctgatgcgatgcgggggctgctgcaatgacgagggcctggagtgtgtgcccactgaggagtccaacatcaccatgcagattatgcggatcaaacctcaccaaggccagcacataggagagatgagcttcctacagcacaacaaatgtgaatgcagaccaaagaaagatagagcaagacaagaaaatccctgtgggccttgctcagagcggagaaagcatttgtttgtacaagatccgcagacgtgtaaatgttcctgcaaaaacacagactcgcgttgcaaggcgaggcagcttgagttaaacgaacgtacttgcagatgtgacaagccgaggcggtgagccgggcaggaggaaggagcctccctcagggtttcgggaaccagatctctcaccaggaaagactgatacagaacgatcgatacagaaaccacgctgccgccaccacaccatcaccatcgacagaacagtccttaatccagaaacctgaaatgaaggaagaggagactctgcgcagagcactttgggtccggagggcgagactccggcggaagcattcccgggcgggtgacccagcacggtccctcttggaattggattcgccattttatttttcttgctgctaaatcaccgagcccggaagattagagagttttatttctgggattcctgtagacacacccacccacatacatacatttatatatatatatattatatatatataaaaataaatatctctattttatatatataaaatatatatattctttttttaaattaacagtgctaatgttattggtgtcttcactggatgtatttgactgctgtggacttgagttgggaggggaatgttcccactcagatcctgacagggaagaggaggagatgagagactctggcatgatcttttttttgtcccacttggtggggccagggtcctctcccctgcccaggaatgtgcaaggccagggcatgggggcaaatatgacccagttttgggaacaccgacaaacccagccctggcgctgagcctctctaccccaggtcagacggacagaaagacagatcacaggtacagggatgaggacaccggctctgaccaggagtttggggagcttcaggacattgctgtgctttggggattccctccacatgctgcacgcgcatctcgcccccaggggcactgcctggaagattcaggagcctgggcggccttcgcttactctcacctgcttctgagttgcccaggagaccactggcagatgtcccggcgaagagaagagacacattgttggaagaagcagcccatgacagctccccttcctgggactcgccctcatcctcttcctgctccccttcctggggtgcagcctaaaaggacctatgtcctcacaccattgaaaccactagttctgtccccccaggagacctggttgtgtgtgtgtgagtggttgaccttcctccatcccctggtccttcccttcccttcccgaggcacagagagacagggcaggatccacgtgcccattgtggaggcagagaaaagagaaagtgttttatatacggtacttatttaatatccctttttaattagaaattaaaacagttaatttaattaaagagtagggttttttttcagtattcttggttaatatttaatttcaactatttatgagatgtatcttttgctctctcttgctctcttatttgtaccggtttttgtatataaaattcatgtttccaatctctctctccctgatcggtgacagtcactagcttatcttgaacagatatttaattttgctaacactcagctctgccctccccgatcccctggctccccagcacacattcctttgaaataaggtttcaatatacatctacatactatatatatatttggcaacttgtatttgtgtgtatatatatatatatatgtttatgtatatatgtgattctgataaaatagacattgctattctgttttttatatgtaaaaacaaaacaagaaaaaatagagaattctacatactaaatctctctccttttttaattttaatatttgttatcatttatttattggtgctactgtttatccgtaataattgtggggaaaagatattaacatcacgtctttgtctctagtgcagtttttcgagatattccgtagtacatatttatttttaaacaacgacaaagaaatacagatatatcttaaaaaaaaaaaagcattttgtattaaagaatttaattctgatctcaaaaaaaaaaaaaaaaaa

SEQ ID NO: 4099 - DNA, 3626 bp, Homo sapiens
  source 1..3626: mol_type = genomic DNA
tcgcggaggcttggggcagccgggtagctcggaggtcgtggcgctgggggctagcaccagcgctctgtcgggaggcgcagcggttaggtggaccggtcagcggactcaccggccagggcgctcggtgctggaatttgatattcattgatccgggttttatccctcttcttttttcttaaacatttttttttaaaactgtattgtttctcgttttaatttatttttgcttgccattccccacttgaatcgggccgacggcttggggagattgctctacttccccaaatcactgtggattttggaaaccagcagaaagaggaaagaggtagcaagagctccagagagaagtcgaggaagagagagacggggtcagagagagcgcgcgggcgtgcgagcagcgaaagcgacaggggcaaagtgagtgacctgcttttgggggtgaccgccggagcgcggcgtgagccctcccccttgggatcccgcagctgaccagtcgcgctgacggacagacagacagacaccgcccccagccccagctaccacctcctccccggccggcggcggacagtggacgcggcggcgagccgcgggcaggggccggagcccgcgcccggaggcggggtggagggggtcggggctcgcggcgtcgcactgaaacttttcgtccaacttctgggctgttctcgcttcggaggagccgtggtccgcgcgggggaagccgagccgagcggagccgcgagaagtgctagctcgggccgggaggagccgcagccggaggagggggaggaggaagaagagaaggaagaggagagggggccgcagtggcgactcggcgctcggaagccgggctcatggacgggtgaggcggcggtgtgcgcagacagtgctccagccgcgcgcgctccccaggccctggcccgggcctcgggccggggaggaagagtagctcgccgaggcgccgaggagagcgggccgccccacagcccgagccggagagggagcgcgagccgcgccggccccggtcgggcctccgaaaccatgaactttctgctgtcttgggtgcattggagccttgccttgctgctctacctccaccatgccaagtggtcccaggctgcacccatggcagaaggaggagggcagaatcatcacgaagtggtgaagttcatggatgtctatcagcgcagctactgccatccaatcgagaccctggtggacatcttccaggagtaccctgatgagatcgagtacatcttcaagccatcctgtgtgcccctgatgcgatgcgggggctgctgcaatgacgagggcctggagtgtgtgcccactgaggagtccaacatcaccatgcagattatgcggatcaaacctcaccaaggccagcacataggagagatgagcttcctacagcacaacaaatgtgaatgcagaccaaagaaagatagagcaagacaagaaaaaaaatcagttcgaggaaagggaaaggggcaaaaacgaaagcgcaagaaatcccggtataagtcctggagcgttccctgtgggccttgctcagagcggagaaagcatttgtttgtacaagatccgcagacgtgtaaatgttcctgcaaaaacacagactcgcgttgcaaggcgaggcagcttgagttaaacgaacgtacttgcagatgtgacaagccgaggcggtgagccgggcaggaggaaggagcctccctcagggtttcgggaaccagatctctcaccaggaaagactgatacagaacgatcgatacagaaaccacgctgccgccaccacaccatcaccatcgacagaacagtccttaatccagaaacctgaaatgaaggaagaggagactctgcgcagagcactttgggtccggagggcgagactccggcggaagcattcccgggcgggtgacccagcacggtccctcttggaattggattcgccattttatttttcttgctgctaaatcaccgagcccggaagattagagagttttatttctgggattcctgtagacacacccacccacatacatacatttatatatatatatattatatatatataaaaataaatatctctattttatatatataaaatatatatattctttttttaaattaacagtgctaatgttattggtgtcttcactggatgtatttgactgctgtggacttgagttgggaggggaatgttcccactcagatcctgacagggaagaggaggagatgagagactctggcatgatcttttttttgtcccacttggtggggccagggtcctctcccctgcccaggaatgtgcaaggccagggcatgggggcaaatatgacccagttttgggaacaccgacaaacccagccctggcgctgagcctctctaccccaggtcagacggacagaaagacagatcacaggtacagggatgaggacaccggctctgaccaggagtttggggagcttcaggacattgctgtgctttggggattccctccacatgctgcacgcgcatctcgcccccaggggcactgcctggaagattcaggagcctgggcggccttcgcttactctcacctgcttctgagttgcccaggagaccactggcagatgtcccggcgaagagaagagacacattgttggaagaagcagcccatgacagctccccttcctgggactcgccctcatcctcttcctgctccccttcctggggtgcagcctaaaaggacctatgtcctcacaccattgaaaccactagttctgtccccccaggagacctggttgtgtgtgtgtgagtggttgaccttcctccatcccctggtccttcccttcccttcccgaggcacagagagacagggcaggatccacgtgcccattgtggaggcagagaaaagagaaagtgttttatatacggtacttatttaatatccctttttaattagaaattaaaacagttaatttaattaaagagtagggttttttttcagtattcttggttaatatttaatttcaactatttatgagatgtatcttttgctctctcttgctctcttatttgtaccggtttttgtatataaaattcatgtttccaatctctctctccctgatcggtgacagtcactagcttatcttgaacagatatttaattttgctaacactcagctctgccctccccgatcccctggctccccagcacacattcctttgaaataaggtttcaatatacatctacatactatatatatatttggcaacttgtatttgtgtgtatatatatatatatatgtttatgtatatatgtgattctgataaaatagacattgctattctgttttttatatgtaaaaacaaaacaagaaaaaatagagaattctacatactaaatctctctccttttttaattttaatatttgttatcatttatttattggtgctactgtttatccgtaataattgtggggaaaagatattaacatcacgtctttgtctctagtgcagtttttcgagatattccgtagtacatatttatttttaaacaacgacaaagaaatacagatatatcttaaaaaaaaaaaagcattttgtattaaagaatttaattctgatctcaaaaaaaaaaaaaaaaaa

SEQ ID NO: 4100 - DNA, 3519 bp, Homo sapiens; identical to SEQ ID NO: 4095
  source 1..3519: mol_type = genomic DNA

SEQ ID NO: 4101 - DNA, 3554 bp, Homo sapiens; identical to SEQ ID NO: 4098
  source 1..3554: mol_type = genomic DNA

SEQ ID NO: 4102 - DNA, 3488 bp, Homo sapiens
  source 1..3488: mol_type = genomic DNA
tcgcggaggcttggggcagccgggtagctcggaggtcgtggcgctgggggctagcaccagcgctctgtcgggaggcgcagcggttaggtggaccggtcagcggactcaccggccagggcgctcggtgctggaatttgatattcattgatccgggttttatccctcttcttttttcttaaacatttttttttaaaactgtattgtttctcgttttaatttatttttgcttgccattccccacttgaatcgggccgacggcttggggagattgctctacttccccaaatcactgtggattttggaaaccagcagaaagaggaaagaggtagcaagagctccagagagaagtcgaggaagagagagacggggtcagagagagcgcgcgggcgtgcgagcagcgaaagcgacaggggcaaagtgagtgacctgcttttgggggtgaccgccggagcgcggcgtgagccctcccccttgggatcccgcagctgaccagtcgcgctgacggacagacagacagacaccgcccccagccccagctaccacctcctccccggccggcggcggacagtggacgcggcggcgagccgcgggcaggggccggagcccgcgcccggaggcggggtggagggggtcggggctcgcggcgtcgcactgaaacttttcgtccaacttctgggctgttctcgcttcggaggagccgtggtccgcgcgggggaagccgagccgagcggagccgcgagaagtgctagctcgggccgggaggagccgcagccggaggagggggaggaggaagaagagaaggaagaggagagggggccgcagtggcgactcggcgctcggaagccgggctcatggacgggtgaggcggcggtgtgcgcagacagtgctccagccgcgcgcgctccccaggccctggcccgggcctcgggccggggaggaagagtagctcgccgaggcgccgaggagagcgggccgccccacagcccgagccggagagggagcgcgagccgcgccggccccggtcgggcctccgaaaccatgaactttctgctgtcttgggtgcattggagccttgccttgctgctctacctccaccatgccaagtggtcccaggctgcacccatggcagaaggaggagggcagaatcatcacgaagtggtgaagttcatggatgtctatcagcgcagctactgccatccaatcgagaccctggtggacatcttccaggagtaccctgatgagatcgagtacatcttcaagccatcctgtgtgcccctgatgcgatgcgggggctgctgcaatgacgagggcctggagtgtgtgcccactgaggagtccaacatcaccatgcagattatgcggatcaaacctcaccaaggccagcacataggagagatgagcttcctacagcacaacaaatgtgaatgcagaccaaagaaagatagagcaagacaagaaaatccctgtgggccttgctcagagcggagaaagcatttgtttgtacaagatccgcagacgtgtaaatgttcctgcaaaaacacagactcgcgttgcaaggcgaggcagcttgagttaaacgaacgtacttgcagatctctcaccaggaaagactgatacagaacgatcgatacagaaaccacgctgccgccaccacaccatcaccatcgacagaacagtccttaatccagaaacctgaaatgaaggaagaggagactctgcgcagagcactttgggtccggagggcgagactccggcggaagcattcccgggcgggtgacccagcacggtccctcttggaattggattcgccattttatttttcttgctgctaaatcaccgagcccggaagattagagagttttatttctgggattcctgtagacacacccacccacatacatacatttatatatatatatattatatatatataaaaataaatatctctattttatatatataaaatatatatattctttttttaaattaacagtgctaatgttattggtgtcttcactggatgtatttgactgctgtggacttgagttgggaggggaatgttcccactcagatcctgacagggaagaggaggagatgagagactctggcatgatcttttttttgtcccacttggtggggccagggtcctctcccctgcccaggaatgtgcaaggccagggcatgggggcaaatatgacccagttttgggaacaccgacaaacccagccctggcgctgagcctctctaccccaggtcagacggacagaaagacagatcacaggtacagggatgaggacaccggctctgaccaggagtttggggagcttcaggacattgctgtgctttggggattccctccacatgctgcacgcgcatctcgcccccaggggcactgcctggaagattcaggagcctgggcggccttcgcttactctcacctgcttctgagttgcccaggagaccactggcagatgtcccggcgaagagaagagacacattgttggaagaagcagcccatgacagctccccttcctgggactcgccctcatcctcttcctgctccccttcctggggtgcagcctaaaaggacctatgtcctcacaccattgaaaccactagttctgtccccccaggagacctggttgtgtgtgtgtgagtggttgaccttcctccatcccctggtccttcccttcccttcccgaggcacagagagacagggcaggatccacgtgcccattgtggaggcagagaaaagagaaagtgttttatatacggtacttatttaatatccctttttaattagaaattaaaacagttaatttaattaaagagtagggttttttttcagtattcttggttaatatttaatttcaactatttatgagatgtatcttttgctctctcttgctctcttatttgtaccggtttttgtatataaaattcatgtttccaatctctctctccctgatcggtgacagtcactagcttatcttgaacagatatttaattttgctaacactcagctctgccctccccgatcccctggctccccagcacacattcctttgaaataaggtttcaatatacatctacatactatatatatatttggcaacttgtatttgtgtgtatatatatatatatatgtttatgtatatatgtgattctgataaaatagacattgctattctgttttttatatgtaaaaacaaaacaagaaaaaatagagaattctacatactaaatctctctccttttttaattttaatatttgttatcatttatttattggtgctactgtttatccgtaataattgtggggaaaagatattaacatcacgtctttgtctctagtgcagtttttcgagatattccgtagtacatatttatttttaaacaacgacaaagaaatacagatatatcttaaaaaaaaaaaagcattttgtattaaagaatttaattctgatctcaaaaaaaaaaaaaaaaaa

SEQ ID NO: 4103 - DNA, 3422 bp, Homo sapiens
  source 1..3422: mol_type = genomic DNA
tcgcggaggcttggggcagccgggtagctcggaggtcgtggcgctgggggctagcaccagcgctctgtcgggaggcgcagcggttaggtggaccggtcagcggactcaccggccagggcgctcggtgctggaatttgatattcattgatccgggttttatccctcttcttttttcttaaacatttttttttaaaactgtattgtttctcgttttaatttatttttgcttgccattccccacttgaatcgggccgacggcttggggagattgctctacttccccaaatcactgtggattttggaaaccagcagaaagaggaaagaggtagcaagagctccagagagaagtcgaggaagagagagacggggtcagagagagcgcgcgggcgtgcgagcagcgaaagcgacaggggcaaagtgagtgacctgcttttgggggtgaccgccggagcgcggcgtgagccctcccccttgggatcccgcagctgaccagtcgcgctgacggacagacagacagacaccgcccccagccccagctaccacctcctccccggccggcggcggacagtggacgcggcggcgagccgcgggcaggggccggagcccgcgcccggaggcggggtggagggggtcggggctcgcggcgtcgcactgaaacttttcgtccaacttctgggctgttctcgcttcggaggagccgtggtccgcgcgggggaagccgagccgagcggagccgcgagaagtgctagctcgggccgggaggagccgcagccggaggagggggaggaggaagaagagaaggaagaggagagggggccgcagtggcgactcggcgctcggaagccgggctcatggacgggtgaggcggcggtgtgcgcagacagtgctccagccgcgcgcgctccccaggccctggcccgggcctcgggccggggaggaagagtagctcgccgaggcgccgaggagagcgggccgccccacagcccgagccggagagggagcgcgagccgcgccggccccggtcgggcctccgaaaccatgaactttctgctgtcttgggtgcattggagccttgccttgctgctctacctccaccatgccaagtggtcccaggctgcacccatggcagaaggaggagggcagaatcatcacgaagtggtgaagttcatggatgtctatcagcgcagctactgccatccaatcgagaccctggtggacatcttccaggagtaccctgatgagatcgagtacatcttcaagccatcctgtgtgcccctgatgcgatgcgggggctgctgcaatgacgagggcctggagtgtgtgcccactgaggagtccaacatcaccatgcagattatgcggatcaaacctcaccaaggccagcacataggagagatgagcttcctacagcacaacaaatgtgaatgcagaccaaagaaagatagagcaagacaagaaaaatgtgacaagccgaggcggtgagccgggcaggaggaaggagcctccctcagggtttcgggaaccagatctctcaccaggaaagactgatacagaacgatcgatacagaaaccacgctgccgccaccacaccatcaccatcgacagaacagtccttaatccagaaacctgaaatgaaggaagaggagactctgcgcagagcactttgggtccggagggcgagactccggcggaagcattcccgggcgggtgacccagcacggtccctcttggaattggattcgccattttatttttcttgctgctaaatcaccgagcccggaagattagagagttttatttctgggattcctgtagacacacccacccacatacatacatttatatatatatatattatatatatataaaaataaatatctctattttatatatataaaatatatatattctttttttaaattaacagtgctaatgttattggtgtcttcactggatgtatttgactgctgtggacttgagttgggaggggaatgttcccactcagatcctgacagggaagaggaggagatgagagactctggcatgatcttttttttgtcccacttggtggggccagggtcctctcccctgcccaggaatgtgcaaggccagggcatgggggcaaatatgacccagttttgggaacaccgacaaacccagccctggcgctgagcctctctaccccaggtcagacggacagaaagacagatcacaggtacagggatgaggacaccggctctgaccaggagtttggggagcttcaggacattgctgtgctttggggattccctccacatgctgcacgcgcatctcgcccccaggggcactgcctggaagattcaggagcctgggcggccttcgcttactctcacctgcttctgagttgcccaggagaccactggcagatgtcccggcgaagagaagagacacattgttggaagaagcagcccatgacagctccccttcctgggactcgccctcatcctcttcctgctccccttcctggggtgcagcctaaaaggacctatgtcctcacaccattgaaaccactagttctgtccccccaggagacctggttgtgtgtgtgtgagtggttgaccttcctccatcccctggtccttcccttcccttcccgaggcacagagagacagggcaggatccacgtgcccattgtggaggcagagaaaagagaaagtgttttatatacggtacttatttaatatccctttttaattagaaattaaaacagttaatttaattaaagagtagggttttttttcagtattcttggttaatatttaatttcaactatttatgagatgtatcttttgctctctcttgctctcttatttgtaccggtttttgtatataaaattcatgtttccaatctctctctccctgatcggtgacagtcactagcttatcttgaacagatatttaattttgctaacactcagctctgccctccccgatcccctggctccccagcacacattcctttgaaataaggtttcaatatacatctacatactatatatatatttggcaacttgtatttgtgtgtatatatatatatatatgtttatgtatatatgtgattctgataaaatagacattgctattctgttttttatatgtaaaaacaaaacaagaaaaaatagagaattctacatactaaatctctctccttttttaattttaatatttgttatcatttatttattggtgctactgtttatccgtaataattgtggggaaaagatattaacatcacgtctttgtctctagtgcagtttttcgagatattccgtagtacatatttatttttaaacaacgacaaagaaatacagatatatcttaaaaaaaaaaaagcattttgtattaaagaatttaattctgatctcaaaaaaaaaaaaaaaaaa

SEQ ID NO: 4104 - DNA, 3626 bp, Homo sapiens; identical to SEQ ID NO: 4099
  source 1..3626: mol_type = genomic DNA

SEQ ID NO: 4105 - DNA, 3392 bp, Homo sapiens
  source 1..3392: mol_type = genomic DNA
tcgcggaggcttggggcagccgggtagctcggaggtcgtggcgctgggggctagcaccagcgctctgtcgggaggcgcagcggttaggtggaccggtcagcggactcaccggccagggcgctcggtgctggaatttgatattcattgatccgggttttatccctcttcttttttcttaaacatttttttttaaaactgtattgtttctcgttttaatttatttttgcttgccattccccacttgaatcgggccgacggcttggggagattgctctacttccccaaatcactgtggattttggaaaccagcagaaagaggaaagaggtagcaagagctccagagagaagtcgaggaagagagagacggggtcagagagagcgcgcgggcgtgcgagcagcgaaagcgacaggggcaaagtgagtgacctgcttttgggggtgaccgccggagcgcggcgtgagccctcccccttgggatcccgcagctgaccagtcgcgctgacggacagacagacagacaccgcccccagccccagctaccacctcctccccggccggcggcggacagtggacgcggcggcgagccgcgggcaggggccggagcccgcgcccggaggcggggtggagggggtcggggctcgcggcgtcgcactgaaacttttcgtccaacttctgggctgttctcgcttcggaggagccgtggtccgcgcgggggaagccgagccgagcggagccgcgagaagtgctagctcgggccgggaggagccgcagccggaggagggggaggaggaagaagagaaggaagaggagagggggccgcagtggcgactcggcgctcggaagccgggctcatggacgggtgaggcggcggtgtgcgcagacagtgctccagccgcgcgcgctccccaggccctggcccgggcctcgggccggggaggaagagtagctcgccgaggcgccgaggagagcgggccgccccacagcccgagccggagagggagcgcgagccgcgccggccccggtcgggcctccgaaaccatgaactttctgctgtcttgggtgcattggagccttgccttgctgctctacctccaccatgccaagtggtcccaggctgcacccatggcagaaggaggagggcagaatcatcacgaagtggtgaagttcatggatgtctatcagcgcagctactgccatccaatcgagaccctggtggacatcttccaggagtaccctgatgagatcgagtacatcttcaagccatcctgtgtgcccctgatgcgatgcgggggctgctgcaatgacgagggcctggagtgtgtgcccactgaggagtccaacatcaccatgcagattatgcggatcaaacctcaccaaggccagcacataggagagatgagcttcctacagcacaacaaatgtgaatgcagatgtgacaagccgaggcggtgagccgggcaggaggaaggagcctccctcagggtttcgggaaccagatctctcaccaggaaagactgatacagaacgatcgatacagaaaccacgctgccgccaccacaccatcaccatcgacagaacagtccttaatccagaaacctgaaatgaaggaagaggagactctgcgcagagcactttgggtccggagggcgagactccggcggaagcattcccgggcgggtgacccagcacggtccctcttggaattggattcgccattttatttttcttgctgctaaatcaccgagcccggaagattagagagttttatttctgggattcctgtagacacacccacccacatacatacatttatatatatatatattatatatatataaaaataaatatctctattttatatatataaaatatatatattctttttttaaattaacagtgctaatgttattggtgtcttcactggatgtatttgactgctgtggacttgagttgggaggggaatgttcccactcagatcctgacagggaagaggaggagatgagagactctggcatgatcttttttttgtcccacttggtggggccagggtcctctcccctgcccaggaatgtgcaaggccagggcatgggggcaaatatgacccagttttgggaacaccgacaaacccagccctggcgctgagcctctctaccccaggtcagacggacagaaagacagatcacaggtacagggatgaggacaccggctctgaccaggagtttggggagcttcaggacattgctgtgctttggggattccctccacatgctgcacgcgcatctcgcccccaggggcactgcctggaagattcaggagcctgggcggccttcgcttactctcacctgcttctgagttgcccaggagaccactggcagatgtcccggcgaagagaagagacacattgttggaagaagcagcccatgacagctccccttcctgggactcgccctcatcctcttcctgctccccttcctggggtgcagcctaaaaggacctatgtcctcacaccattgaaaccactagttctgtccccccaggagacctggttgtgtgtgtgtgagtggttgaccttcctccatcccctggtccttcccttcccttcccgaggcacagagagacagggcaggatccacgtgcccattgtggaggcagagaaaagagaaagtgttttatatacggtacttatttaatatccctttttaattagaaattaaaacagttaatttaattaaagagtagggttttttttcagtattcttggttaatatttaatttcaactatttatgagatgtatcttttgctctctcttgctctcttatttgtaccggtttttgtatataaaattcatgtttccaatctctctctccctgatcggtgacagtcactagcttatcttgaacagatatttaattttgctaacactcagctctgccctccccgatcccctggctccccagcacacattcctttgaaataaggtttcaatatacatctacatactatatatatatttggcaacttgtatttgtgtgtatatatatatatatatgtttatgtatatatgtgattctgataaaatagacattgctattctgttttttatatgtaaaaacaaaacaagaaaaaatagagaattctacatactaaatctctctccttttttaattttaatatttgttatcatttatttattggtgctactgtttatccgtaataattgtggggaaaagatattaacatcacgtctttgtctctagtgcagtttttcgagatattccgtagtacatatttatttttaaacaacgacaaagaaatacagatatatcttaaaaaaaaaaaagcattttgtattaaagaatttaattctgatctcaaaaaaaaaaaaaaaaaa

SEQ ID NO: 4106 - DNA, 3608 bp, Homo sapiens; identical to SEQ ID NO: 4097
  source 1..3608: mol_type = genomic DNA

SEQ ID NO: 4107 - DNA, 3392 bp, Homo sapiens; identical to SEQ ID NO: 4105
  source 1..3392: mol_type = genomic DNA

SEQ ID NO: 4108 - DNA, 3677 bp, Homo sapiens; identical to SEQ ID NO: 4096
  source 1..3677: mol_type = genomic DNA

SEQ ID NO: 4109 - DNA, 3488 bp, Homo sapiens; identical to SEQ ID NO: 4102
  source 1..3488: mol_type = genomic DNA

SEQ ID NO: 4110 - DNA, 3422 bp, Homo sapiens; identical to SEQ ID NO: 4103
  source 1..3422: mol_type = genomic DNA

SEQ ID NO: 4111 - DNA, 3897 bp, Homo sapiens
  source 1..3897: mol_type = genomic DNA
cagtttgcaaaagccagaggtgcaagaagcagcgactgcagcagcagcagcagcagcggcggtggcagcagcagcagcagcggcggcagcagcagcagcagcggaggcaccggtggcagcagcagcatcaccagcaacaacaacaaaaaaaaatcctcatcaaatcctcacctaagctttcagtgtatccagatccacatcttcactcaagccaggagagggaaagaggaaaggggggcaggaaaaaaaaaaaacccaacaacttagcggaaacttctcagagaatgctccaaaactcagcagtgcttctggtgctggtgatcagtgcttctgcaacccatgaggcggagcagaatgactctgtgagccccaggaaatcccgagtggcggctcaaaactcagctgaagtggttcgttgcctcaacagtgctctacaggtcggctgcggggcttttgcatgcctggaaaactccacctgtgacacagatgggatgtatgacatctgtaaatccttcttgtacagcgctgctaaatttgacactcagggaaaagcattcgtcaaagagagcttaaaatgcatcgccaacggggtcacctccaaggtcttcctcgccattcggaggtgctccactttccaaaggatgattgctgaggtgcaggaagagtgctacagcaagctgaatgtgtgcagcatcgccaagcggaaccctgaagccatcactgaggtcgtccagctgcccaatcacttctccaacagatactataacagacttgtccgaagcctgctggaatgtgatgaagacacagtcagcacaatcagagacagcctgatggagaaaattgggcctaacatggccagcctcttccacatcctgcagacagaccactgtgcccaaacacacccacgagctgacttcaacaggagacgcaccaatgagccgcagaagctgaaagtcctcctcaggaacctccgaggtgaggaggactctccctcccacatcaaacgcacatcccatgagagtgcataaccagggagaggttattcacaacctcaccaaactagtatcattttaggggtgttgacacaccagttttgagtgtactgtgcctggtttgatttttttaaagtagttcctattttctatcccccttaaagaaaattgcatgaaactaggcttctgtaatcaatatcccaacattctgcaatggcagcattcccaccaacaaaatccatgtgaccattctgcctctcctcaggagaaagtaccctcttttaccaacttcctctgccatgtttttcccctgctcccctgagaccacccccaaacacaaaacattcatgtaactctccagccattgtaatttgaagatgtggatccctttagaacggttgccccagtagagttagctgataaggaaactttatttaaatgcatgtcttaaatgctcataaagatgttaaatggaattcgtgttatgaatctgtgctggccatggacgaatatgaatgtcacatttgaattcttgatctctaatgagctagtgtcttatggtcttgatcctccaatgtctaattttctttccgacacatttaccaaattgcttgagcctggctgtccaaccagactttgagcctgcatcttcttgcatctaatgaaaaacaaaaagctaacatctttacgtactgtaactgctcagagctttaaaagtatctttaacaattgtcttaaaaccagagaatcttaaggtctaactgtggaatataaatagctgaaaactaatgtactgtacataaattccagaggactctgcttaaacaaagcagtatataataactttattgcatatagatttagttttgtaacttagctttatttttcttttcctgggaatggaataactatctcacttccagatatccacataaatgctccttgtggccttttttataactaagggggtagaagtagttttaattcaacatcaaaacttaagatgggcctgtatgagacaggaaaaaccaacaggtttatctgaaggaccccaggtaagatgttaatctcccagcccacctcaacccagaggctactcttgacttagacctatactgaaagatctctgtcacatccaactggaaattccaggaaccaaaaagagcatccctatgggcttggaccacttacagtgtgataaggcctactatacattaggaagtggcagttctttactcgtcccctttcatcggtgcctggtactctggcaaatgatgatggggtgggagactttccattaaatcaatcaggaatgagtcaatcagcctttaggtctttagtccgggggacttggggctgagagagtataaataaccctgggctgtccagccttaatagacttctcttacattttcgtcctgtagcacgctgcctgccaaagtagtcctggcagctggaccatctctgtaggatcgtaaaaaaatagaaaaaaagaaaaaaaaaagaaagaaagagggaaaaagagctggtggtttgatcatttctgccatgatgtttacaagatggcgaccaccaaagtcaaacgactaacctatctatgaacaacagtagtttctcagggtcactgtccttgaacccaacagtcccttatgagcgtcactgcccaccaaaggtcaatgtcaagagaggaagagagggaggaggggtaggactgcaggggccactccaaactcgcttaggtagaaactattggtgcttgactctcactaggctaaactcaagatttgaccaaatcgagtgatagggatcctggtgggaggagagagggcacatctccagaaaaatgaaaagcaatacaactttaccataaagcctttaaaaccagtaacgtgctgctcaaggaccaagagcaattgcagcagacccagcagcagcagcagcagcacaaacattgctgcctttgtccccacacagcctctaagcgtgctgacatcagattgttaagggcatttttatactcagaactgtcccatccccaggtccccaaacttatggacactgccttagcctcttggaaatcaggtagaccatattctaagttagactcttcccctccctcccacacttcccacccccaggcaaggctgacttctctgaatcagaaaagctattaaagtttgtgtgttgtgtccattttgcaaacccaactaagccaggaccccaatgcgacaagtagttcatgagtattcctagcaaatttctctctttcttcagttcagtagatttccttttttcttttctttttttttttttttttttttggctgtgacctcttcaaaccgtggtacccccccttttctccccacgatgatatctatatatgtatctacaatacatatatctacacatacagaaagaagcagttctcacaatgttgctagttttttgcttctctttcccccaccctactccctccaattcccccttaaacttccaaagcttcgtcttgtgtttgctgcagagtgattcgggggctgacctagaccagtttgcatgattcttctcttgtgatttggttgcactttagacatttttgtgccattatatttgcattatgtatttataatttaaatgatatttaggtttttggctgagtactggaataaacagtgagcatatctggtatatgtcattatttattgttaaattacatttttaagctccatgtgcatataaaggttatgaaacatatcatggtaatgacagatgcaagttattttatttgcttatttttataattaaagatgccatagcataatatgaagcctttggtgaattccttctaagataaaaataataataaagtgttacgttttattggtttcaaaaaaaaaaaaaaaaaaaa

SEQ ID NO: 4112 - DNA, 1885 bp, Homo sapiens
  source 1..1885: mol_type = genomic DNA
ttcccaggccaccatagcggctggcggagggagcgcgcgccttgctggcctggagggggcgggggccgtggcggctttaaagcgcccagcccaggcgtcgcggggtggggcggctctggcggctgcggggcgcagggcgcagcggccaagcggggtccccggaagcacagctggggtgtctccacctacgactggccgcgcgccttttctctcccgcgccagggaaggagcggctgcggcccccgccgggcggaggcacggggggcgtacgaggggcggaggggaccgcgtcgcggaggagatggcgcggcacgtgcggtgacggcacccgagccctgagggtcccagccccgcgctccgcgtccccgggacagcatggagcgcccggagcccgagctgatccggcagagctggcgggcagtgagccgcagcccgctggagcacggcaccgtcctgtttgccaggctgtttgccctggagcctgacctgctgcccctcttccagtacaactgccgccagttctccagcccagaggactgtctctcctcgcctgagttcctggaccacatcaggaaggtgatgctcgtgattgatgctgcagtgaccaatgtggaagacctgtcctcactggaggagtaccttgccagcctgggcaggaagcaccgggcagtgggtgtgaagctcagctccttctcgacagtgggtgagtctctgctctacatgctggagaagtgtctgggccctgccttcacaccagccacacgggctgcctggagccaactctacggggccgtagtgcaggccatgagtcgaggctgggatggcgagtaagaggcgaccccgcccggcagcccccatccatctgtgtctgtctgttggcctgtatctgttgtagcccaggctccccaagcttccctgcatcttggtccttgtccccttggccacactggagaggtgatggggcagggctgggtctcagtatcctagagtccagctgcagaaggagtggcttttcctccaggaaggggcttctgggtgtcccctcatccccagtagcctctttcttgcgtttctttttaccttttttggcactccctctgaccccgcgatgagtgttttggtggcagaggtgggatgagctggaaaggtatggaggtgggagaggatggggctcttctgtctgtcctgcttcttcaggtgagtgcaggccaaggcgggggtgagatggctgagcttccagcgccttctgtcctgcctgcccagtcccttcactgctttcctgccccaagatggcttgcttttcacaaataaagagaaagagcagctttagccttcttggtggaatcccaggcagtgggagcagaatcagaactgccagggaagggaagggggacctgggtctcaatgggtctcatttgagtctcgcgggctgtgcagatgccctgacagagtcggtttcctttggcggcattccctttccctcattcagcacttctgctgggaactccctgactattccgctgctgcaggaacccagctagctggccaggtggggaggggctggggaccggccaggaaggaggggtgacttcatcccagagagacccgagttcccccagcccttcatcaccaacccgctcctgcaggagtgagtcttacctcccctggccctcctttctggctcagcctgcagcgactgtgaggccacagctcctcagattcactgcccgctgtgtgccagtactcaggcagctggagagaagagaaggcagcagcagaggcccccgccctcaccccagccatctgcacttgtaccatttgctctgtgctgactgtggtcctataaattcatgagaaataaactggttctgtgtgcaaaaaaaaa

SEQ ID NO: 4113 - DNA, 2859 bp, Homo sapiens
  source 1..2859: mol_type = genomic DNA
aaatcagggaggcgcagctcctacaccaacgcctttccggggctccgggtgtgtttgttccaactgtttaaactgtttcaaagcgtccgaactccagcgaccttcgcaaacaactctttatctcgcgggcgagagcgctgcccttatttgcgggggagggcaaactgaacgccggcaccggggagctaacggagacctcctctaggtcccccgcctgctgggaccccagctggcagtcccttcccgcccccggaccgcgagcttcttgcgtcagccccggcgcgggtgggggattttcggaagctcagcccgcgcggccggcgggggaaggaagggcccggactcttgccccgcccttgtggggcgggaggcggagcggggcaggggcccgccggcgtgtagccgattaccgagtgccggggagcccggaggagccgccgacgcagccgccaccgccgccgccgccgccaccagagccgccctgtccgcgccgcgcctcggcagccggaacagggccgccgtcggggagccccaacacacggtccacagctcatcatgatggacttggagctgccgccgccgggactcccgtcccagcaggacatggatttgattgacatactttggaggcaagatatagatcttggagtaagtcgagaagtatttgacttcagtcagcgacggaaagagtatgagctggaaaaacagaaaaaacttgaaaaggaaagacaagaacaactccaaaaggagcaagagaaagcctttttcgctcagttacaactagatgaagagacaggtgaatttctcccaattcagccagcccagcacatccagtcagaaaccagtggatctgccaactactcccaggttgcccacattcccaaatcagatgctttgtactttgatgactgcatgcagcttttggcgcagacattcccgtttgtagatgacaatgaggtttcttcggctacgtttcagtcacttgttcctgatattcccggtcacatcgagagcccagtcttcattgctactaatcaggctcagtcacctgaaacttctgttgctcaggtagcccctgttgatttagacggtatgcaacaggacattgagcaagtttgggaggagctattatccattcctgagttacagtgtcttaatattgaaaatgacaagctggttgagactaccatggttccaagtccagaagccaaactgacagaagttgacaattatcatttttactcatctataccctcaatggaaaaagaagtaggtaactgtagtccacattttcttaatgcttttgaggattccttcagcagcatcctctccacagaagaccccaaccagttgacagtgaactcattaaattcagatgccacagtcaacacagattttggtgatgaattttattctgctttcatagctgagcccagtatcagcaacagcatgccctcacctgctactttaagccattcactctctgaacttctaaatgggcccattgatgtttctgatctatcactttgcaaagctttcaaccaaaaccaccctgaaagcacagcagaattcaatgattctgactccggcatttcactaaacacaagtcccagtgtggcatcaccagaacactcagtggaatcttccagctatggagacacactacttggcctcagtgattctgaagtggaagagctagatagtgcccctggaagtgtcaaacagaatggtcctaaaacaccagtacattcttctggggatatggtacaacccttgtcaccatctcaggggcagagcactcacgtgcatgatgcccaatgtgagaacacaccagagaaagaattgcctgtaagtcctggtcatcggaaaaccccattcacaaaagacaaacattcaagccgcttggaggctcatctcacaagagatgaacttagggcaaaagctctccatatcccattccctgtagaaaaaatcattaacctccctgttgttgacttcaacgaaatgatgtccaaagagcagttcaatgaagctcaacttgcattaattcgggatatacgtaggaggggtaagaataaagtggctgctcagaattgcagaaaaagaaaactggaaaatatagtagaactagagcaagatttagatcatttgaaagatgaaaaagaaaaattgctcaaagaaaaaggagaaaatgacaaaagccttcacctactgaaaaaacaactcagcaccttatatctcgaagttttcagcatgctacgtgatgaagatggaaaaccttattctcctagtgaatactccctgcagcaaacaagagatggcaatgttttccttgttcccaaaagtaagaagccagatgttaagaaaaactagatttaggaggatttgaccttttctgagctagtttttttgtactattatactaaaagctcctactgtgatgtgaaatgctcatactttataagtaattctatgcaaaatcatagccaaaactagtatagaaaataatacgaaactttaaaaagcattggagtgtcagtatgttgaatcagtagtttcactttaactgtaaacaatttcttaggacaccatttgggctagtttctgtgtaagtgtaaatactacaaaaacttatttatactgttcttatgtcatttgttatattcatagatttatatgatgatatgacatctggctaaaaagaaattattgcaaaactaaccactatgtacttttttataaatactgtatggacaaaaaatggcattttttatattaaattgtttagctctggcaaaaaaaaaaaattttaagagctggtactaataaaggattattatgactgttaaattattaaaa

SEQ ID NO: 4114 - DNA, 2988 bp, Homo sapiens
  source 1..2988: mol_type = genomic DNA
ggcccttccggggctgcgcggctcccccgcctcggtgccggcaaaaatgtgcctagtcacggggccgctctcgggggaactgaggtcgccttcgggctgggacccggagccccttcgccgcgccccaagacctccttgagtgcgggctgcgacgcgctcaccccgctgggccgtctgtgggcgcggctttgcgaagtcatccatctctcggatcactctctggcagccttgagctctcttgaaagcccagccccgggacgagggaggagcgccttaagtgcccagcgggctcagaagccccgacgtgtggcggctgagccgggccccgcgcactttctcggccggggaggggttcgggctcgggcacccggagttggcccctcgtaacgccgcgggaaagtgcgggcgagggcagtggactctgaggccggagtcggcggcacccggggcttctagttcggacgcggtgccccctggtggcgctcaccgcgcgcgtggccttggcttccgtgacagcgctcggttggccgtcacagcagccctcggttggccctttcctgctttatagcgtgcaaacctcgccgcgccagggccaagggacaggttggagctgttgatctgttgcgcaattgctattttccccagagcggctttgtctttggatttagcgtttcagaattgcaattccaaaatgtgtaagacgggatattctcttctgtgctgtcaagggacatggatttgattgacatactttggaggcaagatatagatcttggagtaagtcgagaagtatttgacttcagtcagcgacggaaagagtatgagctggaaaaacagaaaaaacttgaaaaggaaagacaagaacaactccaaaaggagcaagagaaagcctttttcgctcagttacaactagatgaagagacaggtgaatttctcccaattcagccagcccagcacatccagtcagaaaccagtggatctgccaactactcccaggttgcccacattcccaaatcagatgctttgtactttgatgactgcatgcagcttttggcgcagacattcccgtttgtagatgacaatgaggtttcttcggctacgtttcagtcacttgttcctgatattcccggtcacatcgagagcccagtcttcattgctactaatcaggctcagtcacctgaaacttctgttgctcaggtagcccctgttgatttagacggtatgcaacaggacattgagcaagtttgggaggagctattatccattcctgagttacagtgtcttaatattgaaaatgacaagctggttgagactaccatggttccaagtccagaagccaaactgacagaagttgacaattatcatttttactcatctataccctcaatggaaaaagaagtaggtaactgtagtccacattttcttaatgcttttgaggattccttcagcagcatcctctccacagaagaccccaaccagttgacagtgaactcattaaattcagatgccacagtcaacacagattttggtgatgaattttattctgctttcatagctgagcccagtatcagcaacagcatgccctcacctgctactttaagccattcactctctgaacttctaaatgggcccattgatgtttctgatctatcactttgcaaagctttcaaccaaaaccaccctgaaagcacagcagaattcaatgattctgactccggcatttcactaaacacaagtcccagtgtggcatcaccagaacactcagtggaatcttccagctatggagacacactacttggcctcagtgattctgaagtggaagagctagatagtgcccctggaagtgtcaaacagaatggtcctaaaacaccagtacattcttctggggatatggtacaacccttgtcaccatctcaggggcagagcactcacgtgcatgatgcccaatgtgagaacacaccagagaaagaattgcctgtaagtcctggtcatcggaaaaccccattcacaaaagacaaacattcaagccgcttggaggctcatctcacaagagatgaacttagggcaaaagctctccatatcccattccctgtagaaaaaatcattaacctccctgttgttgacttcaacgaaatgatgtccaaagagcagttcaatgaagctcaacttgcattaattcgggatatacgtaggaggggtaagaataaagtggctgctcagaattgcagaaaaagaaaactggaaaatatagtagaactagagcaagatttagatcatttgaaagatgaaaaagaaaaattgctcaaagaaaaaggagaaaatgacaaaagccttcacctactgaaaaaacaactcagcaccttatatctcgaagttttcagcatgctacgtgatgaagatggaaaaccttattctcctagtgaatactccctgcagcaaacaagagatggcaatgttttccttgttcccaaaagtaagaagccagatgttaagaaaaactagatttaggaggatttgaccttttctgagctagtttttttgtactattatactaaaagctcctactgtgatgtgaaatgctcatactttataagtaattctatgcaaaatcatagccaaaactagtatagaaaataatacgaaactttaaaaagcattggagtgtcagtatgttgaatcagtagtttcactttaactgtaaacaatttcttaggacaccatttgggctagtttctgtgtaagtgtaaatactacaaaaacttatttatactgttcttatgtcatttgttatattcatagatttatatgatgatatgacatctggctaaaaagaaattattgcaaaactaaccactatgtacttttttataaatactgtatggacaaaaaatggcattttttatattaaattgtttagctctggcaaaaaaaaaaaattttaagagctggtactaataaaggattattatgactgttaaattattaaaa

SEQ ID NO: 4115 - DNA, 2967 bp, Homo sapiens
  source 1..2967: mol_type = genomic DNA
ggcccttccggggctgcgcggctcccccgcctcggtgccggcaaaaatgtgcctagtcacggggccgctctcgggggaactgaggtcgccttcgggctgggacccggagccccttcgccgcgccccaagacctccttgagtgcgggctgcgacgcgctcaccccgctgggccgtctgtgggcgcggctttgcgaagtcatccatctctcggatcactctctggcagccttgagctctcttgaaagcccagccccgggacgagggaggagcgccttaagtgcccagcgggctcagaagccccgacgtgtggcggctgagccgggccccgcgcactttctcggccggggaggggttcgggctcgggcacccggagttggcccctcgtaacgccgcgggaaagtgcgggcgagggcagtggactctgaggccggagtcggcggcacccggggcttctagttcggacgcggtgccccctggtggcgctcaccgcgcgcgtggccttggcttccgtgacagcgctcggttggccgtcacagcagccctcggttggccctttcctgctttatagcgtgcaaacctcgccgcgccagggccaagggacaggttggagctgttgatctgttgcgcaattgctattttccccagagcggctttgtctttggatttagcgtttcagaattgcaattccaaaatgtgtaagacgggatattctcttctgtgctgtcaagggacatggatttgattgacatactttggaggcaagatatagatcttggagtaagtcgagaagtatttgacttcagtcagcgacggaaagagtatgagctggaaaaacagaaaaaacttgaaaaggaaagacaagaacaactccaaaaggagcaagagaaagcctttttcgctcagttacaactagatgaagagacaggtgaatttctcccaattcagccagcccagcacatccagtcagaaaccagtggatctgccaactactcccaggttgcccacattcccaaatcagatgctttgtactttgatgactgcatgcagcttttggcgcagacattcccgtttgtagatgacaatgagtcacttgttcctgatattcccggtcacatcgagagcccagtcttcattgctactaatcaggctcagtcacctgaaacttctgttgctcaggtagcccctgttgatttagacggtatgcaacaggacattgagcaagtttgggaggagctattatccattcctgagttacagtgtcttaatattgaaaatgacaagctggttgagactaccatggttccaagtccagaagccaaactgacagaagttgacaattatcatttttactcatctataccctcaatggaaaaagaagtaggtaactgtagtccacattttcttaatgcttttgaggattccttcagcagcatcctctccacagaagaccccaaccagttgacagtgaactcattaaattcagatgccacagtcaacacagattttggtgatgaattttattctgctttcatagctgagcccagtatcagcaacagcatgccctcacctgctactttaagccattcactctctgaacttctaaatgggcccattgatgtttctgatctatcactttgcaaagctttcaaccaaaaccaccctgaaagcacagcagaattcaatgattctgactccggcatttcactaaacacaagtcccagtgtggcatcaccagaacactcagtggaatcttccagctatggagacacactacttggcctcagtgattctgaagtggaagagctagatagtgcccctggaagtgtcaaacagaatggtcctaaaacaccagtacattcttctggggatatggtacaacccttgtcaccatctcaggggcagagcactcacgtgcatgatgcccaatgtgagaacacaccagagaaagaattgcctgtaagtcctggtcatcggaaaaccccattcacaaaagacaaacattcaagccgcttggaggctcatctcacaagagatgaacttagggcaaaagctctccatatcccattccctgtagaaaaaatcattaacctccctgttgttgacttcaacgaaatgatgtccaaagagcagttcaatgaagctcaacttgcattaattcgggatatacgtaggaggggtaagaataaagtggctgctcagaattgcagaaaaagaaaactggaaaatatagtagaactagagcaagatttagatcatttgaaagatgaaaaagaaaaattgctcaaagaaaaaggagaaaatgacaaaagccttcacctactgaaaaaacaactcagcaccttatatctcgaagttttcagcatgctacgtgatgaagatggaaaaccttattctcctagtgaatactccctgcagcaaacaagagatggcaatgttttccttgttcccaaaagtaagaagccagatgttaagaaaaactagatttaggaggatttgaccttttctgagctagtttttttgtactattatactaaaagctcctactgtgatgtgaaatgctcatactttataagtaattctatgcaaaatcatagccaaaactagtatagaaaataatacgaaactttaaaaagcattggagtgtcagtatgttgaatcagtagtttcactttaactgtaaacaatttcttaggacaccatttgggctagtttctgtgtaagtgtaaatactacaaaaacttatttatactgttcttatgtcatttgttatattcatagatttatatgatgatatgacatctggctaaaaagaaattattgcaaaactaaccactatgtacttttttataaatactgtatggacaaaaaatggcattttttatattaaattgtttagctctggcaaaaaaaaaaaattttaagagctggtactaataaaggattattatgactgttaaattattaaaa

SEQ ID NO: 4116 - DNA, 2972 bp, Homo sapiens
  source 1..2972: mol_type = genomic DNA
agcgtggccttgggaggcggggcggagggggacggacagggcagctcaagacgctgaggtggtggctgcggcctttgaacaagtaagtgagccaccctcggagacccccgcgctggggacgggaggccggcgagcctcgggacctctgaaagccttgaggaggcgcggggacaccatggccgagcctctgaaggaggaagacggcgaggacggctctgcggagccccccgggcccgtgaaggccgaacccgcccacaccgctgcctctgtagcggccaagaacctggccctgcttaaagcccgctccttcgatgtgacctttgacgtgggcgacgagtacgagatcatcgagaccataggcaacggggcctatggagtggtgtcctccgcccgccgccgcctcaccggccagcaggtggccatcaagaagatccctaatgctttcgatgtggtgaccaatgccaagcggaccctcagggagctgaagatcctcaagcactttaaacacgacaacatcatcgccatcaaggacatcctgaggcccaccgtgccctatggcgaattcaaatctgtctacgtggtcctggacctgatggaaagcgacctgcaccagatcatccactcctcacagcccctcacactggaacacgtgcgctacttcctgtaccaactgctgcggggcctgaagtacatgcactcggctcaggtcatccaccgtgacctgaagccctccaacctattggtgaatgagaactgtgagctcaagattggtgactttggtatggctcgtggcctgtgcacctcgcccgctgaacatcagtacttcatgactgagtatgtggccacgcgctggtaccgtgcgcccgagctcatgctctctttgcatgagtatacacaggctattgacctctggtctgtgggctgcatctttggtgagatgctggcccggcgccagctcttcccaggcaaaaactatgtacaccagctacagctcatcatgatggtgctgggtaccccatcaccagccgtgattcaggctgtgggggctgagagggtgcgggcctatatccagagcttgccaccacgccagcctgtgccctgggagacagtgtacccaggtgccgaccgccaggccctatcactgctgggtcgcatgctgcgttttgagcccagcgctcgcatctcagcagctgctgcccttcgccaccctttcctggccaagtaccatgatcctgatgatgagcctgactgtgccccgccctttgactttgcctttgaccgcgaagccctcactcgggagcgcattaaggaggccattgtggctgaaattgaggacttccatgcaaggcgtgagggcatccgccaacagatccgcttccagccttctctacagcctgtggctagtgagcctggctgtccagatgttgaaatgcccagtccctgggctcccagtggggactgtgccatggagtctccaccaccagccccgccaccatgccccggccctgcacctgacaccattgatctgaccctgcagccacctccaccagtcagtgagcctgccccaccaaagaaagatggtgccatctcagacaatactaaggctgcccttaaagctgccctgctcaagtctttgaggagccggctcagagatggccccagcgcacccctggaggctcctgagcctcggaagccggtgacagcccaggagcgccagcgggagcgggaggagaagcggcggaggcggcaagaacgagccaaggagcgggagaaacggcggcaggagcgggagcgaaaggaacggggggctggggcctctgggggcccctccactgaccccttggctggactagtgctcagtgacaatgacagaagcctgttggaacgctggactcgaatggcccggcccgcagccccagccctcacctctgtgccggcccctgccccagcgccaacgccaaccccaaccccagtccaacctaccagtcctcctcctggccctgtagcccagcccactggcccgcaaccacaatctgcgggctctacctctggccctgtaccccagcctgcctgcccaccccctggccctgcaccccaccccactggccctcctgggcccatccctgtccccgcgccaccccagattgccacctccaccagcctcctggctgcccagtcacttgtgccaccccctgggctgcctggctccagcaccccaggagttttgccttacttcccacctggcctgccgcccccagacgccgggggagcccctcagtcttccatgtcagagtcacctgatgtcaaccttgtgacccagcagctatctaagtcacaggtggaggaccccctgccccctgtgttctcaggcacaccaaagggcagtggggctggctacggtgttggctttgacctggaggaattcttaaaccagtctttcgacatgggcgtggctgatgggccacaggatggccaggcagattcagcctctctctcagcctccctgcttgctgactggctcgaaggccatggcatgaaccctgccgatattgagtccctgcagcgtgagatccagatggactccccaatgctgctggctgacctgcctgacctccaggacccctgaggcccccagcctgtgccttgctgccacagtagacctagttccaggatccatgggagcattctcaaaggctttagccctggacccagcaggtgaggctcggcttggattattctgcaggttcatctcagacccacctttcagccttaagcagccacctgagccaccaccgagccatggcaggatcgggagaccccaactccccctgaacaatccttttcagtattatatttttattattattatgttattattacactgtctttttgccatcaaaatgaggcctgtgaaatacaaggttcccttctgcacctgaaaaaaaaaaaaaaaaaaaaaaaaaaaaaaaaaa

SEQ ID NO: 4117 - DNA, 2884 bp, Homo sapiens
  source 1..2884: mol_type = genomic DNA
agcgtggccttgggaggcggggcggagggggacggacagggcagctcaagacgctgaggtggtggctgcggcctttgaacaaacaccatggccgagcctctgaaggaggaagacggcgaggacggctctgcggagccccccgggcccgtgaaggccgaacccgcccacaccgctgcctctgtagcggccaagaacctggccctgcttaaagcccgctccttcgatgtgacctttgacgtgggcgacgagtacgagatcatcgagaccataggcaacggggcctatggagtggtgtcctccgcccgccgccgcctcaccggccagcaggtggccatcaagaagatccctaatgctttcgatgtggtgaccaatgccaagcggaccctcagggagctgaagatcctcaagcactttaaacacgacaacatcatcgccatcaaggacatcctgaggcccaccgtgccctatggcgaattcaaatctgtctacgtggtcctggacctgatggaaagcgacctgcaccagatcatccactcctcacagcccctcacactggaacacgtgcgctacttcctgtaccaactgctgcggggcctgaagtacatgcactcggctcaggtcatccaccgtgacctgaagccctccaacctattggtgaatgagaactgtgagctcaagattggtgactttggtatggctcgtggcctgtgcacctcgcccgctgaacatcagtacttcatgactgagtatgtggccacgcgctggtaccgtgcgcccgagctcatgctctctttgcatgagtatacacaggctattgacctctggtctgtgggctgcatctttggtgagatgctggcccggcgccagctcttcccaggcaaaaactatgtacaccagctacagctcatcatgatggtgctgggtaccccatcaccagccgtgattcaggctgtgggggctgagagggtgcgggcctatatccagagcttgccaccacgccagcctgtgccctgggagacagtgtacccaggtgccgaccgccaggccctatcactgctgggtcgcatgctgcgttttgagcccagcgctcgcatctcagcagctgctgcccttcgccaccctttcctggccaagtaccatgatcctgatgatgagcctgactgtgccccgccctttgactttgcctttgaccgcgaagccctcactcgggagcgcattaaggaggccattgtggctgaaattgaggacttccatgcaaggcgtgagggcatccgccaacagatccgcttccagccttctctacagcctgtggctagtgagcctggctgtccagatgttgaaatgcccagtccctgggctcccagtggggactgtgccatggagtctccaccaccagccccgccaccatgccccggccctgcacctgacaccattgatctgaccctgcagccacctccaccagtcagtgagcctgccccaccaaagaaagatggtgccatctcagacaatactaaggctgcccttaaagctgccctgctcaagtctttgaggagccggctcagagatggccccagcgcacccctggaggctcctgagcctcggaagccggtgacagcccaggagcgccagcgggagcgggaggagaagcggcggaggcggcaagaacgagccaaggagcgggagaaacggcggcaggagcgggagcgaaaggaacggggggctggggcctctgggggcccctccactgaccccttggctggactagtgctcagtgacaatgacagaagcctgttggaacgctggactcgaatggcccggcccgcagccccagccctcacctctgtgccggcccctgccccagcgccaacgccaaccccaaccccagtccaacctaccagtcctcctcctggccctgtagcccagcccactggcccgcaaccacaatctgcgggctctacctctggccctgtaccccagcctgcctgcccaccccctggccctgcaccccaccccactggccctcctgggcccatccctgtccccgcgccaccccagattgccacctccaccagcctcctggctgcccagtcacttgtgccaccccctgggctgcctggctccagcaccccaggagttttgccttacttcccacctggcctgccgcccccagacgccgggggagcccctcagtcttccatgtcagagtcacctgatgtcaaccttgtgacccagcagctatctaagtcacaggtggaggaccccctgccccctgtgttctcaggcacaccaaagggcagtggggctggctacggtgttggctttgacctggaggaattcttaaaccagtctttcgacatgggcgtggctgatgggccacaggatggccaggcagattcagcctctctctcagcctccctgcttgctgactggctcgaaggccatggcatgaaccctgccgatattgagtccctgcagcgtgagatccagatggactccccaatgctgctggctgacctgcctgacctccaggacccctgaggcccccagcctgtgccttgctgccacagtagacctagttccaggatccatgggagcattctcaaaggctttagccctggacccagcaggtgaggctcggcttggattattctgcaggttcatctcagacccacctttcagccttaagcagccacctgagccaccaccgagccatggcaggatcgggagaccccaactccccctgaacaatccttttcagtattatatttttattattattatgttattattacactgtctttttgccatcaaaatgaggcctgtgaaatacaaggttcccttctgcacctgaaaaaaaaaaaaaaaaaaaaaaaaaaaaaaaaaa

SEQ ID NO: 4118 - DNA, 3183 bp, Homo sapiens
  source 1..3183: mol_type = genomic DNA
acagctcggttccagcgagggctccgcccacccgcgggctccgcagaggagcagaggttgggcggccgcctcggttaactccgctgcagcccaaagcacgggaatcgcgggacagacaaacgagcggagggaagatacctagaagccaggaaaccgcgagctgcagtccaacttggccggaagctgcggagaggctcagccaccggaagtcagtggagggttcggccggacgctctagaatcccggaggaccgggatctctgtggttggccgtgacgggcaccctctaccggggatgacacattcccagagctcctgggaccaagcaaatggcggacacaattccctgggcggaaggggacttcgggagccagtagccaagacaccatggccgagcctctgaaggaggaagacggcgaggacggctctgcggagccccccgggcccgtgaaggccgaacccgcccacaccgctgcctctgtagcggccaagaacctggccctgcttaaagcccgctccttcgatgtgacctttgacgtgggcgacgagtacgagatcatcgagaccataggcaacggggcctatggagtggtgtcctccgcccgccgccgcctcaccggccagcaggtggccatcaagaagatccctaatgctttcgatgtggtgaccaatgccaagcggaccctcagggagctgaagatcctcaagcactttaaacacgacaacatcatcgccatcaaggacatcctgaggcccaccgtgccctatggcgaattcaaatctgtctacgtggtcctggacctgatggaaagcgacctgcaccagatcatccactcctcacagcccctcacactggaacacgtgcgctacttcctgtaccaactgctgcggggcctgaagtacatgcactcggctcaggtcatccaccgtgacctgaagccctccaacctattggtgaatgagaactgtgagctcaagattggtgactttggtatggctcgtggcctgtgcacctcgcccgctgaacatcagtacttcatgactgagtatgtggccacgcgctggtaccgtgcgcccgagctcatgctctctttgcatgagtatacacaggctattgacctctggtctgtgggctgcatctttggtgagatgctggcccggcgccagctcttcccaggcaaaaactatgtacaccagctacagctcatcatgatggtgctgggtaccccatcaccagccgtgattcaggctgtgggggctgagagggtgcgggcctatatccagagcttgccaccacgccagcctgtgccctgggagacagtgtacccaggtgccgaccgccaggccctatcactgctgggtcgcatgctgcgttttgagcccagcgctcgcatctcagcagctgctgcccttcgccaccctttcctggccaagtaccatgatcctgatgatgagcctgactgtgccccgccctttgactttgcctttgaccgcgaagccctcactcgggagcgcattaaggaggccattgtggctgaaattgaggacttccatgcaaggcgtgagggcatccgccaacagatccgcttccagccttctctacagcctgtggctagtgagcctggctgtccagatgttgaaatgcccagtccctgggctcccagtggggactgtgccatggagtctccaccaccagccccgccaccatgccccggccctgcacctgacaccattgatctgaccctgcagccacctccaccagtcagtgagcctgccccaccaaagaaagatggtgccatctcagacaatactaaggctgcccttaaagctgccctgctcaagtctttgaggagccggctcagagatggccccagcgcacccctggaggctcctgagcctcggaagccggtgacagcccaggagcgccagcgggagcgggaggagaagcggcggaggcggcaagaacgagccaaggagcgggagaaacggcggcaggagcgggagcgaaaggaacggggggctggggcctctgggggcccctccactgaccccttggctggactagtgctcagtgacaatgacagaagcctgttggaacgctggactcgaatggcccggcccgcagccccagccctcacctctgtgccggcccctgccccagcgccaacgccaaccccaaccccagtccaacctaccagtcctcctcctggccctgtagcccagcccactggcccgcaaccacaatctgcgggctctacctctggccctgtaccccagcctgcctgcccaccccctggccctgcaccccaccccactggccctcctgggcccatccctgtccccgcgccaccccagattgccacctccaccagcctcctggctgcccagtcacttgtgccaccccctgggctgcctggctccagcaccccaggagttttgccttacttcccacctggcctgccgcccccagacgccgggggagcccctcagtcttccatgtcagagtcacctgatgtcaaccttgtgacccagcagctatctaagtcacaggtggaggaccccctgccccctgtgttctcaggcacaccaaagggcagtggggctggctacggtgttggctttgacctggaggaattcttaaaccagtctttcgacatgggcgtggctgatgggccacaggatggccaggcagattcagcctctctctcagcctccctgcttgctgactggctcgaaggccatggcatgaaccctgccgatattgagtccctgcagcgtgagatccagatggactccccaatgctgctggctgacctgcctgacctccaggacccctgaggcccccagcctgtgccttgctgccacagtagacctagttccaggatccatgggagcattctcaaaggctttagccctggacccagcaggtgaggctcggcttggattattctgcaggttcatctcagacccacctttcagccttaagcagccacctgagccaccaccgagccatggcaggatcgggagaccccaactccccctgaacaatccttttcagtattatatttttattattattatgttattattacactgtctttttgccatcaaaatgaggcctgtgaaatacaaggttcccttctgcacctgaaaaaaaaaaaaaaaaaaaaaaaaaaaaaaaaaa

SEQ ID NO: 4119 - DNA, 2780 bp, Homo sapiens
  source 1..2780: mol_type = genomic DNA
acagctcggttccagcgagggctccgcccacccgcgggctccgcagaggagcagaggttgggcggccgcctcggttaactccgctgcagcccaaagcacgggaatcgcgggacagacaaacgagcggagggaagatacctagaagccaggaaaccgcgagctgcagtccaacttggccggaagctgcggagaggctcagccaccggaagtcagtggagggttcggccggacgctctagaatcccggaggaccgggatctctgtggttggccgtgacgggcaccctctaccggggatgacacattcccagagctcctgggaccaagcaaatggcggacacaattccctgggcggaaggggacttcgggagccagtagccaagctacgtggtcctggacctgatggaaagcgacctgcaccagatcatccactcctcacagcccctcacactggaacacgtgcgctacttcctgtaccaactgctgcggggcctgaagtacatgcactcggctcaggtcatccaccgtgacctgaagccctccaacctattggtgaatgagaactgtgagctcaagattggtgactttggtatggctcgtggcctgtgcacctcgcccgctgaacatcagtacttcatgactgagtatgtggccacgcgctggtaccgtgcgcccgagctcatgctctctttgcatgagtatacacaggctattgacctctggtctgtgggctgcatctttggtgagatgctggcccggcgccagctcttcccaggcaaaaactatgtacaccagctacagctcatcatgatggtgctgggtaccccatcaccagccgtgattcaggctgtgggggctgagagggtgcgggcctatatccagagcttgccaccacgccagcctgtgccctgggagacagtgtacccaggtgccgaccgccaggccctatcactgctgggtcgcatgctgcgttttgagcccagcgctcgcatctcagcagctgctgcccttcgccaccctttcctggccaagtaccatgatcctgatgatgagcctgactgtgccccgccctttgactttgcctttgaccgcgaagccctcactcgggagcgcattaaggaggccattgtggctgaaattgaggacttccatgcaaggcgtgagggcatccgccaacagatccgcttccagccttctctacagcctgtggctagtgagcctggctgtccagatgttgaaatgcccagtccctgggctcccagtggggactgtgccatggagtctccaccaccagccccgccaccatgccccggccctgcacctgacaccattgatctgaccctgcagccacctccaccagtcagtgagcctgccccaccaaagaaagatggtgccatctcagacaatactaaggctgcccttaaagctgccctgctcaagtctttgaggagccggctcagagatggccccagcgcacccctggaggctcctgagcctcggaagccggtgacagcccaggagcgccagcgggagcgggaggagaagcggcggaggcggcaagaacgagccaaggagcgggagaaacggcggcaggagcgggagcgaaaggaacggggggctggggcctctgggggcccctccactgaccccttggctggactagtgctcagtgacaatgacagaagcctgttggaacgctggactcgaatggcccggcccgcagccccagccctcacctctgtgccggcccctgccccagcgccaacgccaaccccaaccccagtccaacctaccagtcctcctcctggccctgtagcccagcccactggcccgcaaccacaatctgcgggctctacctctggccctgtaccccagcctgcctgcccaccccctggccctgcaccccaccccactggccctcctgggcccatccctgtccccgcgccaccccagattgccacctccaccagcctcctggctgcccagtcacttgtgccaccccctgggctgcctggctccagcaccccaggagttttgccttacttcccacctggcctgccgcccccagacgccgggggagcccctcagtcttccatgtcagagtcacctgatgtcaaccttgtgacccagcagctatctaagtcacaggtggaggaccccctgccccctgtgttctcaggcacaccaaagggcagtggggctggctacggtgttggctttgacctggaggaattcttaaaccagtctttcgacatgggcgtggctgatgggccacaggatggccaggcagattcagcctctctctcagcctccctgcttgctgactggctcgaaggccatggcatgaaccctgccgatattgagtccctgcagcgtgagatccagatggactccccaatgctgctggctgacctgcctgacctccaggacccctgaggcccccagcctgtgccttgctgccacagtagacctagttccaggatccatgggagcattctcaaaggctttagccctggacccagcaggtgaggctcggcttggattattctgcaggttcatctcagacccacctttcagccttaagcagccacctgagccaccaccgagccatggcaggatcgggagaccccaactccccctgaacaatccttttcagtattatatttttattattattatgttattattacactgtctttttgccatcaaaatgaggcctgtgaaatacaaggttcccttctgcacctgaaaaaaaaaaaaaaaaaaaaaaaaaaaaaaaaaa

SEQ ID NO: 4120 - DNA, 3781 bp, Homo sapiens
  source 1..3781: mol_type = genomic DNA
gagagtgcgaccgagatgttccactcgctggcgtccgggccgctggtgatctccggtagcactcgggccggcggacagtgagggcgcgacaacaagggaggtgtcacagttttccatttagatcaacaacttcaagttcttaccatggaaaattccgagaagactgaagtggttctccttgcttgtggttcattcaatcccatcaccaacatgcacctcaggttgtttgagctggccaaggactacatgaatggaacaggaaggtacacagttgtcaaaggcatcatctctcctgttggtgatgcctacaagaagaaaggactcattcctgcctatcaccgggtcatcatggcagaacttgctaccaagaattctaaatgggtggaagttgatacatgggaaagtcttcagaaggagtggaaagagactctgaaggtgctaagacaccatcaagagaaattggaggctagtgactgtgatcaccagcagaactcacctactctagaaaggcctggaaggaagaggaagtggactgaaacacaagattctagtcaaaagaaatccctagagccaaaaacaaaagctgtgccaaaggtcaagctgctgtgtggggcagatttattggagtcctttgctgttcccaatttgtggaagagtgaagacatcacccaaatcgtggccaactatgggctcatatgtgttactcgggctggaaatgatgctcagaagtttatctatgaatcggatgtgctgtggaaacaccggagcaacattcacgtggtgaatgaatggatcgctaatgacatctcatccacaaaaatccggagagccctcagaaggggccagagcattcgctacttggtaccagatcttgtccaagaatacattgaaaagcataatttgtacagctctgagagtgaagacaggaatgctggggtcatcctggcccctttgcagagaaacactgcagaagctaagacataggaattctacagcatgatatttcagacttcccatttggggatctgaaacaatctgggagttaataactggggaaagaagttgtgatctgttgcctaaactaaagcttaaaagtttagtaaaaatcgtctgggcacagtggctcacgcctgtaatcccagcactttgggaggctgaggcaggtggatcacggggtcaagagatcgagaccatcctggccaatatggtgaaaccccatctctactaaaaatacaaaaattagctgtgtgtggtggcacgtgcctgtagtcccagctacttgggaggctgaggcaggagaatcacttgaccccaggtggtggaggttgcagtgagccaagattgcaccattgcactccagcctggcgacagagcaagactctgtctcaaaaaaaaaaaaaaatttagtaaaaatcaatggtaagctaaaataagtttttgtttgtttatttgtttttgagatggagtctctactaaaaatacaaaaaattagccaggcatggtgccgcataactataatcccagctacttgggaggctgaggcaggagaatcgcttgaacccgggaggcacaggttccagtgagccaaggttgtgccactgcactccagcctgggcaaaaaagcaaaactccatctcaaagagaaaaaaaaaaaagaccgggtgtggtggctcacacctgtaatcccagcactttgggaggcctaagtgggtggatcacgtgaggtcaagagttcaagaccagcctggccaatatggtgaaaccccatctctactaagaatacaaaaaattagctgagcatggtggtgggctcctgtagtcccagctacttgggaggctgaggcaggagaatcgcttgaacctgggaggcagaggttgcagtaagccaagatcgtgccattgcactccagcctgggtgacagagcgagactccatctcaaaaaaaaaaaaaagcctgacagctagcaggtttcaggatccatctgccaagttagtgaaaggctggagcctcaaatcatacagatgagggtcattttctcctccttagcttcttggagtttaagagttgaaggagtcctgaaaagtaatgatagagcaagatgaagctatcagaactgaatttggacttcctctgggaaactacacctagttcatctgaagtgtcacgtaaactgcagaaagtttccaatgctggaaacttctctcatactatcgtgccttcctactcagaagtgcctgtgccctgctcagctgtgactactgacctcaggacctcactggacaaggcatgtggggacccttgcaggagccctggtaagggtacaatgatcctattgttttttgtttttgagatggagtctcactctgtctcccaggctggagtgcagtggtgcgatctccgctcactgcaacctccgcctcccgggttcaagcaattctcctgcctcagcctgctgagtagctgggattacaggcacccactaccatgtccggctaattttgtatttttagtagagatggggtttcgccatgttagacaggctggtcttgaactcctgacctcaggtgatctgcccacctcggccttccaaagtgctgggattacaggcatgagccactgcacccagcctgatcctattgttgcactatttatggagcaacaactttgtacaaagaacaagctttgtacagagaacaagcttggctttttctcccaacgccgaggatgctgttgatgctgccacgtaatagcataattttgggtgtcctcaaggacagaacttccactttgaataatggaagttagaacaatgaatttcacaggggaataaatattaatgactgacgtgaagaaaatatgccattgtttattccctcctgcatcatttccataatttgcttttgtactgtcaatttagaggaaatgtgtgatgctggtgttttgtttggcctgtttgtttgatgctgggggttttatgtgttgtaccctttaccccttacattgtgtaatttgaaagtggcaaacaaacctgcagtaaaagtccttgattggcatcttcattcggatgatggagagcctttgtggtagtgtttgcttatgtgaacagcaggcctttcagataagagaagtggcttttccttggtgatgaaggggtagagattgagccatggggatggtttaggttaaagaatgcttttttttggccatcatgaggatctaacaacagagtagaaggaaggatgccctaggtcagcatgcagggtggtgggagggctttcatcttccttacccaagcctctcttttcacttttctagaagtccagaagttgttatatgatgaaatagcctcctttaacgtttatttctgggtgccaacggaggcccattcctctaacattctcataatttttctcaaaggcctatgatctaaacatttcaccacggcatccactcagctgtgaggctgcgtacacagtctccacctctgaaatctgaacttcgtttaccagtggtgctgtttgaacttcataatgtcagcacttcctgaacacttactgtgtgcttggcttgtgctcctgagtgccttatatcataaggaaacggcaaaatcaggggactggtataaatggtgagctgagcttgaatctaagctttgtcttcagagccagtacccctaatctctctttctgtaaaatattacttttcaaagaatgaagttgtagccaaatcttgaaatttttcatttaccctaagtgaggacaaataaagctttcaacaaca

SEQ ID NO: 4121 - DNA, 1052 bp, Homo sapiens
  source 1..1052: mol_type = genomic DNA
agagagcgctgggagccggaggggagcgcagcgagttttggccagtggtcgtgcagtccaaggggctggatggcatgctggacccaagctcagctcagcgtccggacccaataacagttttaccaagggagcagctttctatcctggccacactgaggtgcatagcgtaatgtccatgttgttctacactctgatcacagcttttctgatcggcatacaggcggaaccacactcagagagcaatgtccctgcaggacacaccatcccccaagcccactggactaaacttcagcattcccttgacactgcccttcgcagagcccgcagcgccccggcagcggcgatagctgcacgcgtggcggggcagacccgcaacattactgtggaccccaggctgtttaaaaagcggcgactccgttcaccccgtgtgctgtttagcacccagcctccccgtgaagctgcagacactcaggatctggacttcgaggtcggtggtgctgcccccttcaacaggactcacaggagcaagcggtcatcatcccatcccatcttccacaggggcgaattctcggtgtgtgacagtgtcagcgtgtgggttggggataagaccaccgccacagacatcaagggcaaggaggtgatggtgttgggagaggtgaacattaacaacagtgtattcaaacagtacttttttgagaccaagtgccgggacccaaatcccgttgacagcgggtgccggggcattgactcaaagcactggaactcatattgtaccacgactcacacctttgtcaaggcgctgaccatggatggcaagcaggctgcctggcggtttatccggatagatacggcctgtgtgtgtgtgctcagcaggaaggctgtgagaagagcctgacctgccgacacgctccctccccctgccccttctacactctcctgggcccctccctacctcaacctgtaaattattttaaattataaggactgcatggtaatttatagtttatacagttttaaagaatcattatttattaaatttttggaagcataaa

SEQ ID NO: 4122 - DNA, 2798 bp, Homo sapiens
  source 1..2798: mol_type = genomic DNA
agtagggaagtagctatggcagtgcctgatacaaaataaactccaaatgtgtatttattagatggttggatggaagttatttgcgtgtgaaagcgcgttttacccgaaggcgctctgtgagggccagcgggtccccttcggccctggagccggggtcacacgctccccaccgcgtgcggtcacgagacgcccccaagggagtatcctggtacccggaagccgcgactcctggccctgagcccgggcttagccttcgggtccacgtggccggaggccggcagctgattggacgcgggccgccccaccccctggccgtcgcgggacccgcaggactgagaccatggaggcggtggcggtggccgcggcggtgggggtccttctcctggccggggccgggggcgcggcaggcgacgaggcccgggaggcggcggccgtgcgggcgctcgtggcccggctgctggggccaggccccgcggccgacttctccgtgtcggtggagcgcgctctggctgccaagccgggcttggacacctacagcctgggcggcggcggcgcggcgcgcgtgcgggtgcgcggctccacgggcgtggcggccgccgcggggctgcaccgctacctgcgcgacttctgtggctgccacgtggcctggtccggctctcagctgcgcctgccgcggccactgccagccgtgccgggggagctgaccgaggccacgcccaacaggtaccgctattaccagaatgtgtgcacgcaaagctactctttcgtgtggtgggactgggcccgctgggagcgagagatagactggatggcgctgaatggcatcaacctggcactggcctggagcggccaggaggccatctggcagcgggtgtacctggccttgggcctgacccaggcagagatcaatgagttctttactggtcctgccttcctggcctgggggcgaatgggcaacctgcacacctgggatggccccctgcccccctcctggcacatcaagcagctttacctgcagcaccgggtcctggaccagatgcgctccttcggcatgaccccagtgctgcctgcattcgcggggcatgttcccgaggctgtcaccagggtgttccctcaggtcaatgtcacgaagatgggcagttggggccactttaactgttcctactcctgctccttccttctggctccggaagaccccatattccccatcatcgggagcctcttcctgcgagagctgatcaaagagtttggcacagaccacatctatggggccgacactttcaatgagatgcagccaccttcctcagagccctcctaccttgccgcagccaccactgccgtctatgaggccatgactgcagtggatactgaggctgtgtggctgctccaaggctggctcttccagcaccagccgcagttctgggggcccgcccagatcagggctgtgctgggagctgtgccccgtggccgcctcctggttctggacctgtttgctgagagccagcctgtgtatacccgcactgcctccttccagggccagcccttcatctggtgcatgctgcacaactttgggggaaaccatggtctttttggagccctagaggctgtgaacggaggcccagaagctgcccgcctcttccccaactccaccatggtaggcacgggcatggcccccgagggcatcagccagaacgaagtggtctattccctcatggctgagctgggctggcgaaaggacccagtgccagatttggcagcctgggtgaccagctttgccgcccggcggtatggggtctcccacccggacgcaggggcagcgtggaggctactgctccggagtgtgtacaactgctccggggaggcctgcaggggccacaatcgtagcccgctggtcaggcggccgtccctacagatgaataccagcatctggtacaaccgatctgatgtgtttgaggcctggcggctgctgctcacatctgctccctccctggccaccagccccgccttccgctacgacctgctggacctcactcggcaggcagtgcaggagctggtcagcttgtactatgaggaggcaagaagcgcctacctgagcaaggagctggcctccctgttgagggctggaggcgtcctggcctatgagctgctgccggcactggacgaggtgctggctagtgacagccgcttcttgctgggcagctggctagagcaggcccgagcagcggcagtcagtgaggccgaggccgatttctacgagcagaacagccgctaccagctgaccttgtgggggccagaaggcaacatcctggactatgccaacaagcagctggcggggttggtggccaactactacacccctcgctggcggcttttcctggaggcgctggttgacagtgtggcccagggcatccctttccaacagcaccagtttgacaaaaatgtcttccaactggagcaggccttcgttctcagcaagcagaggtaccccagccagccgcgaggagacactgtggacctggccaagaagatcttcctcaaatattacccccgctgggtggccggctcttggtgatagattcgccaccactgggccttgttttccgctaattccagggcagattccagggcccagagctggacagacatcacaggataacccaggcctgggaggaggccccacggcctgctggtggggtctgacctggggggattggagggaaatgacctgccctccaccaccacccaaagtgtgggattaaagtactgttttctttccacttaaaaaaaaaaaaaaaaaa

SEQ ID NO: 4123 - DNA, 2877 bp, Homo sapiens
  source 1..2877: mol_type = genomic DNA
gctttccgcggcattctttgggcgtgagtcatgcaggtttgcagccagccccaaagggggtgtgtgcgcgagcagagcgctataaatacggcgcctcccagtgcccacaacgcggcgtcgccaggaggagcgcgcgggcacagggtgccgctgaccgaggcgtgcaaagactccagaattggaggcatgatgaagactctgctgctgtttgtggggctgctgctgacctgggagagtgggcaggtcctgggggaccagacggtctcagacaatgagctccaggaaatgtccaatcagggaagtaagtacgtcaataaggaaattcaaaatgctgtcaacggggtgaaacagataaagactctcatagaaaaaacaaacgaagagcgcaagacactgctcagcaacctagaagaagccaagaagaagaaagaggatgccctaaatgagaccagggaatcagagacaaagctgaaggagctcccaggagtgtgcaatgagaccatgatggccctctgggaagagtgtaagccctgcctgaaacagacctgcatgaagttctacgcacgcgtctgcagaagtggctcaggcctggttggccgccagcttgaggagttcctgaaccagagctcgcccttctacttctggatgaatggtgaccgcatcgactccctgctggagaacgaccggcagcagacgcacatgctggatgtcatgcaggaccacttcagccgcgcgtccagcatcatagacgagctcttccaggacaggttcttcacccgggagccccaggatacctaccactacctgcccttcagcctgccccaccggaggcctcacttcttctttcccaagtcccgcatcgtccgcagcttgatgcccttctctccgtacgagcccctgaacttccacgccatgttccagcccttccttgagatgatacacgaggctcagcaggccatggacatccacttccatagcccggccttccagcacccgccaacagaattcatacgagaaggcgacgatgaccggactgtgtgccgggagatccgccacaactccacgggctgcctgcggatgaaggaccagtgtgacaagtgccgggagatcttgtctgtggactgttccaccaacaacccctcccaggctaagctgcggcgggagctcgacgaatccctccaggtcgctgagaggttgaccaggaaatacaacgagctgctaaagtcctaccagtggaagatgctcaacacctcctccttgctggagcagctgaacgagcagtttaactgggtgtcccggctggcaaacctcacgcaaggcgaagaccagtactatctgcgggtcaccacggtggcttcccacacttctgactcggacgttccttccggtgtcactgaggtggtcgtgaagctctttgactctgatcccatcactgtgacggtccctgtagaagtctccaggaagaaccctaaatttatggagaccgtggcggagaaagcgctgcaggaataccgcaaaaagcaccgggaggagtgagatgtggatgttgcttttgcacctacgggggcatctgagtccagctccccccaagatgagctgcagccccccagagagagctctgcacgtcaccaagtaaccaggccccagcctccaggcccccaactccgcccagcctctccccgctctggatcctgcactctaacactcgactctgctgctcatgggaagaacagaattgctcctgcatgcaactaattcaataaaactgtcttgtgagctgatcgcttggagggtcctctttttatgttgagttgctgcttcccggcatgccttcattttgctatggggggcaggcaggggggatggaaaataagtagaaacaaaaaagcagtggctaagatggtatagggactgtcataccagtgaagaataaaagggtgaagaataaaagggatatgatgacaaggttgatccacttcaagaattgcttgctttcaggaagagagatgtgtttcaacaagccaactaaaatatattgctgcaaatggaagcttttctgttctattataaaactgtcgatgtattctgaccaaggtgcgacaatctcctaaaggaatacactgaaagttaaggagaagaatcagtaagtgtaaggtgtacttggtattataatgcataattgatgttttcgttatgaaaacatttggtgcccagaagtccaaattatcagttttatttgtaagagctattgcttttgcagcggttttatttgtaaaagctgttgatttcgagttgtaagagctcagcatcccaggggcatcttcttgactgtggcatttcctgtccaccgccggtttatatgatcttcatacctttccctggaccacaggcgtttctcggcttttagtctgaaccatagctgggctgcagtaccctacgctgccagcaggtggccatgactacccgtggtaccaatctcagtcttaaagctcaggcttttcgttcattaacattctctgatagaattctggtcatcagatgtactgcaatggaacaaaactcatctggctgcatcccaggtgtgtagcaaagtccacatgtaaatttatagcttagaatattcttaagtcactgtcccttgtctctctttgaagttataaacaacaaacttaaagcttagcttatgtccaaggtaagtattttagcatggctgtcaaggaaattcagagtaaagtcagtgtgattcacttaatgatatacattaattagaattatggggtcagaggtatttgcttaagtgatcataattgtaaagtatatgtcacattgtcacattaatgtcacactgtttcaaaagttaaaaaaaaaaaaaaaaaa

SEQ ID NO: 4124 - DNA, 5643 bp, Homo sapiens
  source 1..5643: mol_type = genomic DNA
gagagcgccgagacgcgcggggcgcggagatgtgcaagtggcgaagcttgaccgagagcaggctggagcagccgcccaactcctggcgcgggatctgctgaggggtcacgattttaggtgatgggcaagtcagaaagtcagatggatataactgatatcaacactccaaagccaaagaagaaacagcgatggactccactggagatcagcctctcggtccttgtcctgctcctcaccatcatagctgtgacaatgatcgcactctatgcaacctacgatgatggtatttgcaagtcatcagactgcataaaatcagctgctcgactgatccaaaacatggatgccaccactgagccttgtacagactttttcaaatatgcttgcggaggctggttgaaacgtaatgtcattcccgagaccagctcccgttacggcaactttgacattttaagagatgaactagaagtcgttttgaaagatgtccttcaagaacccaaaactgaagatatagtagcagtgcagaaagcaaaagcattgtacaggtcttgtataaatgaatctgctattgatagcagaggtggagaacctctactcaaactgttaccagacatatatgggtggccagtagcaacagaaaactgggagcaaaaatatggtgcttcttggacagctgaaaaagctattgcacaactgaattctaaatatgggaaaaaagtccttattaatttgtttgttggcactgatgataagaattctgtgaatcatgtaattcatattgaccaacctcgacttggcctcccttctagagattactatgaatgcactggaatctataaagaggcttgtacagcatatgtggattttatgatttctgtggccagattgattcgtcaggaagaaagattgcccatcgatgaaaaccagcttgctttggaaatgaataaagttatggaattggaaaaagaaattgccaatgctacggctaaacctgaagatcgaaatgatccaatgcttctgtataacaagatgacattggcccagatccaaaataacttttcactagagatcaatgggaagccattcagctggttgaatttcacaaatgaaatcatgtcaactgtgaatattagtattacaaatgaggaagatgtggttgtttatgctccagaatatttaaccaaacttaagcccattcttaccaaatattctgccagagatcttcaaaatttaatgtcctggagattcataatggatcttgtaagcagcctcagccgaacctacaaggagtccagaaatgctttccgcaaggccctttatggtacaacctcagaaacagcaacttggagacgttgtgcaaactatgtcaatgggaatatggaaaatgctgtggggaggctttatgtggaagcagcatttgctggagagagtaaacatgtggtcgaggatttgattgcacagatccgagaagtttttattcagactttagatgacctcacttggatggatgccgagacaaaaaagagagctgaagaaaaggccttagcaattaaagaaaggatcggctatcctgatgacattgtttcaaatgataacaaactgaataatgagtacctcgagttgaactacaaagaagatgaatacttcgagaacataattcaaaatttgaaattcagccaaagtaaacaactgaagaagctccgagaaaaggtggacaaagatgagtggataagtggagcagctgtagtcaatgcattttactcttcaggaagaaatcagatagtcttcccagccggcattctgcagccccccttctttagtgcccagcagtccaactcattgaactatgggggcatcggcatggtcataggacacgaaatcacccatggcttcgatgacaatggcagaaactttaacaaagatggagacctcgttgactggtggactcaacagtctgcaagtaactttaaggagcaatcccagtgcatggtgtatcagtatggaaacttttcctgggacctggcaggtggacagcaccttaatggaattaatacactgggagaaaacattgctgataatggaggtcttggtcaagcatacagagcctatcagaattatattaaaaagaatggcgaagaaaaattacttcctggacttgacctaaatcacaaacaactatttttcttgaactttgcacaggtgtggtgtggaacctataggccagagtatgcggttaactccattaaaacagatgtgcacagtccaggcaatttcaggattattgggactttgcagaactctgcagagttttcagaagcctttcactgccgcaagaattcatacatgaatccagaaaagaagtgccgggtttggtgatcttcaaaagaagcattgcagcccttggctagacttgccaacaccacagaaatggggaattctctaatcgaaagaaaatgggccctaggggtcactgtactgacttgagggtgattaacagagagggcaccatcacaatacagataacattaggttgtcctagaaagggtgtggagggaggaagggggtctaaggtctatcaagtcaatcatttctcactgtgtacataatgcttaatttctaaagataatattactgtttatttctgtttctcatatggtctaccagtttgctgatgtccctagaaaacaatgcaaaacctttgaggtagaccaggatttctaatcaaaagggaaaagaagatgttgaagaatacagttaggcaccagaagaacagtaggtgacactatagtttaaaacacattgcctaactactagtttttacttttatttgcaacatttacagtccttcaaaatccttccaaagaattcttatacacattggggccttggagcttacatagttttaaactcatttttgccatacatcagttattcattctgtgatcatttattttaagcactcttaaagcaaaaaatgaatgtctaaaattgttttttgttgtacctgctttgactgatgctgagattcttcaggcttcctgcaattttctaagcaatttcttgctctatctctcaaaacttggtatttttcagagatttatataaatgtaaaaataataatttttatatttaattattaactacatttatgagtaactattattataggtaatcaatgaatattgaagtttcagcttaaaataaacagttgtgaaccaagatctataaagcgatatacagatgaaaatttgagactatttaaacttataaatcatattgatgaaaagatttaagcacaaactttagggtaaaaattgccattggacagttgtctagagatatatatacttgtggttttcaaattggactttcaaaattaaatctgtccctgagagtgtctctgataaaagggcaaatctgcacctatgtagctctgcatctcctgtcttttcaggtttgtcatcagatggaaatattttgataataaattgaaattgtgaactcattgctccctaagactgtgacaactgtctaactttagaagtgcatttctgaatagaaatgggaggcctctgatggaccttctagaattataagtcacaaagagttctggaaaagaactgtttactgcttgataggaattcatcttttgaggcttctgttcctctcttttcctgttgtattgactattttcgttcattacttgattaagattttacaaaagaggagcacttccaaaattcttatttttcctaacaaaagatgaaagcagggaatttctatctaaatgatgagtattagttccctgtctcttgaaaaatgcccatttgcctttaaaaaaaaaagttacagaaatactataacatatgtacataaattgcataaagcataagtatacagttcaataaacttaactttaactgaacaatggccctgtagccagcacctgtaagaaacagagcagtaccagcgctctaaaagcacctccttgtcactttattactcccagaacaacaactatcctgacttctaatatcattcactagctttgcctggttttgtcttttatgcagatagaatcaatcagtatgtattcttttgtgcctggcttctttctctcagccttacatttgtgagattcctctgtattgtgctgattgtggatcttttcattctcattgcagaataatgttctattgtgggacttattacaatttgttcatcctattgttgatgggcacttgagaactttccattttggcgctattacaaatagtgcaactatgaatgtactgcatgttaccatcttacttgagcctttaatggacttatttcttcaaatccttccaaaaattattataagcattgaaattatagtttcaagccaactgtggatacccttaccctttcctcctttatcacaaccaccgttacaagtatacttatatttccctaaaatacatttaaaacttacctaagtgacatttgtagttggagtaataggagcttccagctctaataaaacagctgtctctaacttattttatttccatcatgtcagagcaggtgaagagccagaagtgaagagtgactagtacaaattataaaaagccactagactcttcactgttagctttttaaaacattaggctcccatccctatggaggaacaactctccagtgcctggatcccctctgtctacaaatataagattttctgggcctaaaggatagatcaaagtcaaaaatagcaatgcctccctatccctcacacatccagacatcatgaattttacatggtactcttgttgagttctgtagagccttctgatgtctctaaagcactaccgattctttggagttgtcacatcagataagacatatctctaattccatccataaatccagttctactatggctgagttctggtcaaagaaagaaagtttagaagctgagacacaaagggttgggagctgatgaaactcacaaatgatggtaggaagaagctctcgacaatacccgttggcaaggagtctgcctccatgctgcagtgttcgagtggattgtaggtgcaagatggaaaggattgtaggtgcaagctgtccagagaaaagagtccttgttccagccctattctgccactcctgacagggtgaccttgggtatttgcaatattcctttgggcctctgcttctctcacctaaaaaaagagaattagattatattggtggttctcagcaagagaaggagtatgtgtccaatgctgccttcccatgaatctgtctcccagttatgaatcagtgggcaggataaactgaaaactcccatttacgtgtctgaatcgagtgagacaaaattttagtccaaataacaagtaccaaagttttatcaagtttgggtctgtgctgctgttactgttaaccatttaagtggggcaaaaccttgctaattttctcaaaagcatttatcattcttgttgccacagctggagctctcaaactaaaagacatttgttattttggaaagaagaaagactctattctcaaagtttcctaatcagaaatttttatcagtttccagtctcaaaaatacaaaataaaaacaaacgtttttaatactattgcttttatgcctagtcaactctg

SEQ ID NO: 4125 - DNA, 5710 bp, Homo sapiens
  source 1..5710: mol_type = genomic DNA
cgtcaggttggctcttcaggttcatttccatagttccctgcggcctctgccttggggagttatgttttgttaccgagatccgcgctaccagattgcaccggggctgatttgggggctgggaatttgccattctgctgtacagacactgatttttttttcttctttttaaaaagcaagattttaggtgatgggcaagtcagaaagtcagatggatataactgatatcaacactccaaagccaaagaagaaacagcgatggactccactggagatcagcctctcggtccttgtcctgctcctcaccatcatagctgtgacaatgatcgcactctatgcaacctacgatgatggtatttgcaagtcatcagactgcataaaatcagctgctcgactgatccaaaacatggatgccaccactgagccttgtacagactttttcaaatatgcttgcggaggctggttgaaacgtaatgtcattcccgagaccagctcccgttacggcaactttgacattttaagagatgaactagaagtcgttttgaaagatgtccttcaagaacccaaaactgaagatatagtagcagtgcagaaagcaaaagcattgtacaggtcttgtataaatgaatctgctattgatagcagaggtggagaacctctactcaaactgttaccagacatatatgggtggccagtagcaacagaaaactgggagcaaaaatatggtgcttcttggacagctgaaaaagctattgcacaactgaattctaaatatgggaaaaaagtccttattaatttgtttgttggcactgatgataagaattctgtgaatcatgtaattcatattgaccaacctcgacttggcctcccttctagagattactatgaatgcactggaatctataaagaggcttgtacagcatatgtggattttatgatttctgtggccagattgattcgtcaggaagaaagattgcccatcgatgaaaaccagcttgctttggaaatgaataaagttatggaattggaaaaagaaattgccaatgctacggctaaacctgaagatcgaaatgatccaatgcttctgtataacaagatgacattggcccagatccaaaataacttttcactagagatcaatgggaagccattcagctggttgaatttcacaaatgaaatcatgtcaactgtgaatattagtattacaaatgaggaagatgtggttgtttatgctccagaatatttaaccaaacttaagcccattcttaccaaatattctgccagagatcttcaaaatttaatgtcctggagattcataatggatcttgtaagcagcctcagccgaacctacaaggagtccagaaatgctttccgcaaggccctttatggtacaacctcagaaacagcaacttggagacgttgtgcaaactatgtcaatgggaatatggaaaatgctgtggggaggctttatgtggaagcagcatttgctggagagagtaaacatgtggtcgaggatttgattgcacagatccgagaagtttttattcagactttagatgacctcacttggatggatgccgagacaaaaaagagagctgaagaaaaggccttagcaattaaagaaaggatcggctatcctgatgacattgtttcaaatgataacaaactgaataatgagtacctcgagttgaactacaaagaagatgaatacttcgagaacataattcaaaatttgaaattcagccaaagtaaacaactgaagaagctccgagaaaaggtggacaaagatgagtggataagtggagcagctgtagtcaatgcattttactcttcaggaagaaatcagatagtcttcccagccggcattctgcagccccccttctttagtgcccagcagtccaactcattgaactatgggggcatcggcatggtcataggacacgaaatcacccatggcttcgatgacaatggcagaaactttaacaaagatggagacctcgttgactggtggactcaacagtctgcaagtaactttaaggagcaatcccagtgcatggtgtatcagtatggaaacttttcctgggacctggcaggtggacagcaccttaatggaattaatacactgggagaaaacattgctgataatggaggtcttggtcaagcatacagagcctatcagaattatattaaaaagaatggcgaagaaaaattacttcctggacttgacctaaatcacaaacaactatttttcttgaactttgcacaggtgtggtgtggaacctataggccagagtatgcggttaactccattaaaacagatgtgcacagtccaggcaatttcaggattattgggactttgcagaactctgcagagttttcagaagcctttcactgccgcaagaattcatacatgaatccagaaaagaagtgccgggtttggtgatcttcaaaagaagcattgcagcccttggctagacttgccaacaccacagaaatggggaattctctaatcgaaagaaaatgggccctaggggtcactgtactgacttgagggtgattaacagagagggcaccatcacaatacagataacattaggttgtcctagaaagggtgtggagggaggaagggggtctaaggtctatcaagtcaatcatttctcactgtgtacataatgcttaatttctaaagataatattactgtttatttctgtttctcatatggtctaccagtttgctgatgtccctagaaaacaatgcaaaacctttgaggtagaccaggatttctaatcaaaagggaaaagaagatgttgaagaatacagttaggcaccagaagaacagtaggtgacactatagtttaaaacacattgcctaactactagtttttacttttatttgcaacatttacagtccttcaaaatccttccaaagaattcttatacacattggggccttggagcttacatagttttaaactcatttttgccatacatcagttattcattctgtgatcatttattttaagcactcttaaagcaaaaaatgaatgtctaaaattgttttttgttgtacctgctttgactgatgctgagattcttcaggcttcctgcaattttctaagcaatttcttgctctatctctcaaaacttggtatttttcagagatttatataaatgtaaaaataataatttttatatttaattattaactacatttatgagtaactattattataggtaatcaatgaatattgaagtttcagcttaaaataaacagttgtgaaccaagatctataaagcgatatacagatgaaaatttgagactatttaaacttataaatcatattgatgaaaagatttaagcacaaactttagggtaaaaattgccattggacagttgtctagagatatatatacttgtggttttcaaattggactttcaaaattaaatctgtccctgagagtgtctctgataaaagggcaaatctgcacctatgtagctctgcatctcctgtcttttcaggtttgtcatcagatggaaatattttgataataaattgaaattgtgaactcattgctccctaagactgtgacaactgtctaactttagaagtgcatttctgaatagaaatgggaggcctctgatggaccttctagaattataagtcacaaagagttctggaaaagaactgtttactgcttgataggaattcatcttttgaggcttctgttcctctcttttcctgttgtattgactattttcgttcattacttgattaagattttacaaaagaggagcacttccaaaattcttatttttcctaacaaaagatgaaagcagggaatttctatctaaatgatgagtattagttccctgtctcttgaaaaatgcccatttgcctttaaaaaaaaaagttacagaaatactataacatatgtacataaattgcataaagcataagtatacagttcaataaacttaactttaactgaacaatggccctgtagccagcacctgtaagaaacagagcagtaccagcgctctaaaagcacctccttgtcactttattactcccagaacaacaactatcctgacttctaatatcattcactagctttgcctggttttgtcttttatgcagatagaatcaatcagtatgtattcttttgtgcctggcttctttctctcagccttacatttgtgagattcctctgtattgtgctgattgtggatcttttcattctcattgcagaataatgttctattgtgggacttattacaatttgttcatcctattgttgatgggcacttgagaactttccattttggcgctattacaaatagtgcaactatgaatgtactgcatgttaccatcttacttgagcctttaatggacttatttcttcaaatccttccaaaaattattataagcattgaaattatagtttcaagccaactgtggatacccttaccctttcctcctttatcacaaccaccgttacaagtatacttatatttccctaaaatacatttaaaacttacctaagtgacatttgtagttggagtaataggagcttccagctctaataaaacagctgtctctaacttattttatttccatcatgtcagagcaggtgaagagccagaagtgaagagtgactagtacaaattataaaaagccactagactcttcactgttagctttttaaaacattaggctcccatccctatggaggaacaactctccagtgcctggatcccctctgtctacaaatataagattttctgggcctaaaggatagatcaaagtcaaaaatagcaatgcctccctatccctcacacatccagacatcatgaattttacatggtactcttgttgagttctgtagagccttctgatgtctctaaagcactaccgattctttggagttgtcacatcagataagacatatctctaattccatccataaatccagttctactatggctgagttctggtcaaagaaagaaagtttagaagctgagacacaaagggttgggagctgatgaaactcacaaatgatggtaggaagaagctctcgacaatacccgttggcaaggagtctgcctccatgctgcagtgttcgagtggattgtaggtgcaagatggaaaggattgtaggtgcaagctgtccagagaaaagagtccttgttccagccctattctgccactcctgacagggtgaccttgggtatttgcaatattcctttgggcctctgcttctctcacctaaaaaaagagaattagattatattggtggttctcagcaagagaaggagtatgtgtccaatgctgccttcccatgaatctgtctcccagttatgaatcagtgggcaggataaactgaaaactcccatttacgtgtctgaatcgagtgagacaaaattttagtccaaataacaagtaccaaagttttatcaagtttgggtctgtgctgctgttactgttaaccatttaagtggggcaaaaccttgctaattttctcaaaagcatttatcattcttgttgccacagctggagctctcaaactaaaagacatttgttattttggaaagaagaaagactctattctcaaagtttcctaatcagaaatttttatcagtttccagtctcaaaaatacaaaataaaaacaaacgtttttaatactattgcttttatgcctagtcaactctg

SEQ ID NO: 4126 - DNA, 5619 bp, Homo sapiens
  source 1..5619: mol_type = genomic DNA
cagcccgccactgccacccggccccgtgcgctcattggtcgggatgtgtcggctcagcagcctccaacttctcccgaatcccactgattttaggtgatgggcaagtcagaaagtcagatggatataactgatatcaacactccaaagccaaagaagaaacagcgatggactccactggagatcagcctctcggtccttgtcctgctcctcaccatcatagctgtgacaatgatcgcactctatgcaacctacgatgatggtatttgcaagtcatcagactgcataaaatcagctgctcgactgatccaaaacatggatgccaccactgagccttgtacagactttttcaaatatgcttgcggaggctggttgaaacgtaatgtcattcccgagaccagctcccgttacggcaactttgacattttaagagatgaactagaagtcgttttgaaagatgtccttcaagaacccaaaactgaagatatagtagcagtgcagaaagcaaaagcattgtacaggtcttgtataaatgaatctgctattgatagcagaggtggagaacctctactcaaactgttaccagacatatatgggtggccagtagcaacagaaaactgggagcaaaaatatggtgcttcttggacagctgaaaaagctattgcacaactgaattctaaatatgggaaaaaagtccttattaatttgtttgttggcactgatgataagaattctgtgaatcatgtaattcatattgaccaacctcgacttggcctcccttctagagattactatgaatgcactggaatctataaagaggcttgtacagcatatgtggattttatgatttctgtggccagattgattcgtcaggaagaaagattgcccatcgatgaaaaccagcttgctttggaaatgaataaagttatggaattggaaaaagaaattgccaatgctacggctaaacctgaagatcgaaatgatccaatgcttctgtataacaagatgacattggcccagatccaaaataacttttcactagagatcaatgggaagccattcagctggttgaatttcacaaatgaaatcatgtcaactgtgaatattagtattacaaatgaggaagatgtggttgtttatgctccagaatatttaaccaaacttaagcccattcttaccaaatattctgccagagatcttcaaaatttaatgtcctggagattcataatggatcttgtaagcagcctcagccgaacctacaaggagtccagaaatgctttccgcaaggccctttatggtacaacctcagaaacagcaacttggagacgttgtgcaaactatgtcaatgggaatatggaaaatgctgtggggaggctttatgtggaagcagcatttgctggagagagtaaacatgtggtcgaggatttgattgcacagatccgagaagtttttattcagactttagatgacctcacttggatggatgccgagacaaaaaagagagctgaagaaaaggccttagcaattaaagaaaggatcggctatcctgatgacattgtttcaaatgataacaaactgaataatgagtacctcgagttgaactacaaagaagatgaatacttcgagaacataattcaaaatttgaaattcagccaaagtaaacaactgaagaagctccgagaaaaggtggacaaagatgagtggataagtggagcagctgtagtcaatgcattttactcttcaggaagaaatcagatagtcttcccagccggcattctgcagccccccttctttagtgcccagcagtccaactcattgaactatgggggcatcggcatggtcataggacacgaaatcacccatggcttcgatgacaatggcagaaactttaacaaagatggagacctcgttgactggtggactcaacagtctgcaagtaactttaaggagcaatcccagtgcatggtgtatcagtatggaaacttttcctgggacctggcaggtggacagcaccttaatggaattaatacactgggagaaaacattgctgataatggaggtcttggtcaagcatacagagcctatcagaattatattaaaaagaatggcgaagaaaaattacttcctggacttgacctaaatcacaaacaactatttttcttgaactttgcacaggtgtggtgtggaacctataggccagagtatgcggttaactccattaaaacagatgtgcacagtccaggcaatttcaggattattgggactttgcagaactctgcagagttttcagaagcctttcactgccgcaagaattcatacatgaatccagaaaagaagtgccgggtttggtgatcttcaaaagaagcattgcagcccttggctagacttgccaacaccacagaaatggggaattctctaatcgaaagaaaatgggccctaggggtcactgtactgacttgagggtgattaacagagagggcaccatcacaatacagataacattaggttgtcctagaaagggtgtggagggaggaagggggtctaaggtctatcaagtcaatcatttctcactgtgtacataatgcttaatttctaaagataatattactgtttatttctgtttctcatatggtctaccagtttgctgatgtccctagaaaacaatgcaaaacctttgaggtagaccaggatttctaatcaaaagggaaaagaagatgttgaagaatacagttaggcaccagaagaacagtaggtgacactatagtttaaaacacattgcctaactactagtttttacttttatttgcaacatttacagtccttcaaaatccttccaaagaattcttatacacattggggccttggagcttacatagttttaaactcatttttgccatacatcagttattcattctgtgatcatttattttaagcactcttaaagcaaaaaatgaatgtctaaaattgttttttgttgtacctgctttgactgatgctgagattcttcaggcttcctgcaattttctaagcaatttcttgctctatctctcaaaacttggtatttttcagagatttatataaatgtaaaaataataatttttatatttaattattaactacatttatgagtaactattattataggtaatcaatgaatattgaagtttcagcttaaaataaacagttgtgaaccaagatctataaagcgatatacagatgaaaatttgagactatttaaacttataaatcatattgatgaaaagatttaagcacaaactttagggtaaaaattgccattggacagttgtctagagatatatatacttgtggttttcaaattggactttcaaaattaaatctgtccctgagagtgtctctgataaaagggcaaatctgcacctatgtagctctgcatctcctgtcttttcaggtttgtcatcagatggaaatattttgataataaattgaaattgtgaactcattgctccctaagactgtgacaactgtctaactttagaagtgcatttctgaatagaaatgggaggcctctgatggaccttctagaattataagtcacaaagagttctggaaaagaactgtttactgcttgataggaattcatcttttgaggcttctgttcctctcttttcctgttgtattgactattttcgttcattacttgattaagattttacaaaagaggagcacttccaaaattcttatttttcctaacaaaagatgaaagcagggaatttctatctaaatgatgagtattagttccctgtctcttgaaaaatgcccatttgcctttaaaaaaaaaagttacagaaatactataacatatgtacataaattgcataaagcataagtatacagttcaataaacttaactttaactgaacaatggccctgtagccagcacctgtaagaaacagagcagtaccagcgctctaaaagcacctccttgtcactttattactcccagaacaacaactatcctgacttctaatatcattcactagctttgcctggttttgtcttttatgcagatagaatcaatcagtatgtattcttttgtgcctggcttctttctctcagccttacatttgtgagattcctctgtattgtgctgattgtggatcttttcattctcattgcagaataatgttctattgtgggacttattacaatttgttcatcctattgttgatgggcacttgagaactttccattttggcgctattacaaatagtgcaactatgaatgtactgcatgttaccatcttacttgagcctttaatggacttatttcttcaaatccttccaaaaattattataagcattgaaattatagtttcaagccaactgtggatacccttaccctttcctcctttatcacaaccaccgttacaagtatacttatatttccctaaaatacatttaaaacttacctaagtgacatttgtagttggagtaataggagcttccagctctaataaaacagctgtctctaacttattttatttccatcatgtcagagcaggtgaagagccagaagtgaagagtgactagtacaaattataaaaagccactagactcttcactgttagctttttaaaacattaggctcccatccctatggaggaacaactctccagtgcctggatcccctctgtctacaaatataagattttctgggcctaaaggatagatcaaagtcaaaaatagcaatgcctccctatccctcacacatccagacatcatgaattttacatggtactcttgttgagttctgtagagccttctgatgtctctaaagcactaccgattctttggagttgtcacatcagataagacatatctctaattccatccataaatccagttctactatggctgagttctggtcaaagaaagaaagtttagaagctgagacacaaagggttgggagctgatgaaactcacaaatgatggtaggaagaagctctcgacaatacccgttggcaaggagtctgcctccatgctgcagtgttcgagtggattgtaggtgcaagatggaaaggattgtaggtgcaagctgtccagagaaaagagtccttgttccagccctattctgccactcctgacagggtgaccttgggtatttgcaatattcctttgggcctctgcttctctcacctaaaaaaagagaattagattatattggtggttctcagcaagagaaggagtatgtgtccaatgctgccttcccatgaatctgtctcccagttatgaatcagtgggcaggataaactgaaaactcccatttacgtgtctgaatcgagtgagacaaaattttagtccaaataacaagtaccaaagttttatcaagtttgggtctgtgctgctgttactgttaaccatttaagtggggcaaaaccttgctaattttctcaaaagcatttatcattcttgttgccacagctggagctctcaaactaaaagacatttgttattttggaaagaagaaagactctattctcaaagtttcctaatcagaaatttttatcagtttccagtctcaaaaatacaaaataaaaacaaacgtttttaatactattgcttttatgcctagtcaactctg

SEQ ID NO: 4127 - DNA, 5665 bp, Homo sapiens
  source 1..5665: mol_type = genomic DNA
ccgagcgcccaggaccctgcggccgtggaggaggcgtgccctgggaaggagccgctactgggacctgaagagtgaggggagggagaggggcccagagggtgacctggaggagggctctggaagtcacgtcagattttaggtgatgggcaagtcagaaagtcagatggatataactgatatcaacactccaaagccaaagaagaaacagcgatggactccactggagatcagcctctcggtccttgtcctgctcctcaccatcatagctgtgacaatgatcgcactctatgcaacctacgatgatggtatttgcaagtcatcagactgcataaaatcagctgctcgactgatccaaaacatggatgccaccactgagccttgtacagactttttcaaatatgcttgcggaggctggttgaaacgtaatgtcattcccgagaccagctcccgttacggcaactttgacattttaagagatgaactagaagtcgttttgaaagatgtccttcaagaacccaaaactgaagatatagtagcagtgcagaaagcaaaagcattgtacaggtcttgtataaatgaatctgctattgatagcagaggtggagaacctctactcaaactgttaccagacatatatgggtggccagtagcaacagaaaactgggagcaaaaatatggtgcttcttggacagctgaaaaagctattgcacaactgaattctaaatatgggaaaaaagtccttattaatttgtttgttggcactgatgataagaattctgtgaatcatgtaattcatattgaccaacctcgacttggcctcccttctagagattactatgaatgcactggaatctataaagaggcttgtacagcatatgtggattttatgatttctgtggccagattgattcgtcaggaagaaagattgcccatcgatgaaaaccagcttgctttggaaatgaataaagttatggaattggaaaaagaaattgccaatgctacggctaaacctgaagatcgaaatgatccaatgcttctgtataacaagatgacattggcccagatccaaaataacttttcactagagatcaatgggaagccattcagctggttgaatttcacaaatgaaatcatgtcaactgtgaatattagtattacaaatgaggaagatgtggttgtttatgctccagaatatttaaccaaacttaagcccattcttaccaaatattctgccagagatcttcaaaatttaatgtcctggagattcataatggatcttgtaagcagcctcagccgaacctacaaggagtccagaaatgctttccgcaaggccctttatggtacaacctcagaaacagcaacttggagacgttgtgcaaactatgtcaatgggaatatggaaaatgctgtggggaggctttatgtggaagcagcatttgctggagagagtaaacatgtggtcgaggatttgattgcacagatccgagaagtttttattcagactttagatgacctcacttggatggatgccgagacaaaaaagagagctgaagaaaaggccttagcaattaaagaaaggatcggctatcctgatgacattgtttcaaatgataacaaactgaataatgagtacctcgagttgaactacaaagaagatgaatacttcgagaacataattcaaaatttgaaattcagccaaagtaaacaactgaagaagctccgagaaaaggtggacaaagatgagtggataagtggagcagctgtagtcaatgcattttactcttcaggaagaaatcagatagtcttcccagccggcattctgcagccccccttctttagtgcccagcagtccaactcattgaactatgggggcatcggcatggtcataggacacgaaatcacccatggcttcgatgacaatggcagaaactttaacaaagatggagacctcgttgactggtggactcaacagtctgcaagtaactttaaggagcaatcccagtgcatggtgtatcagtatggaaacttttcctgggacctggcaggtggacagcaccttaatggaattaatacactgggagaaaacattgctgataatggaggtcttggtcaagcatacagagcctatcagaattatattaaaaagaatggcgaagaaaaattacttcctggacttgacctaaatcacaaacaactatttttcttgaactttgcacaggtgtggtgtggaacctataggccagagtatgcggttaactccattaaaacagatgtgcacagtccaggcaatttcaggattattgggactttgcagaactctgcagagttttcagaagcctttcactgccgcaagaattcatacatgaatccagaaaagaagtgccgggtttggtgatcttcaaaagaagcattgcagcccttggctagacttgccaacaccacagaaatggggaattctctaatcgaaagaaaatgggccctaggggtcactgtactgacttgagggtgattaacagagagggcaccatcacaatacagataacattaggttgtcctagaaagggtgtggagggaggaagggggtctaaggtctatcaagtcaatcatttctcactgtgtacataatgcttaatttctaaagataatattactgtttatttctgtttctcatatggtctaccagtttgctgatgtccctagaaaacaatgcaaaacctttgaggtagaccaggatttctaatcaaaagggaaaagaagatgttgaagaatacagttaggcaccagaagaacagtaggtgacactatagtttaaaacacattgcctaactactagtttttacttttatttgcaacatttacagtccttcaaaatccttccaaagaattcttatacacattggggccttggagcttacatagttttaaactcatttttgccatacatcagttattcattctgtgatcatttattttaagcactcttaaagcaaaaaatgaatgtctaaaattgttttttgttgtacctgctttgactgatgctgagattcttcaggcttcctgcaattttctaagcaatttcttgctctatctctcaaaacttggtatttttcagagatttatataaatgtaaaaataataatttttatatttaattattaactacatttatgagtaactattattataggtaatcaatgaatattgaagtttcagcttaaaataaacagttgtgaaccaagatctataaagcgatatacagatgaaaatttgagactatttaaacttataaatcatattgatgaaaagatttaagcacaaactttagggtaaaaattgccattggacagttgtctagagatatatatacttgtggttttcaaattggactttcaaaattaaatctgtccctgagagtgtctctgataaaagggcaaatctgcacctatgtagctctgcatctcctgtcttttcaggtttgtcatcagatggaaatattttgataataaattgaaattgtgaactcattgctccctaagactgtgacaactgtctaactttagaagtgcatttctgaatagaaatgggaggcctctgatggaccttctagaattataagtcacaaagagttctggaaaagaactgtttactgcttgataggaattcatcttttgaggcttctgttcctctcttttcctgttgtattgactattttcgttcattacttgattaagattttacaaaagaggagcacttccaaaattcttatttttcctaacaaaagatgaaagcagggaatttctatctaaatgatgagtattagttccctgtctcttgaaaaatgcccatttgcctttaaaaaaaaaagttacagaaatactataacatatgtacataaattgcataaagcataagtatacagttcaataaacttaactttaactgaacaatggccctgtagccagcacctgtaagaaacagagcagtaccagcgctctaaaagcacctccttgtcactttattactcccagaacaacaactatcctgacttctaatatcattcactagctttgcctggttttgtcttttatgcagatagaatcaatcagtatgtattcttttgtgcctggcttctttctctcagccttacatttgtgagattcctctgtattgtgctgattgtggatcttttcattctcattgcagaataatgttctattgtgggacttattacaatttgttcatcctattgttgatgggcacttgagaactttccattttggcgctattacaaatagtgcaactatgaatgtactgcatgttaccatcttacttgagcctttaatggacttatttcttcaaatccttccaaaaattattataagcattgaaattatagtttcaagccaactgtggatacccttaccctttcctcctttatcacaaccaccgttacaagtatacttatatttccctaaaatacatttaaaacttacctaagtgacatttgtagttggagtaataggagcttccagctctaataaaacagctgtctctaacttattttatttccatcatgtcagagcaggtgaagagccagaagtgaagagtgactagtacaaattataaaaagccactagactcttcactgttagctttttaaaacattaggctcccatccctatggaggaacaactctccagtgcctggatcccctctgtctacaaatataagattttctgggcctaaaggatagatcaaagtcaaaaatagcaatgcctccctatccctcacacatccagacatcatgaattttacatggtactcttgttgagttctgtagagccttctgatgtctctaaagcactaccgattctttggagttgtcacatcagataagacatatctctaattccatccataaatccagttctactatggctgagttctggtcaaagaaagaaagtttagaagctgagacacaaagggttgggagctgatgaaactcacaaatgatggtaggaagaagctctcgacaatacccgttggcaaggagtctgcctccatgctgcagtgttcgagtggattgtaggtgcaagatggaaaggattgtaggtgcaagctgtccagagaaaagagtccttgttccagccctattctgccactcctgacagggtgaccttgggtatttgcaatattcctttgggcctctgcttctctcacctaaaaaaagagaattagattatattggtggttctcagcaagagaaggagtatgtgtccaatgctgccttcccatgaatctgtctcccagttatgaatcagtgggcaggataaactgaaaactcccatttacgtgtctgaatcgagtgagacaaaattttagtccaaataacaagtaccaaagttttatcaagtttgggtctgtgctgctgttactgttaaccatttaagtggggcaaaaccttgctaattttctcaaaagcatttatcattcttgttgccacagctggagctctcaaactaaaagacatttgttattttggaaagaagaaagactctattctcaaagtttcctaatcagaaatttttatcagtttccagtctcaaaaatacaaaataaaaacaaacgtttttaatactattgcttttatgcctagtcaactctg

SEQ ID NO: 4128 - DNA, 3011 bp, Homo sapiens
  source 1..3011: mol_type = genomic DNA
taaactagtgccggacagacgaaggcctagcacatgggctacggagccctagtagattccagtccccacactgagccaggaggggtcgctgcccagggatacctacagccatactcgagctggacaaggcgcacgctctttgtggaagcaaacacgtccaccaccgcgtagaggggctgcgcagctggcagtccccgggcgctcgggcccatgtcctcgccgttgatgatgatgtgcatgtcggccgtgccatcggggcgcgggcaaaagaggacacccaggcggctacggcgcgcggtcggaggcagcacgttcagctcatagagctggtccaagagatggctgtagagccctggccggctgcggcccaccaggcggtcccggggaatgcgaaactgctcaatgcgcagatatggttccacgaggagggttggaggtcggctgggggccgctgcctccgcctccgggcggccctcccggggcacgcggttgtggtggcgcgtgatggcgaagacccaggtgtggcccaggttgaccagatcgggcagagaaaactcgggaacgggggccagactggcggggtccagcgcggtcagaccgagacgcagatgtccgcaccagcccagctctttctcctcgatctcgaccaggaagacctggcccggggccagcggctcgcggctgaagcacacgccgtgggcgaagctctccacgcgtgtggcccgcgtcccagaggggtccacgcggatgttggcaccgtgcacccgatggaagcgggtgggagggggctccgggcgctcgagtccccagagtgcacccgaatccacgggctcggaggcagcagccatctctcggccatagggcaggccagctggcgccgggggctattttgggcggcgggcaatgatggtgaccgcaaggcgaccttgtaaggcatttcccccctgactcccttccccgagcctctgcccgggggtcctagcgccgctttctcagccatcccgcctacaacttagccgtccacaacaggatcatctgatcgcgtgcgcccgggctacgatctgcgaggcccgcggaccttgacccggcattgaccgccaccgccccccaggtccgtagggaccaaagaaggggcgggaggaagactgtcacgtggcgccggagttcacgtgactcgtacacatgacttccagtccccgggcgcctcctggagagcaaggacgcgggggagcagagatgatccgagccgcgccgccgccgctgttcctgctgctgctgctgctgctgctgctagtgtcctgggcgtcccgaggcgaggcagcccccgaccaggacgagatccagcgcctccccgggctggccaagcagccgtctttccgccagtactccggctacctcaaaggctccggctccaagcacctccactactggtttgtggagtcccagaaggatcccgagaacagccctgtggtgctttggctcaatgggggtcccggctgcagctcactagatgggctcctcacagagcatggccccttcctgattgccaatgtgttatacctggagtccccagctggggtgggcttctcctactccgatgacaagttttatgcaactaatgacactgaggtcgcccagagcaattttgaggcccttcaagatttcttccgcctctttccggagtacaagaacaacaaacttttcctgaccggggagagctatgctggcatctacatccccaccctggccgtgctggtcatgcaggatcccagcatgaaccttcaggggctggctgtgggcaatggactctcctcctatgagcagaatgacaactccctggtctactttgcctactaccatggccttctggggaacaggctttggtcttctctccagacccactgctgctctcaaaacaagtgtaacttctatgacaacaaagacctggaatgcgtgaccaatcttcaggaagtggcccgcatcgtgggcaactctggcctcaacatctacaatctctatgccccgtgtgctggaggggtgcccagccattttaggtatgagaaggacactgttgtggtccaggatttgggcaacatcttcactcgcctgccactcaagcggatgtggcatcaggcactgctgcgctcaggggataaagtgcgcatggaccccccctgcaccaacacaacagctgcttccacctacctcaacaacccgtacgtgcggaaggccctcaacatcccggagcagctgccacaatgggacatgtgcaactttctggtaaacttacagtaccgccgtctctaccgaagcatgaactcccagtatctgaagctgcttagctcacagaaataccagatcctattatataatggagatgtagacatggcctgcaatttcatgggggatgagtggtttgtggattccctcaaccagaagatggaggtgcagcgccggccctggttagtgaagtacggggacagcggggagcagattgccggcttcgtgaaggagttctcccacatcgcctttctcacgatcaagggcgccggccacatggttcccaccgacaagcccctcgctgccttcaccatgttctcccgcttcctgaacaagcagccatactgatgaccacagcaaccagctccacggcctgatgcagcccctcccagcctctcccgctaggagagtcctcttctaagcaaagtgcccctgcaggccgggttctgccgccaggactgcccccttcccagagccctgtacatcccagactgggcccagggtctcccatagacagcctgggggcaagttagcactttattcccgcagcagttcctgaatggggtggcctggccccttctctgcttaaagaatgccctttatgatgcactgattccatcccaggaacccaacagagctcaggacagcccacagggaggtggtggacggactgtaattgatagattgattatggaattaaattgggtacagcttcaaaaaaaaaaaaaaaa

SEQ ID NO: 4129 - DNA, 3062 bp, Homo sapiens
  source 1..3062: mol_type = genomic DNA
taaactagtgccggacagacgaaggcctagcacatgggctacggagccctagtagattccagtccccacactgagccaggaggggtcgctgcccagggatacctacagccatactcgagctggacaaggcgcacgctctttgtggaagcaaacacgtccaccaccgcgtagaggggctgcgcagctggcagtccccgggcgctcgggcccatgtcctcgccgttgatgatgatgtgcatgtcggccgtgccatcggggcgcgggcaaaagaggacacccaggcggctacggcgcgcggtcggaggcagcacgttcagctcatagagctggtccaagagatggctgtagagccctggccggctgcggcccaccaggcggtcccggggaatgcgaaactgctcaatgcgcagatatggttccacgaggagggttggaggtcggctgggggccgctgcctccgcctccgggcggccctcccggggcacgcggttgtggtggcgcgtgatggcgaagacccaggtgtggcccaggttgaccagatcgggcagagaaaactcgggaacgggggccagactggcggggtccagcgcggtcagaccgagacgcagatgtccgcaccagcccagctctttctcctcgatctcgaccaggaagacctggcccggggccagcggctcgcggctgaagcacacgccgtgggcgaagctctccacgcgtgtggcccgcgtcccagaggggtccacgcggatgttggcaccgtgcacccgatggaagcgggtgggagggggctccgggcgctcgagtccccagagtgcacccgaatccacgggctcggaggcagcagccatctctcggccatagggcaggccagctggcgccgggggctattttgggcggcgggcaatgatggtgaccgcaaggcgaccttgtaaggcatttcccccctgactcccttccccgagcctctgcccgggggtcctagcgccgctttctcagccatcccgcctacaacttagccgtccacaacaggatcatctgatcgcgtgcgcccgggctacgatctgcgaggcccgcggaccttgacccggcattgaccgccaccgccccccaggtccgtagggaccaaagaaggggcgggaggaagactgtcacgtggcgccggagttcacgtgactcgtacacatgacttccagtccccgggcgcctcctggagagcaaggacgcgggggagcagagatgatccgagccgcgccgccgccgctgttcctgctgctgctgctgctgctgctgctagtgtcctgggcgtcccgaggcgaggcagcccccgaccaggacgagatccagcgcctccccgggctggccaagcagccgtctttccgccagtactccggctacctcaaaggctccggctccaagcacctccactactggtttgtggagtcccagaaggatcccgagaacagccctgtggtgctttggctcaatgggggtcccggctgcagctcactagatgggctcctcacagagcatggccccttcctggtccagccagatggtgtcaccctggagtacaacccctattcttggaatctgattgccaatgtgttatacctggagtccccagctggggtgggcttctcctactccgatgacaagttttatgcaactaatgacactgaggtcgcccagagcaattttgaggcccttcaagatttcttccgcctctttccggagtacaagaacaacaaacttttcctgaccggggagagctatgctggcatctacatccccaccctggccgtgctggtcatgcaggatcccagcatgaaccttcaggggctggctgtgggcaatggactctcctcctatgagcagaatgacaactccctggtctactttgcctactaccatggccttctggggaacaggctttggtcttctctccagacccactgctgctctcaaaacaagtgtaacttctatgacaacaaagacctggaatgcgtgaccaatcttcaggaagtggcccgcatcgtgggcaactctggcctcaacatctacaatctctatgccccgtgtgctggaggggtgcccagccattttaggtatgagaaggacactgttgtggtccaggatttgggcaacatcttcactcgcctgccactcaagcggatgtggcatcaggcactgctgcgctcaggggataaagtgcgcatggaccccccctgcaccaacacaacagctgcttccacctacctcaacaacccgtacgtgcggaaggccctcaacatcccggagcagctgccacaatgggacatgtgcaactttctggtaaacttacagtaccgccgtctctaccgaagcatgaactcccagtatctgaagctgcttagctcacagaaataccagatcctattatataatggagatgtagacatggcctgcaatttcatgggggatgagtggtttgtggattccctcaaccagaagatggaggtgcagcgccggccctggttagtgaagtacggggacagcggggagcagattgccggcttcgtgaaggagttctcccacatcgcctttctcacgatcaagggcgccggccacatggttcccaccgacaagcccctcgctgccttcaccatgttctcccgcttcctgaacaagcagccatactgatgaccacagcaaccagctccacggcctgatgcagcccctcccagcctctcccgctaggagagtcctcttctaagcaaagtgcccctgcaggccgggttctgccgccaggactgcccccttcccagagccctgtacatcccagactgggcccagggtctcccatagacagcctgggggcaagttagcactttattcccgcagcagttcctgaatggggtggcctggccccttctctgcttaaagaatgccctttatgatgcactgattccatcccaggaacccaacagagctcaggacagcccacagggaggtggtggacggactgtaattgatagattgattatggaattaaattgggtacagcttcaaaaaaaaaaaaaaaa

SEQ ID NO: 4130 - DNA, 3108 bp, Homo sapiens
  source 1..3108: mol_type = genomic DNA
taaactagtgccggacagacgaaggcctagcacatgggctacggagccctagtagattccagtccccacactgagccaggaggggtcgctgcccagggatacctacagccatactcgagctggacaaggcgcacgctctttgtggaagcaaacacgtccaccaccgcgtagaggggctgcgcagctggcagtccccgggcgctcgggcccatgtcctcgccgttgatgatgatgtgcatgtcggccgtgccatcggggcgcgggcaaaagaggacacccaggcggctacggcgcgcggtcggaggcagcacgttcagctcatagagctggtccaagagatggctgtagagccctggccggctgcggcccaccaggcggtcccggggaatgcgaaactgctcaatgcgcagatatggttccacgaggagggttggaggtcggctgggggccgctgcctccgcctccgggcggccctcccggggcacgcggttgtggtggcgcgtgatggcgaagacccaggtgtggcccaggttgaccagatcgggcagagaaaactcgggaacgggggccagactggcggggtccagcgcggtcagaccgagacgcagatgtccgcaccagcccagctctttctcctcgatctcgaccaggaagacctggcccggggccagcggctcgcggctgaagcacacgccgtgggcgaagctctccacgcgtgtggcccgcgtcccagaggggtccacgcggatgttggcaccgtgcacccgatggaagcgggtgggagggggctccgggcgctcgagtccccagagtgcacccgaatccacgggctcggaggcagcagccatctctcggccatagggcaggccagctggcgccgggggctattttgggcggcgggcaatgatggtgaccgcaaggcgaccttgtaaggcatttcccccctgactcccttccccgagcctctgcccgggggtcctagcgccgctttctcagccatcccgcctacaacttagccgtccacaacaggatcatctgatcgcgtgcgcccgggctacgatctgcgaggcccgcggaccttgacccggcattgaccgccaccgccccccaggtccgtagggaccaaagaaggggcgggaggaagactgtcacgtggcgccggagttcacgtgactcgtacacatgacttccagtccccgggcgcctcctggagagcaaggacgcgggggagcagaggtgagctggcaccggaggctggaggggatccccgagcccgggatcgatgatccgagccgcgccgccgccgctgttcctgctgctgctgctgctgctgctgctagtgtcctgggcgtcccgaggcgaggcagcccccgaccaggacgagatccagcgcctccccgggctggccaagcagccgtctttccgccagtactccggctacctcaaaggctccggctccaagcacctccactactggtttgtggagtcccagaaggatcccgagaacagccctgtggtgctttggctcaatgggggtcccggctgcagctcactagatgggctcctcacagagcatggccccttcctggtccagccagatggtgtcaccctggagtacaacccctattcttggaatctgattgccaatgtgttatacctggagtccccagctggggtgggcttctcctactccgatgacaagttttatgcaactaatgacactgaggtcgcccagagcaattttgaggcccttcaagatttcttccgcctctttccggagtacaagaacaacaaacttttcctgaccggggagagctatgctggcatctacatccccaccctggccgtgctggtcatgcaggatcccagcatgaaccttcaggggctggctgtgggcaatggactctcctcctatgagcagaatgacaactccctggtctactttgcctactaccatggccttctggggaacaggctttggtcttctctccagacccactgctgctctcaaaacaagtgtaacttctatgacaacaaagacctggaatgcgtgaccaatcttcaggaagtggcccgcatcgtgggcaactctggcctcaacatctacaatctctatgccccgtgtgctggaggggtgcccagccattttaggtatgagaaggacactgttgtggtccaggatttgggcaacatcttcactcgcctgccactcaagcggatgtggcatcaggcactgctgcgctcaggggataaagtgcgcatggaccccccctgcaccaacacaacagctgcttccacctacctcaacaacccgtacgtgcggaaggccctcaacatcccggagcagctgccacaatgggacatgtgcaactttctggtaaacttacagtaccgccgtctctaccgaagcatgaactcccagtatctgaagctgcttagctcacagaaataccagatcctattatataatggagatgtagacatggcctgcaatttcatgggggatgagtggtttgtggattccctcaaccagaagatggaggtgcagcgccggccctggttagtgaagtacggggacagcggggagcagattgccggcttcgtgaaggagttctcccacatcgcctttctcacgatcaagggcgccggccacatggttcccaccgacaagcccctcgctgccttcaccatgttctcccgcttcctgaacaagcagccatactgatgaccacagcaaccagctccacggcctgatgcagcccctcccagcctctcccgctaggagagtcctcttctaagcaaagtgcccctgcaggccgggttctgccgccaggactgcccccttcccagagccctgtacatcccagactgggcccagggtctcccatagacagcctgggggcaagttagcactttattcccgcagcagttcctgaatggggtggcctggccccttctctgcttaaagaatgccctttatgatgcactgattccatcccaggaacccaacagagctcaggacagcccacagggaggtggtggacggactgtaattgatagattgattatggaattaaattgggtacagcttcaaaaaaaaaaaaaaaa

SEQ ID NO: 4131 - DNA, 2504 bp, Homo sapiens
  source 1..2504: mol_type = genomic DNA
ttattttgattcaccgcagagggcggtctacgagagcgcagagccccactcggccagcggggtctggcgggggacctgtcgcgctgaaagctccagggtagggccgacgcccatcaggctgggcatccgttcgggatgcgcaggttgcgatctgcaaccggcggcgccacgcccaggcgggcggagcgcggttcccggagtctcgcgcccgcggtcatgtgacacagcgaagatggcgtcgcccggctgcctgtggctcttggctgtggctctcctgccatggacctgcgcttctcgggcgctgcagcatctggacccgccggcgccgctgccgttggtgatctggcatgggatgggagacagctgttgcaatcccttaagcatgggtgctattaaaaaaatggtggagaagaaaatacctggaatttacgtcttatctttagagattgggaagaccctgatggaggacgtggagaacagcttcttcttgaatgtcaattcccaagtaacaacagtgtgtcaggcacttgctaaggatcctaaattgcagcaaggctacaatgctatgggattctcccagggaggccaatttctgagggcagtggctcagagatgcccttcacctcccatgatcaatctgatctcggttgggggacaacatcaaggtgtttttggactccctcgatgcccaggagagagctctcacatctgtgacttcatccgaaaaacactgaatgctggggcgtactccaaagttgttcaggaacgcctcgtgcaagccgaatactggcatgaccccataaaggaggatgtgtatcgcaaccacagcatcttcttggcagatataaatcaggagcggggtatcaatgagtcctacaagaaaaacctgatggccctgaagaagtttgtgatggtgaaattcctcaatgattccattgtggaccctgtagattcggagtggtttggattttacagaagtggccaagccaaggaaaccattcccttacaggagacctccctgtacacacaggaccgcctggggctaaaggaaatggacaatgcaggacagctagtgtttctggctacagaaggggaccatcttcagttgtctgaagaatggttttatgcccacatcataccattccttggatgaaacccgtatagttcacaatagagctcagggagcccctaactcttccaaaccacatgggagacagtttccttcatgcccaagcctgagctcagatccagcttgcaactaatccttctatcatctaacatgccctacttggaaagatctaagatctgaatcttatcctttgccatcttctgttaccatatggtgttgaatgcaagtttaattaccatggagattgttttacaaacttttgatgtggtcaagttcagttttagaaaagggagtctgttccagatcagtgccagaactgtgcccaggcccaaaggagacaactaactaaagtagtgagatagattctaagggcaaacatttttccaagtcttgccatatttcaagcaaagaggtgcccaggcctgaggtactcacataaatgctttgttttgctggtgatttaaccagtgcttggaaaaatcttgcttggctatttctgcatcatttcttaaggctgccttcctctctcagtacgttgccctctgtgctatcatcttatcatcaattattagacaaatcccactggcctacagtcttgcttctgcagcacccactttgtctcctcaggtagtgatgaattagttgctgtcacaaaaggagggaagtagcacccaaattaagttgcttaagagaggaaatgtacatcttgtataacttagggagcgaagaaaatgtaggcgcgaaagtgaaaagtgaggcagctagttcttcctattccattctcgaccaacctgccctttcttaatatgactagtggtcttgatgctagagtcaacttactctgttgctggctttagcagagaataggaggaaccatatgaaaaagatcaggctttctgacttccatccccaaaacacatttaccagcatactccaaactgtttctgatgtgttccatgagaaaaggattgtttgctcaaaaagcttggaaaatactacacactccctttctccttctggagatcaacccacattagagtgtctaaggactcctgagaattcctgttacagtaaacaaaactaacgtaatctaccatttcctacactatttgagcatggaaatcatagtccccactctgtgaaaacttaacgctttttggaagacatttctgtagcatgtcagtttggagaaatgatgagctacgccttgatgaaagaaccgtgttggtgctgctaagtttagccattatggtttttcctttctctctcttaagccttattcttcaactaaaagatgaggattaagagcaagaagttgggggggatgtgaaaataattttatgaggttgtctaaaataaagagtagtttcttatc

SEQ ID NO: 4132 - DNA, 2195 bp, Homo sapiens
  source 1..2195: mol_type = genomic DNA
ttattttgattcaccgcagagggcggtctacgagagcgcagagccccactcggccagcggggtctggcgggggacctgtcgcgctgaaagctccagggtagggccgacgcccatcaggctgggcatccgttcgggatgcgcaggttgcgatctgcaaccggcggcgccacgcccaggcgggcggagcgcggttcccggagtctcgcgcccgcggtcatgtgacacagcgaagatggcgtcgcccggctgcctgtggctcttggctgtggctctcctgccatggacctgcgcttctcgggcgctgcagcatctggacccgccggcgccgctgccgttggtgatctggcatgggatgggtgtttttggactccctcgatgcccaggagagagctctcacatctgtgacttcatccgaaaaacactgaatgctggggcgtactccaaagttgttcaggaacgcctcgtgcaagccgaatactggcatgaccccataaaggaggatgtgtatcgcaaccacagcatcttcttggcagatataaatcaggagcggggtatcaatgagtcctacaagaaaaacctgatggccctgaagaagtttgtgatggtgaaattcctcaatgattccattgtggaccctgtagattcggagtggtttggattttacagaagtggccaagccaaggaaaccattcccttacaggagacctccctgtacacacaggaccgcctggggctaaaggaaatggacaatgcaggacagctagtgtttctggctacagaaggggaccatcttcagttgtctgaagaatggttttatgcccacatcataccattccttggatgaaacccgtatagttcacaatagagctcagggagcccctaactcttccaaaccacatgggagacagtttccttcatgcccaagcctgagctcagatccagcttgcaactaatccttctatcatctaacatgccctacttggaaagatctaagatctgaatcttatcctttgccatcttctgttaccatatggtgttgaatgcaagtttaattaccatggagattgttttacaaacttttgatgtggtcaagttcagttttagaaaagggagtctgttccagatcagtgccagaactgtgcccaggcccaaaggagacaactaactaaagtagtgagatagattctaagggcaaacatttttccaagtcttgccatatttcaagcaaagaggtgcccaggcctgaggtactcacataaatgctttgttttgctggtgatttaaccagtgcttggaaaaatcttgcttggctatttctgcatcatttcttaaggctgccttcctctctcagtacgttgccctctgtgctatcatcttatcatcaattattagacaaatcccactggcctacagtcttgcttctgcagcacccactttgtctcctcaggtagtgatgaattagttgctgtcacaaaaggagggaagtagcacccaaattaagttgcttaagagaggaaatgtacatcttgtataacttagggagcgaagaaaatgtaggcgcgaaagtgaaaagtgaggcagctagttcttcctattccattctcgaccaacctgccctttcttaatatgactagtggtcttgatgctagagtcaacttactctgttgctggctttagcagagaataggaggaaccatatgaaaaagatcaggctttctgacttccatccccaaaacacatttaccagcatactccaaactgtttctgatgtgttccatgagaaaaggattgtttgctcaaaaagcttggaaaatactacacactccctttctccttctggagatcaacccacattagagtgtctaaggactcctgagaattcctgttacagtaaacaaaactaacgtaatctaccatttcctacactatttgagcatggaaatcatagtccccactctgtgaaaacttaacgctttttggaagacatttctgtagcatgtcagtttggagaaatgatgagctacgccttgatgaaagaaccgtgttggtgctgctaagtttagccattatggtttttcctttctctctcttaagccttattcttcaactaaaagatgaggattaagagcaagaagttgggggggatgtgaaaataattttatgaggttgtctaaaataaagagtagtttcttatc

SEQ ID NO: 4133 - DNA, 3670 bp, Homo sapiens
  source 1..3670: mol_type = genomic DNA
cgcagcaaacacatccgtagaaggcagcgcggccgccgagaaccgcagcgccgctcgcccgccgccccccaccccgccgccccgcccggcgaattgcgccccgcgcccctcccctcgcgcccccgagacaaagaggagagaaagtttgcgcggccgagcggggcaggtgaggagggtgagccgcgcgggaggggcccgcctcggccccggctcagcccccgcccgcgcccccagcccgccgccgcgagcagcgcccggaccccccagcggcggcccccgcccgcccagccccccggcccgccatgggcgccgcggcccgcaccctgcggctggcgctcggcctcctgctgctggcgacgctgcttcgcccggccgacgcctgcagctgctccccggtgcacccgcaacaggcgttttgcaatgcagatgtagtgatcagggccaaagcggtcagtgagaaggaagtggactctggaaacgacatttatggcaaccctatcaagaggatccagtatgagatcaagcagataaagatgttcaaagggcctgagaaggatatagagtttatctacacggccccctcctcggcagtgtgtggggtctcgctggacgttggaggaaagaaggaatatctcattgcaggaaaggccgagggggacggcaagatgcacatcaccctctgtgacttcatcgtgccctgggacaccctgagcaccacccagaagaagagcctgaaccacaggtaccagatgggctgcgagtgcaagatcacgcgctgccccatgatcccgtgctacatctcctccccggacgagtgcctctggatggactgggtcacagagaagaacatcaacgggcaccaggccaagttcttcgcctgcatcaagagaagtgacggctcctgtgcgtggtaccgcggcgcggcgccccccaagcaggagtttctcgacatcgaggacccataagcaggcctccaacgcccctgtggccaactgcaaaaaaagcctccaagggtttcgactggtccagctctgacatcccttcctggaaacagcatgaataaaacactcatcccatgggtccaaattaatatgattctgctccccccttctccttttagacatggttgtgggtctggagggagacgtgggtccaaggtcctcatcccatcctccctctgccaggcactatgtgtctggggcttcgatccttgggtgcaggcagggctgggacacgcggcttccctcccagtccctgccttggcaccgtcacagatgccaagcaggcagcacttagggatctcccagctgggttagggcagggcctggaaatgtgcattttgcagaaacttttgagggtcgttgcaagactgtgtagcaggcctaccaggtccctttcatcttgagagggacatggcccttgttttctgcagcttccacgcctctgcactccctgcccctggcaagtgctcccatcgccccggtgcccaccatgagctcccagcacctgactccccccacatccaagggcagcctggaaccagtggctagttcttgaaggagccccatcaatcctattaatcctcagaattccagtgggagcctccctctgagccttgtagaaatgggagcgagaaaccccagctgagctgcgttccagcctcagctgagtctttttggtctgcacccacccccccacccccccccccccgcccacatgctccccagcttgcaggaggaatcggtgaggtcctgtcctgaggctgctgtccggggccggtggctgccctcaaggtcccttccctagctgctgcggttgccattgcttcttgcctgttctggcatcaggcacctggattgagttgcacagctttgctttatccgggcttgtgtgcagggcccggctgggctccccatctgcacatcctgaggacagaaaaagctgggtcttgctgtgccctcccaggcttagtgttccctccctcaaagactgacagccatcgttctgcacggggctttctgcatgtgacgccagctaagcatagtaagaagtccagcctaggaagggaaggattttggaggtaggtggctttggtgacacactcacttctttctcagcctccaggacactatggcctgttttaagagacatcttatttttctaaaggtgaattctcagatgataggtgaacctgagttgcagatataccaacttctgcttgtatttcttaaatgacaaagattacctagctaagaaacttcctagggaactagggaacctatgtgttccctcagtgtggtttcctgaagccagtgatatgggggttaggataggaagaactttctcggtaatgataaggagaatctcttgtttcctcccacctgtgttgtaaagataaactgacgatatacaggcacattatgtaaacatacacacgcaatgaaaccgaagcttggcggcctgggcgtggtcttgcaaaatgcttccaaagccaccttagcctgttctattcagcggcaaccccaaagcacctgttaagactcctgacccccaagtggcatgcagcccccatgcccaccgggacctggtcagcacagatcttgatgacttccctttctagggcagactgggagggtatccaggaatcggcccctgccccacgggcgttttcatgctgtacagtgacctaaagttggtaagatgtcataatggaccagtccatgtgatttcagtatatacaactccaccagacccctccaacccatataacaccccacccctgttcgcttcctgtatggtgatatcatatgtaacatttactcctgtttctgctgattgtttttttaatgttttggtttgtttttgacatcagctgtaatcattcctgtgctgtgttttttattacccttggtaggtattagacttgcacttttttaaaaaaaggtttctgcatcgtggaagcatttgacccagagtggaacgcgtggcctatgcaggtggattccttcaggtctttcctttggttctttgagcatctttgctttcattcgtctcccgtctttggttctccagttcaaattattgcaaagtaaaggatctttgagtaggttcggtctgaaaggtgtggcctttatatttgatccacacacgttggtcttttaaccgtgctgagcagaaaacaaaacaggttaagaagagccgggtggcagctgacagaggaagccgctcaaataccttcacaataaatagtggcaatatatatatagtttaagaaggctctccatttggcatcgtttaatttatatgttatgttctaagcacagctctcttctcctattttcatcctgcaagcaactcaaaatatttaaaataaagtttacattgtagttattttcaaatctttgcttgataagtattaagaaatattggacttgctgccgtaatttaaagctctgttgattttgtttccgtttggatttttgggggaggggagcactgtgtttatgctggaatatgaagtctgagaccttccggtgctgggaacacacaagagttgttgaaagttgacaagcagactgcgcatgtctctgatgctttgtatcattcttgagcaatcgctcggtccgtggacaataaacagtattatcaaagagaaaaaaaaaaaaaaaaa

SEQ ID NO: 4134 - DNA, 993 bp, Homo sapiens
  source 1..993: mol_type = genomic DNA
agctacggcgcgcggccgggacttggaggcggtgcggcgcggcgggtgcggttcagtcggtcggcggcggcagcggaggaggaggaggaggaggaggatgaggaggatgaggaggatgtgggccacgcaggggctggcggtggcgctggctctgagcgtgctgccgggcagccgggcgctgcggccgggcgactgcgaagtttgtatttcttatctgggaagattttaccaggacctcaaagacagagatgtcacattctcaccagccactattgaaaacgaacttataaagttctgccgggaagcaagaggcaaagagaatcggttgtgctactatatcggggccacagatgatgcagccaccaaaatcatcaatgaggtatcaaagcctctggcccaccacatccctgtggagaagatctgtgagaagcttaagaagaaggacagccagatatgtgagcttaagtatgacaagcagatcgacctgagcacagtggacctgaagaagctccgagttaaagagctgaagaagattctggatgactggggggagacatgcaaaggctgtgcagaaaagtctgactacatccggaagataaatgaactgatgcctaaatatgcccccaaggcagccagtgcacggaccgatttgtagtctgctcaatctctgttgcacctgagggggaaaaaacagttcaactgcttactcccaaaacagcctttttgtaatttattttttaagtgggctcctgacaatactgtatcagatgtgaagcctggagctttcctgatgatgctggccctacagtacccccatgaggggattcccttccttctgttgctggtgtactctaggacttcaaagtgtgtctgggatttttttattaaagaaaaaaaatttctagctgtccttgcagaattatagtgaataccaaaatggggttttgccccaggaggctcctaaaaaaaaaaaaaaaaaaaaaaaaaaaaaaa

SEQ ID NO: 4135 - DNA, 931 bp, Homo sapiens
  source 1..931: mol_type = genomic DNA
tttcgtcggcccgccccttggcttctgcactgatggtgggtggatgagtaatgcatccaggaagcctggaggcctgtggtttccgcacccgctgccacccccgcccctagcgtggacatttatcctctagcgctcaggccctgccgccatcgccgcagatccagcgcccagagagacaccagagaacccaccatggccccctttgagcccctggcttctggcatcctgttgttgctgtggctgatagcccccagcagggcctgcacctgtgtcccaccccacccacagacggccttctgcaattccgacctcgtcatcagggccaagttcgtggggacaccagaagtcaaccagaccaccttataccagcgttatgagatcaagatgaccaagatgtataaagggttccaagccttaggggatgccgctgacatccggttcgtctacacccccgccatggagagtgtctgcggatacttccacaggtcccacaaccgcagcgaggagtttctcattgctggaaaactgcaggatggactcttgcacatcactacctgcagttttgtggctccctggaacagcctgagcttagctcagcgccggggcttcaccaagacctacactgttggctgtgaggaatgcacagtgtttccctgtttatccatcccctgcaaactgcagagtggcactcattgcttgtggacggaccagctcctccaaggctctgaaaagggcttccagtcccgtcaccttgcctgcctgcctcgggagccagggctgtgcacctggcagtccctgcggtcccagatagcctgaatcctgcccggagtggaagctgaagcctgcacagtgtccaccctgttcccactcccatctttcttccggacaatgaaataaagagttaccacccagcagaaaaaaaaaaaaaaaa

SEQ ID NO: 4136 - DNA, 2419 bp, Homo sapiens
  source 1..2419: mol_type = genomic DNA
gcggccgcccgcacttcccgcctctggctcgcccgaggacgcgctggcacgcctcccaccccctcactctgactccagctggcgtgcatggtctgcctcgcatcctcacgactcagctccctccctctctcgtgtttttttcctccgccgccccctcattcatccccactgggctccctttccctcaaatgctctggggctctccgcgctttcctgagtccgggctccgaggacccttaggtagtcccggtctcttttaaagctccccggcttccaaagggttgccacgtccctaaaccctgtctccagctcgcatacacacacgcacagacacgcacgttttctgttcctgcgtgacacccgccctcgccgctcggccccgccggtccccgcgcggtgccctcctcccgccacacgggcacgcacgcgcgcgcagggccaagcccgaggcagctcgcccgcagctcgcactcgcaggcgacctgctccagtctccaaagccgatggcatctccgggctctggcttttggtctttcgggtcggaagatggctctggggattccgagaatcccggcacagcgcgagcctggtgccaagtggctcagaagttcacgggcggcatcggaaacaaactgtgcgccctgctctacggagacgccgagaagccggcggagagcggcgggagccaacccccgcgggccgccgcccggaaggccgcctgcgcctgcgaccagaagccctgcagctgctccaaagtggatgtcaactacgcgtttctccatgcaacagacctgctgccggcgtgtgatggagaaaggcccactttggcgtttctgcaagatgttatgaacattttacttcagtatgtggtgaaaagtttcgatagatcaaccaaagtgattgatttccattatcctaatgagcttctccaagaatataattgggaattggcagaccaaccacaaaatttggaggaaattttgatgcattgccaaacaactctaaaatatgcaattaaaacagggcatcctagatacttcaatcaactttctactggtttggatatggttggattagcagcagactggctgacatcaacagcaaatactaacatgttcacctatgaaattgctccagtatttgtgcttttggaatatgtcacactaaagaaaatgagagaaatcattggctggccagggggctctggcgatgggatattttctcccggtggcgccatatctaacatgtatgccatgatgatcgcacgctttaagatgttcccagaagtcaaggagaaaggaatggctgctcttcccaggctcattgccttcacgtctgaacatagtcatttttctctcaagaagggagctgcagccttagggattggaacagacagcgtgattctgattaaatgtgatgagagagggaaaatgattccatctgatcttgaaagaaggattcttgaagccaaacagaaagggtttgttcctttcctcgtgagtgccacagctggaaccaccgtgtacggagcatttgaccccctcttagctgtcgctgacatttgcaaaaagtataagatctggatgcatgtggatgcagcttggggtgggggattactgatgtcccgaaaacacaagtggaaactgagtggcgtggagagggccaactctgtgacgtggaatccacacaagatgatgggagtccctttgcagtgctctgctctcctggttagagaagagggattgatgcagaattgcaaccaaatgcatgcctcctacctctttcagcaagataaacattatgacctgtcctatgacactggagacaaggccttacagtgcggacgccacgttgatgtttttaaactatggctgatgtggagggcaaaggggactaccgggtttgaagcgcatgttgataaatgtttggagttggcagagtatttatacaacatcataaaaaaccgagaaggatatgagatggtgtttgatgggaagcctcagcacacaaatgtctgcttctggtacattcctccaagcttgcgtactctggaagacaatgaagagagaatgagtcgcctctcgaaggtggctccagtgattaaagccagaatgatggagtatggaaccacaatggtcagctaccaacccttgggagacaaggtcaatttcttccgcatggtcatctcaaacccagcggcaactcaccaagacattgacttcctgattgaagaaatagaacgccttggacaagatttataataaccttgctcaccaagctgttccacttctctaggtagacaattaagttgtcacaaactgtgtgaatgtatttgtagtttgttccaaagtaaatctatttctatattgtggtgtcaaagtagagtttaaaaattaaacaaaaaagacattgctccttt

SEQ ID NO: 4137 - DNA, 2824 bp, Homo sapiens
  source 1..2824: mol_type = genomic DNA
gcggccgcccgcacttcccgcctctggctcgcccgaggacgcgctggcacgcctcccaccccctcactctgactccagctggcgtgcatggtctgcctcgcatcctcacgactcagctccctccctctctcgtgtttttttcctccgccgccccctcattcatccccactgggctccctttccctcaaatgctctggggctctccgcgctttcctgagtccgggctccgaggacccttaggtagtcccggtctcttttaaagctccccggcttccaaagggttgccacgtccctaaaccctgtctccagctcgcatacacacacgcacagacacgcacgttttctgttcctgcgtgacacccgccctcgccgctcggccccgccggtccccgcgcggtgccctcctcccgccacacgggcacgcacgcgcgcgcagggccaagcccgaggcagctcgcccgcagctcgcactcgcaggcgacctgctccagtctccaaagccgatggcatctccgggctctggcttttggtctttcgggtcggaagatggctctggggattccgagaatcccggcacagcgcgagcctggtgccaagtggctcagaagttcacgggcggcatcggaaacaaactgtgcgccctgctctacggagacgccgagaagccggcggagagcggcgggagccaacccccgcgggccgccgcccggaaggccgcctgcgcctgcgaccagaagccctgcagctgctccaaagtggatgtcaactacgcgtttctccatgcaacagacctgctgccggcgtgtgatggagaaaggcccactttggcgtttctgcaagatgttatgaacattttacttcagtatgtggtgaaaagtttcgatagatcaaccaaagtgattgatttccattatcctaatgagcttctccaagaatataattgggaattggcagaccaaccacaaaatttggaggaaattttgatgcattgccaaacaactctaaaatatgcaattaaaacagggcatcctagatacttcaatcaactttctactggtttggatatggttggattagcagcagactggctgacatcaacagcaaatactaacatgttcacctatgaaattgctccagtatttgtgcttttggaatatgtcacactaaagaaaatgagagaaatcattggctggccagggggctctggcgatgggatattttctcccggtggcgccatatctaacatgtatgccatgatgatcgcacgctttaagatgttcccagaagtcaaggagaaaggaatggctgctcttcccaggctcattgccttcacgtctgaacatagtcatttttctctcaagaagggagctgcagccttagggattggaacagacagcgtgattctgattaaatgtgatgagagagggaaaatgattccatctgatcttgaaagaaggattcttgaagccaaacagaaagggtttgttcctttcctcgtgagtgccacagctggaaccaccgtgtacggagcatttgaccccctcttagctgtcgctgacatttgcaaaaagtataagatctggatgcatgtggatgcagcttggggtgggggattactgatgtcccgaaaacacaagtggaaactgagtggcgtggagagggccaactctgtgacgtggaatccacacaagatgatgggagtccctttgcagtgctctgctctcctggttagagaagagggattgatgcagaattgcaaccaaatgcatgcctcctacctctttcagcaagataaacattatgacctgtcctatgacactggagacaaggccttacagtgcggacgccacgttgatgtttttaaactatggctgatgtggagggcaaaggggactaccgggtttgaagcgcatgttgataaatgtttggagttggcagagtatttatacaacatcataaaaaaccgagaaggatatgagatggtgtttgatgggaagcctcagcacacaaatgtctgcttctggtacattcctccaagcttgcgtactctggaagacaatgaagagagaatgagtcgcctctcgaaggtggctccagtgattaaagccagaatgatggagtatggaaccacaatggtcagctaccaacccttgggagacaaggtcaatttcttccgcatggtcatctcaaacccagcggcaactcaccaagacattgacttcctgattgaagaaatagaacgccttggacaagatttataataaccttgctcaccaagctgttccacttctctagagaacatgccctcagctaagccccctactgagaaacttcctttgagaattgtgcgacttcacaaaatgcaaggtgaacaccactttgtctctgagaacagacgttaccaattatggagtgtcaccagctgccaaaatcgtaggtgttggctctgctggtcactggagtagttgctactcttcagaatatggacaaagaaggcacaggtgtaaatatagtagcaggatgaggaacctcaaactgggtatcattttgcacgtgctcttctgttctcaaatgctaaatgcaaacactgtgtatttattagttaggtgtgccaaactaccgttcccaaattggtgtttctgaatgacatcaacattcccccaacattactccattactaaagacagaaaaaaataaaaacataaaatatacaaacatgtggcaacctgttcttcctaccaaatataaacttgtgtatgatccaagtattttatctgtgttgtctctctaaacccaaataaatgtgtaaatgtggacacatctc

SEQ ID NO: 4138 - DNA, 3897 bp, Homo sapiens
  source 1..3897: mol_type = genomic DNA
actcaaaatggcggcggcggcgtcagcatcagcggcctcctgcccgtatctatcgtggcggcgacgggacccgcctccctgggcgccggagtcatgtgacccacacaatggctgagtggctactctcggcttcctggcaacgccgagcgaaagctatgactgcggccgcgggttcggcgggccgcgccgcggtgcccttgctgctgtgtgcgctgctggcgcccggcggcgcgtacgtgctcgacgactccgacgggctgggccgggagttcgacggcatcggcgcggtcagcggcggcggggcaacctcccgacttctagtaaattacccagagccctatcgttctcagatattggattatctctttaagccgaattttggtgcctctttgcatattttaaaagtggaaataggtggtgatgggcagacaacagacggcactgagccctcccacatgcattatgcactagatgagaattatttccgaggatacgagtggtggttgatgaaagaagctaagaagaggaatcccaatattacactcattgggttgccatggtcattccctggatggctgggaaaaggtttcgactggccttatgtcaatcttcagctgactgcctattatgtcgtgacctggattgtgggcgccaagcgttaccatgatttggacattgattatattggaatttggaatgagaggtcatataatgccaattatattaagatattaagaaaaatgctgaattatcaaggtctccagcgagtgaaaatcatagcaagtgataatctctgggagtccatctctgcatccatgctccttgatgccgaactcttcaaggtggttgatgttataggggctcattatcctggaacccattcagcaaaagatgcaaagttgactgggaagaagctttggtcttctgaagactttagcactttaaatagtgacatgggtgcaggctgctggggtcgcattttaaatcagaattatatcaatggctatatgacttccacaatcgcatggaatttagtggctagttactatgaacagttgccttatgggagatgcgggttgatgacggcccaggagccatggagtgggcactacgtggtagaatctcctgtctgggtatcagctcataccactcagtttactcaacctggctggtattacctgaagacagttggccatttagagaaaggaggaagctacgtagctctgactgatggcttagggaacctcaccatcatcattgaaaccatgagtcataaacattctaagtgcatacggccatttcttccttatttcaatgtgtcacaacaatttgccacctttgttcttaagggatcttttagtgaaataccagagctacaggtatggtataccaaacttggaaaaacatccgaaagatttctttttaagcagctggattctctatggctccttgacagcgatggcagtttcacactgagcctgcatgaagatgagctgttcacactcaccactctcaccactggtcgcaaaggcagctacccgcttcctccaaaatcccagcccttcccaagtacctataaggatgatttcaatgttgattacccattttttagtgaagctccaaactttgctgatcaaactggtgtatttgaatattttacaaatattgaagaccctggcgagcatcacttcacgctacgccaagttctcaaccagagacccattacgtgggctgccgatgcatccaacacaatcagtattataggagactacaactggaccaatctgactataaagtgtgatgtatacatagagacccctgacacaggaggtgtgttcattgcaggaagagtaaataaaggtggtattttgattagaagtgccagaggaattttcttctggatttttgcaaatggatcttacagggttacaggtgatttagctggatggattatatatgctttaggacgtgttgaagttacagcaaaaaaatggtatacactcacgttaactattaagggtcatttcacctctggcatgctgaatgacaagtctctgtggacagacatccctgtgaattttccaaagaatggctgggctgcaattggaactcactcctttgaatttgcacagtttgacaactttcttgtggaagccacacgctaatacttaacagggcatcatagaatactctggattttcttcccttctttttggttttggttcagagccaattcttgtttcattggaacagtatatgaggcttttgagactaaaaataatgaagagtaaaaggggagagaaatttatttttaatttaccctgtggaagattttattagaattaattccaaggggaaaactggtgaatctttaacattacctggtgtgttccctaacattcaaactgtgcattggccatacccttaggagtggtttgagtagtacagacctcgaagccttgctgctaacactgaggtagctctcttcatcttatttgcaagcggtcctgtagatggcagtaacttgatcatcactgagatgtatttatgcatgctgaccgtgtgtccaagtgagccagtgtcttcatcacaagatgatgctgccataatagaaagctgaagaacactagaagtagctttttgaaaaccacttcaacctgttatgctttatgctctaaaaagtatttttttattttcctttttaagatgatacttttgaaatgcaggatatgatgagtgggatgattttaaaaatgcctctttaataaactacctctaacactatttctgcagtaatagatattagcagattaattgggttatttgcattatttaatttttttgattccaagttttggtcttgtaaccactataactctctgtgaacgtttttccaggtggctggaagaaggaagaaaacctgatatagccaatgctgttgtagtcgtttcctcagcctcatctcactgtgctgtggtctgtcctcacatgtgcactggtaacagactcacacagctgatgaatgcttttctctccttatgtgtggaaggaggggagcacttagacatttgctaactcccagaattggatcatctcctaagatgtacttactttttaaagtccaaatatgtttatatttaaatatacgtgagcgtgttcatcatgttgtatgatttatactaagcattaatgtggctctatgtagcaaatcagttattcatgtaggtaaagtaaatctagaattatttataagaattactcattgaactaattctactatttaggaatttgtaagagtctaacataggcttagctacagtgaagttttgcattgcttttgaagacaagaagataagtgctagaataaataagattacagagaaaattttttgttaaaaccaagtgatttccagctgatgtatctaatattttttaaaacgaacattatagaggtgtaatttatttacaataaaatgttcctactttaaatatacaattcagtgagttttgataaattgatatacccatgtaaccaacactccagtcaagcttcagaatatttccatcaccccagaaggttctcttgtatacctgctcagtcagttcctttcactcccaattgttggcagccattgataggaattctatcactataggttagttttctttgttccagaacatcatgaaagcggcgtcatgtactgtgtattcttatgaatggtttctttccatcagcataatgatttgagatttgtccatgttgtgtgattcagtggtttgttccttcttatttctgaagagttttccattgtatgaatataccacaatttgtttcctccccaccagtttctgatactacaattaaaactgtctacatttacaaaaaaaaaaaaaaaa

SEQ ID NO: 4139 - DNA, 1272 bp, Homo sapiens
  source 1..1272: mol_type = genomic DNA
gcaaaaccgtgagctggatttataatcgccctataaagctccagaggcggtcaggcacctgcagaggagccccgccgctccgccgactagctgcccccgcgagcaacggcctcgtgatttccccgccgatccggtccccgcctccccactctgcccccgcctaccccggagccgtgcagccgcctctccgaatctctctcttctcctggcgctcgcgtgcgagagggaactagcgagaacgaggaagcagctggaggtgacgccgggcagattacgcctgtcagggccgagccgagcggatcgctgggcgctgtgcagaggaaaggcgggagtgcccggctcgctgtcgcagagccgaggtggcctgtttctgcgccggaccagtcgaggactctggacagtagaggccccgggacgaccgagctgatggcgtcttcgaccccatcttcgtccgcaacctcctcgaacgcgggagcggaccccaataccactaacctgcgccccacaacgtacgatacctggtgcggcgtggcccatggatgcaccagaaaactggggctcaagatctgcggcttcttgcaaaggaccaacagcctggaagagaagagtcgccttgtgagtgccttcaaggagaggcaatcctccaagaacctgctttcctgtgaaaacagcgaccgggatgcccgcttccggcgcacagagactgacttctctaatctgtttgctagagatctgcttccggctaagaacggtgaggagcaaaccgtgcaattcctcctggaagtggtggacatactcctcaactatgtccgcaagacatttgatcgctccaccaaggtgctggactttcatcacccacaccagttgctggaaggcatggagggcttcaacttggagctctctgaccaccccgagtccctggagcagatcctggttgactgcagagacaccttgaagtatggggttcgcacaggtcatcctcgatttttcaaccagctctccactggattggatattattggcctagctggagaatggctgacatcaacggccaataccaacatgccatcagacatgagggagtgttggttgctacggtgatggggctcagagcagaaccaaagcatgattgtgacctccagaggtgatggtaactgcacacatggtttccaagggtcttcctcctaaatttccaggggcctcccaaggaaaatggacatattctttttggaaataaaatacttctaccaacataaaaaaaaaaaaaaaaaa

SEQ ID NO: 4140 - DNA, 3488 bp, Homo sapiens
  source 1..3488: mol_type = genomic DNA
gcaaaaccgtgagctggatttataatcgccctataaagctccagaggcggtcaggcacctgcagaggagccccgccgctccgccgactagctgcccccgcgagcaacggcctcgtgatttccccgccgatccggtccccgcctccccactctgcccccgcctaccccggagccgtgcagccgcctctccgaatctctctcttctcctggcgctcgcgtgcgagagggaactagcgagaacgaggaagcagctggaggtgacgccgggcagattacgcctgtcagggccgagccgagcggatcgctgggcgctgtgcagaggaaaggcgggagtgcccggctcgctgtcgcagagccgagcctgtttctgcgccggaccagtcgaggactctggacagtagaggccccgggacgaccgagctgatggcgtcttcgaccccatcttcgtccgcaacctcctcgaacgcgggagcggaccccaataccactaacctgcgccccacaacgtacgatacctggtgcggcgtggcccatggatgcaccagaaaactggggctcaagatctgcggcttcttgcaaaggaccaacagcctggaagagaagagtcgccttgtgagtgccttcaaggagaggcaatcctccaagaacctgctttcctgtgaaaacagcgaccgggatgcccgcttccggcgcacagagactgacttctctaatctgtttgctagagatctgcttccggctaagaacggtgaggagcaaaccgtgcaattcctcctggaagtggtggacatactcctcaactatgtccgcaagacatttgatcgctccaccaaggtgctggactttcatcacccacaccagttgctggaaggcatggagggcttcaacttggagctctctgaccaccccgagtccctggagcagatcctggttgactgcagagacaccttgaagtatggggttcgcacaggtcatcctcgatttttcaaccagctctccactggattggatattattggcctagctggagaatggctgacatcaacggccaataccaacatgtttacatatgaaattgcaccagtgtttgtcctcatggaacaaataacacttaagaagatgagagagatagttggatggtcaagtaaagatggtgatgggatattttctcctgggggcgccatatccaacatgtacagcatcatggctgctcgctacaagtacttcccggaagttaagacaaagggcatggcggctgtgcctaaactggtcctcttcacctcagaacagagtcactattccataaagaaagctggggctgcacttggctttggaactgacaatgtgattttgataaagtgcaatgaaagggggaaaataattccagctgattttgaggcaaaaattcttgaagccaaacagaagggatatgttcccttttatgtcaatgcaactgctggcacgactgtttatggagcttttgatccgatacaagagattgcagatatatgtgagaaatataacctttggttgcatgtcgatgctgcctggggaggtgggctgctcatgtccaggaagcaccgccataaactcaacggcatagaaagggccaactcagtcacctggaaccctcacaagatgatgggcgtgctgttgcagtgctctgccattctcgtcaaggaaaagggtatactccaaggatgcaaccagatgtgtgcaggatacctcttccagccagacaagcagtatgatgtctcctacgacaccggggacaaggcaattcagtgtggccgccacgtggatatcttcaagttctggctgatgtggaaagcaaagggcacagtgggatttgaaaaccagatcaacaaatgcctggaactggctgaatacctctatgccaagattaaaaacagagaagaatttgagatggttttcaatggcgagcctgagcacacaaacgtctgtttttggtatattccacaaagcctcaggggtgtgccagacagccctcaacgacgggaaaagctacacaaggtggctccaaaaatcaaagccctgatgatggagtcaggtacgaccatggttggctaccagccccaaggggacaaggccaacttcttccggatggtcatctccaacccagccgctacccagtctgacattgacttcctcattgaggagatagaaagactgggccaggatctgtaatcatccttcgcagaacatgagtttatgggaatgccttttccctctggcactccagaacaaacctctatatgttgctgaaacacacaggccatttcattgagggaaaacataatatcttgaagaatattgttaaaaccttacttaaagcttgtttgttctagttagcaggaaatagtgttctttttaaaaagttgcacattaggaacagagtatatatgtacagttatacatacctctctctatatatacatgtatagtgagtgtggcttagtaatagatcacggcatgtttcccgctccaagagaattcactttaccttcagcagttaccgaggagctaaacatgctgccaaccagcttgtccaacaactccaggaaaactgtttttcaaaacgccatgtcctaggggccaagggaaatgctgttggtgagaatcgacctcactgtcagcgtttctccacctgaagtgatgatggatgagaaaaaacaccaccaaatgacaagtcacaccctccccattagtatcctgttaggggaaaatagtagcagagtcattgttacaggtgtactatggctgtatttttagagattaatttgtgtagattgtgtaaattcctgttgtctgaccttggtggtgggagggggagactatgtgtcatgatttcaatgattgtttaattgtaggtcaatgaaatatttgcttatttatattcagagatgtaccatgttaaagaggcgtcttgtattttcttcccatttgtaatgtatcttatttatatatgaagtaagttctgaaaactgtttatggtattttcgtgcatttgtgagccaaagagaaaagattaaaattagtgagatttgtatttatattagagtgcccttaaaataatgatttaagcattttactgtctgtaagagaattctaagattgtacataaagtcatatatatggaaatcctgttacttaaatagcatctgctcttctcttacgctctctgtctggctgtacgtctggtgttctcaatgcttttctagcaactgttggataataactagatctcctgtaattttgtagtagttgatgaccaatctctgtgactcgcttagctgaaacctaaggcaacatttccgaagaccttctgaagatctcagataaagtgaccaggctcacaactgtttttgaagaagggaaattcacactgtgcgttttagagtatgcaagaagaatataaataaataaaaatattctccatggagaatttgaacaaaaaaaaaaaaaaaa

SEQ ID NO: 4141 - DNA, 1182 bp, Homo sapiens
  source 1..1182: mol_type = genomic DNA
tgccagaataacacagactcagctgccagagcctgctcttaacacctgtgtttccttttcagatcttacaggtgaacaaggtgatgtccatcttgttttatgtgatatttctcgcttatctccgtggcatccaaggtaacaacatggatcaaaggagtttgccagaagactcgctcaattccctcattattaagctgatccaggcagatattttgaaaaacaagctctccaagcagatggtggacgttaaggaaaattaccagagcaccctgcccaaagctgaggctccccgagagccggagcggggagggcccgccaagtcagcattccagccggtgattgcaatggacaccgaactgctgcgacaacagagacgctacaactcaccgcgggtcctgctgagcgacagcacccccttggagcccccgcccttgtatctcatggaggattacgtgggcagccccgtggtggcgaacagaacatcacggcggaaacggtacgcggagcataagagtcaccgaggggagtactcggtatgtgacagtgagagtctgtgggtgaccgacaagtcatcggccatcgacattcggggacaccaggtcacggtgctgggggagatcaaaacgggcaactctcccgtcaaacaatatttttatgaaacgcgatgtaaggaagccaggccggtcaaaaacggttgcaggggtattgatgataaacactggaactctcagtgcaaaacatcccaaacctacgtccgagcactgacttcagagaacaataaactcgtgggctggcggtggatacggatagacacgtcctgtgtgtgtgccttgtcgagaaaaatcggaagaacatgaattggcatctctccccatatataaattattactttaaattatatgatatgcatgtagcatataaatgtttatattgtttttatatattataagttgacctttatttattaaacttcagcaaccctacagtatataagcttttttctcaataaaatcagtgtgcttgccttccctcaggcctctcccatctgttaaaacttgttttgtgatccggctctcaggagtcactctgtaaaatctgtgtacaccagtattttgcattcagtattgtcaaggccatgactgttgttttagtaaacttgttaaaatcaaaaaaaaaaaaaaa

SEQ ID NO: 4142 - DNA, 1349 bp, Homo sapiens
  source 1..1349: mol_type = genomic DNA
agttgaagctcctctcccttccgaacagctccgcgcaccgccccgcgacgcagcccggcgcaactactttcttctctctcctttctttcttcctctcctttttcccctgctgggtagtggctgcggcggggtgggggagactttgaatgaccgagctcgcgtccacctttctcttcatgtcgacgtccctggaaacggccacacggatgccatggttacttttgccacgatcttacaggtgaacaaggtgatgtccatcttgttttatgtgatatttctcgcttatctccgtggcatccaaggtaacaacatggatcaaaggagtttgccagaagactcgctcaattccctcattattaagctgatccaggcagatattttgaaaaacaagctctccaagcagatggtggacgttaaggaaaattaccagagcaccctgcccaaagctgaggctccccgagagccggagcggggagggcccgccaagtcagcattccagccggtgattgcaatggacaccgaactgctgcgacaacagagacgctacaactcaccgcgggtcctgctgagcgacagcacccccttggagcccccgcccttgtatctcatggaggattacgtgggcagccccgtggtggcgaacagaacatcacggcggaaacggtacgcggagcataagagtcaccgaggggagtactcggtatgtgacagtgagagtctgtgggtgaccgacaagtcatcggccatcgacattcggggacaccaggtcacggtgctgggggagatcaaaacgggcaactctcccgtcaaacaatatttttatgaaacgcgatgtaaggaagccaggccggtcaaaaacggttgcaggggtattgatgataaacactggaactctcagtgcaaaacatcccaaacctacgtccgagcactgacttcagagaacaataaactcgtgggctggcggtggatacggatagacacgtcctgtgtgtgtgccttgtcgagaaaaatcggaagaacatgaattggcatctctccccatatataaattattactttaaattatatgatatgcatgtagcatataaatgtttatattgtttttatatattataagttgacctttatttattaaacttcagcaaccctacagtatataagcttttttctcaataaaatcagtgtgcttgccttccctcaggcctctcccatctgttaaaacttgttttgtgatccggctctcaggagtcactctgtaaaatctgtgtacaccagtattttgcattcagtattgtcaaggccatgactgttgttttagtaaacttgttaaaatcaaaaaaaaaaaaaaa

SEQ ID NO: 4143 - DNA, 2321 bp, Homo sapiens
  source 1..2321: mol_type = genomic DNA
gtcctcaaccaagatggcgcggatggcttcaggcgcatcacgacaccggcgcgtcacgcgacccgccctacgggcacctcccgcgcttttcttagcgccgcagacggtggccgagcgggggaccgggaagcatggcccgggggtcggcggttgcctgggcggcgctcgggccgttgttgtggggctgcgcgctggggctgcagggcgggatgctgtacccccaggagagcccgtcgcgggagtgcaaggagctggacggcctctggagcttccgcgccgacttctctgacaaccgacgccggggcttcgaggagcagtggtaccggcggccgctgtgggagtcaggccccaccgtggacatgccagttccctccagcttcaatgacatcagccaggactggcgtctgcggcattttgtcggctgggtgtggtacgaacgggaggtgatcctgccggagcgatggacccaggacctgcgcacaagagtggtgctgaggattggcagtgcccattcctatgccatcgtgtgggtgaatggggtcgacacgctagagcatgaggggggctacctccccttcgaggccgacatcagcaacctggtccaggtggggcccctgccctcccggctccgaatcactatcgccatcaacaacacactcacccccaccaccctgccaccagggaccatccaatacctgactgacacctccaagtatcccaagggttactttgtccagaacacatattttgactttttcaactacgctggactgcagcggtctgtacttctgtacacgacacccaccacctacatcgatgacatcaccgtcaccaccagcgtggagcaagacagtgggctggtgaattaccagatctctgtcaagggcagtaacctgttcaagttggaagtgcgtcttttggatgcagaaaacaaagtcgtggcgaatgggactgggacccagggccaacttaaggtgccaggtgtcagcctctggtggccgtacctgatgcacgaacgccctgcctatctgtattcattggaggtgcagctgactgcacagacgtcactggggcctgtgtctgacttctacacactccctgtggggatccgcactgtggctgtcaccaagagccagttcctcatcaatgggaaacctttctatttccacggtgtcaacaagcatgaggatgcggacatccgagggaagggcttcgactggccgctgctggtgaaggacttcaacctgcttcgctggcttggtgccaacgctttccgtaccagccactacccctatgcagaggaagtgatgcagatgtgtgaccgctatgggattgtggtcatcgatgagtgtcccggcgtgggcctggcgctgccgcagttcttcaacaacgtttctctgcatcaccacatgcaggtgatggaagaagtggtgcgtagggacaagaaccaccccgcggtcgtgatgtggtctgtggccaacgagcctgcgtcccacctagaatctgctggctactacttgaagatggtgatcgctcacaccaaatccttggacccctcccggcctgtgacctttgtgagcaactctaactatgcagcagacaagggggctccgtatgtggatgtgatctgtttgaacagctactactcttggtatcacgactacgggcacctggagttgattcagctgcagctggccacccagtttgagaactggtataagaagtatcagaagcccattattcagagcgagtatggagcagaaacgattgcagggtttcaccaggatccacctctgatgttcactgaagagtaccagaaaagtctgctagagcagtaccatctgggtctggatcaaaaacgcagaaaatacgtggttggagagctcatttggaattttgccgatttcatgactgaacagtcaccgacgagagtgctggggaataaaaaggggatcttcactcggcagagacaaccaaaaagtgcagcgttccttttgcgagagagatactggaagattgccaatgaaaccaggtatccccactcagtagccaagtcacaatgtttggaaaacagcctgtttacttgagcaagactgataccacctgcgtgtcccttcctccccgagtcagggcgacttccacagcagcagaacaagtgcctcctggactgttcacggcagaccagaacgtttctggcctgggttttgtggtcatctattctagcagggaacactaaaggtggaaataaaagattttctattatggaaataaagagttggcatgaaagtggctactgaaaaaaaaaaaaaaaaaaaaaaaaa

SEQ ID NO: 4144 - DNA, 1354 bp, Homo sapiens
  source 1..1354: mol_type = genomic DNA
gaggaaaggagggggctggaagagagtaaagggctgttgttaaacagtttcttaccgtaagagggagttcagacctagatctttccagttaatcacacaacaaacttagctcatcgcaataaaaagcagctcagagccgactggctcttttaggcactgactccgaacaggattctttcacccaggcatctcctccagagggatccgccagcccgtccagcagcaccatgtgggtgaccaaactcctgccagccctgctgctgcagcatgtcctcctgcatctcctcctgctccccatcgccatcccctatgcagagggacaaaggaaaagaagaaatacaattcatgaattcaaaaaatcagcaaagactaccctaatcaaaatagatccagcactgaagataaaaaccaaaaaagtgaatactgcagaccaatgtgctaatagatgtactaggaataaaggacttccattcacttgcaaggcttttgtttttgataaagcaagaaaacaatgcctctggttccccttcaatagcatgtcaagtggagtgaaaaaagaatttggccatgaatttgacctctatgaaaacaaagactacattagaaactgcatcattggtaaaggacgcagctacaagggaacagtatctatcactaagagtggcatcaaatgtcagccctggagttccatgataccacacgaacacagctatcggggtaaagacctacaggaaaactactgtcgaaatcctcgaggggaagaagggggaccctggtgtttcacaagcaatccagaggtacgctacgaagtctgtgacattcctcagtgttcagaagttgaatgcatgacctgcaatggggagagttatcgaggtctcatggatcatacagaatcaggcaagatttgtcagcgctgggatcatcagacaccacaccggcacaaattcttgcctgaaagatatcccgacaagggctttgatgataattattgccgcaatcccgatggccagccgaggccatggtgctatactcttgaccctcacacccgctgggagtactgtgcaattaaaacatgcgagacataacatgggctctcaactgatggtgaacttcttctggtgagtgacagaggctgcagtgaagaataatgagtctaatagaagtttatcacagatgtctctaatctttatagctgatccctacctctctcgctgtctttgtacccagcctgcattctgtttcgatctgtcttttagcagtccatacaatcatttttctacatgctggcccttacctagcttttctgaatttacaataaaaactattttttaacgtgaaaaaaaaaaaaaaaaaa

SEQ ID NO: 4145 - DNA, 5987 bp, Homo sapiens
  source 1..5987: mol_type = genomic DNA
gaggaaaggagggggctggaagagagtaaagggctgttgttaaacagtttcttaccgtaagagggagttcagacctagatctttccagttaatcacacaacaaacttagctcatcgcaataaaaagcagctcagagccgactggctcttttaggcactgactccgaacaggattctttcacccaggcatctcctccagagggatccgccagcccgtccagcagcaccatgtgggtgaccaaactcctgccagccctgctgctgcagcatgtcctcctgcatctcctcctgctccccatcgccatcccctatgcagagggacaaaggaaaagaagaaatacaattcatgaattcaaaaaatcagcaaagactaccctaatcaaaatagatccagcactgaagataaaaaccaaaaaagtgaatactgcagaccaatgtgctaatagatgtactaggaataaaggacttccattcacttgcaaggcttttgtttttgataaagcaagaaaacaatgcctctggttccccttcaatagcatgtcaagtggagtgaaaaaagaatttggccatgaatttgacctctatgaaaacaaagactacattagaaactgcatcattggtaaaggacgcagctacaagggaacagtatctatcactaagagtggcatcaaatgtcagccctggagttccatgataccacacgaacacagctatcggggtaaagacctacaggaaaactactgtcgaaatcctcgaggggaagaagggggaccctggtgtttcacaagcaatccagaggtacgctacgaagtctgtgacattcctcagtgttcagaagttgaatgcatgacctgcaatggggagagttatcgaggtctcatggatcatacagaatcaggcaagatttgtcagcgctgggatcatcagacaccacaccggcacaaattcttgcctgaaagatatcccgacaagggctttgatgataattattgccgcaatcccgatggccagccgaggccatggtgctatactcttgaccctcacacccgctgggagtactgtgcaattaaaacatgcgctgacaatactatgaatgacactgatgttcctttggaaacaactgaatgcatccaaggtcaaggagaaggctacaggggcactgtcaataccatttggaatggaattccatgtcagcgttgggattctcagtatcctcacgagcatgacatgactcctgaaaatttcaagtgcaaggacctacgagaaaattactgccgaaatccagatgggtctgaatcaccctggtgttttaccactgatccaaacatccgagttggctactgctcccaaattccaaactgtgatatgtcacatggacaagattgttatcgtgggaatggcaaaaattatatgggcaacttatcccaaacaagatctggactaacatgttcaatgtgggacaagaacatggaagacttacatcgtcatatcttctgggaaccagatgcaagtaagctgaatgagaattactgccgaaatccagatgatgatgctcatggaccctggtgctacacgggaaatccactcattccttgggattattgccctatttctcgttgtgaaggtgataccacacctacaatagtcaatttagaccatcccgtaatatcttgtgccaaaacgaaacaattgcgagttgtaaatgggattccaacacgaacaaacataggatggatggttagtttgagatacagaaataaacatatctgcggaggatcattgataaaggagagttgggttcttactgcacgacagtgtttcccttctcgagacttgaaagattatgaagcttggcttggaattcatgatgtccacggaagaggagatgagaaatgcaaacaggttctcaatgtttcccagctggtatatggccctgaaggatcagatctggttttaatgaagcttgccaggcctgctgtcctggatgattttgttagtacgattgatttacctaattatggatgcacaattcctgaaaagaccagttgcagtgtttatggctggggctacactggattgatcaactatgatggcctattacgagtggcacatctctatataatgggaaatgagaaatgcagccagcatcatcgagggaaggtgactctgaatgagtctgaaatatgtgctggggctgaaaagattggatcaggaccatgtgagggggattatggtggcccacttgtttgtgagcaacataaaatgagaatggttcttggtgtcattgttcctggtcgtggatgtgccattccaaatcgtcctggtatttttgtccgagtagcatattatgcaaaatggatacacaaaattattttaacatataaggtaccacagtcatagctgaagtaagtgtgtctgaagcacccaccaatacaactgtcttttacatgaagatttcagagaatgtggaatttaaaatgtcacttacaacaatcctaagacaactactggagagtcatgtttgttgaaattctcattaatgtttatgggtgttttctgttgttttgtttgtcagtgttattttgtcaatgttgaagtgaattaaggtacatgcaagtgtaataacatatctcctgaagatacttgaatggattaaaaaaacacacaggtatatttgctggatgataaagatttcatgggaaaaaaaatcaattaatctgtctaagctgctttctgatgttggtttcttaataatgagtaaaccacaaattaaatgttattttaacctcaccaaaacaatttataccttgtgtccctaaattgtagccctatattaaattatattacatttcatatgctatatgttatagttcattcatttctcttcaccatgtatcctgcaatactggtacacgaacacactttttacaaaaccacatacccatgtacacatgcctaggtacacatgtgcatgcactacagtttaaattatggtgtacctaatgtaacccctaaatattttagaagtatgtacctatagttttacctcaaaaaaaccagaaatctctaaagaccagtagaaatattaaaaaatgatgcaagatcaaaatgattagctaattctccatacataatctgcagatgatcttctttggttggcatttcaggtgtggccatcacccagagttaaataacacctaatctaggtgtttacatgtattcattatcctagttatttcatgtagtttctaattcttaaaggaaagagggtaatagttctatttgtgtaatttgtttcctccaaacttaaggccacttatttacacaagatatttgtagatctattttcctaaagcatttcttaagtgctcagatcagtatctaattgaagaagtttaaaagtgttttggtcattaaaaatgtacttaaataggttaaatctaagccttgctgctgtgattggcttctagctcactgcctttaaattttaaaaaatttaagaggaaaatttccaagtctccaaagttttataaatacccttcatcaagtcatgcattaaagtatatattggagaaaaaaataaaaatacttttctcaacctggaagattttagcctaataaagcttttttgaagtaaaagacaacttgtaaaaggaaagaaactagtttgtctcaactctgtattcatttattttttttttgaagtagagtggaatctgttgaatcagatattttatcaagatatgtttattttttcttatttcattttacaaagttcactcctaatgccatatgtaacagacatttaaattttgtgttctgtataacagccaaattatcatatttatcattgtatttgtcatgcttagctaaagatcatgtatttgttgagaaatagaataacaaaaagtaataggataggctttgaatttttgcagaaatcttcctgtacaaaacacctttaaaaataattttttgaatggtgtgaatccagtagtcccatttctctgacttagttttcttgagtgatttttatcaaggccaagtccccaaacaattccctaccagctctttagagtactgttcaatctggactaaaatggttttaagtttatggagagcttagtccacagaatatagggcggcgagtccagaaatgcttatacaatttttttttcataataagatatgtgctggcatcaagaaacttaaagtggaagcaaaaagacatccaactagttgctggtctctatcatcttatctgatggtatttctattttccttatataatacaccattttagtaagaactcctagaaatttcaagagcatattgccaaaatataaagtatatttcatagtttcttctggctgaaccagtgaaattttattattgcatattaatgatatttgtaaaacttttataaaaattgtcataattttaaatactcacattttaaaaatacttctttaatgactcttcctctaaatttcctggaaatacagataaagattagctagatacaagatacagctaagtatttagacattttgaggctagtatttttcattttattaaaggctaaaaacaataccaccaataaatcatcaaacaaaccgtacaaagtaattctctctttgggaggctcctttcgtgatagagggacatgggtggaattgacaatgaaacttagatgaacaaggtccatgttattttaggtggtagaacagggtagagtcatgtcattatttgctggtggaagacactatttaccaggtgttctttgctgaataaatcattaaacatttttaaaaatccaacaatccactttattttgtgtcattgacaaaaggatcttttaaatcagaaggtttcaatgcaatttttggtttggctgtttgaataatggttatgtactgttataattgtagacattttctcacgtctaccaggaattgaagtgtaaaactaaaatatttttcataatgcctctgccgtgcagaaggaatgataatccttttgtatacttctttaattttattgtaaaatgtgtaatgacttttacctatatgctgtgggcaggtcctcagtaaaatctattgagtcaatttctagtattaacaggcttttgcttgctatctaagtgtttcaaattatgggaagtgtgagacactggaaggcaagaaaattaacaataatggcatgtgatagcaaaattgtatttcacttattcctgtgaatatttcttgttggtaccaatggtactgtacaaagtgaatgttatagccacaacattctcttgaaaagaacactgtcaagaagtgggaaattgctgtcaggcatttcattgttgtttttaaacttttttaaaagaaatactggttttgcaatatagagatcatgtggtaaagaattttaataagatcttatactaaaaagccttaaatcaatttattgagattcaaaaaatactattataattaattacatcccatacatataggcaaactcatttaaaaaataaaactaattttggtaaaagtacatggcctttgtttttaaaatacataattttaaaataaatcacttgtcatgataaagtccaaaaagaagttatcattcaacattcaactaaggttggagctaagaatttactaatacaaaaaaagttaaaattttttggaccatatatatcttgacagtgtaacttttaagtaggttcatttccatttgcacagaaagtttctgtctttaggaaactgaaaatgaaatactgtggatgctatgactgtttgtcttgtatgtaaataggaaattaataagctgcctattgagtggtatagctgtatgcttacccaaaaaagggaacactgtggttatgacttgtattataaactttctgtagttaataaagttgttatttttataaccatgattatattattattattaataaaatattttatcaaaatgaaaaaaaaaaaaaaa

SEQ ID NO: 4146 - DNA, 1369 bp, Homo sapiens
  source 1..1369: mol_type = genomic DNA
gaggaaaggagggggctggaagagagtaaagggctgttgttaaacagtttcttaccgtaagagggagttcagacctagatctttccagttaatcacacaacaaacttagctcatcgcaataaaaagcagctcagagccgactggctcttttaggcactgactccgaacaggattctttcacccaggcatctcctccagagggatccgccagcccgtccagcagcaccatgtgggtgaccaaactcctgccagccctgctgctgcagcatgtcctcctgcatctcctcctgctccccatcgccatcccctatgcagagggacaaaggaaaagaagaaatacaattcatgaattcaaaaaatcagcaaagactaccctaatcaaaatagatccagcactgaagataaaaaccaaaaaagtgaatactgcagaccaatgtgctaatagatgtactaggaataaaggacttccattcacttgcaaggcttttgtttttgataaagcaagaaaacaatgcctctggttccccttcaatagcatgtcaagtggagtgaaaaaagaatttggccatgaatttgacctctatgaaaacaaagactacattagaaactgcatcattggtaaaggacgcagctacaagggaacagtatctatcactaagagtggcatcaaatgtcagccctggagttccatgataccacacgaacacagctttttgccttcgagctatcggggtaaagacctacaggaaaactactgtcgaaatcctcgaggggaagaagggggaccctggtgtttcacaagcaatccagaggtacgctacgaagtctgtgacattcctcagtgttcagaagttgaatgcatgacctgcaatggggagagttatcgaggtctcatggatcatacagaatcaggcaagatttgtcagcgctgggatcatcagacaccacaccggcacaaattcttgcctgaaagatatcccgacaagggctttgatgataattattgccgcaatcccgatggccagccgaggccatggtgctatactcttgaccctcacacccgctgggagtactgtgcaattaaaacatgcgagacataacatgggctctcaactgatggtgaacttcttctggtgagtgacagaggctgcagtgaagaataatgagtctaatagaagtttatcacagatgtctctaatctttatagctgatccctacctctctcgctgtctttgtacccagcctgcattctgtttcgatctgtcttttagcagtccatacaatcatttttctacatgctggcccttacctagcttttctgaatttacaataaaaactattttttaacgtgaaaaaaaaaaaaaaaaaa

SEQ ID NO: 4147 - DNA, 6002 bp, Homo sapiens
  source 1..6002: mol_type = genomic DNA
gaggaaaggagggggctggaagagagtaaagggctgttgttaaacagtttcttaccgtaagagggagttcagacctagatctttccagttaatcacacaacaaacttagctcatcgcaataaaaagcagctcagagccgactggctcttttaggcactgactccgaacaggattctttcacccaggcatctcctccagagggatccgccagcccgtccagcagcaccatgtgggtgaccaaactcctgccagccctgctgctgcagcatgtcctcctgcatctcctcctgctccccatcgccatcccctatgcagagggacaaaggaaaagaagaaatacaattcatgaattcaaaaaatcagcaaagactaccctaatcaaaatagatccagcactgaagataaaaaccaaaaaagtgaatactgcagaccaatgtgctaatagatgtactaggaataaaggacttccattcacttgcaaggcttttgtttttgataaagcaagaaaacaatgcctctggttccccttcaatagcatgtcaagtggagtgaaaaaagaatttggccatgaatttgacctctatgaaaacaaagactacattagaaactgcatcattggtaaaggacgcagctacaagggaacagtatctatcactaagagtggcatcaaatgtcagccctggagttccatgataccacacgaacacagctttttgccttcgagctatcggggtaaagacctacaggaaaactactgtcgaaatcctcgaggggaagaagggggaccctggtgtttcacaagcaatccagaggtacgctacgaagtctgtgacattcctcagtgttcagaagttgaatgcatgacctgcaatggggagagttatcgaggtctcatggatcatacagaatcaggcaagatttgtcagcgctgggatcatcagacaccacaccggcacaaattcttgcctgaaagatatcccgacaagggctttgatgataattattgccgcaatcccgatggccagccgaggccatggtgctatactcttgaccctcacacccgctgggagtactgtgcaattaaaacatgcgctgacaatactatgaatgacactgatgttcctttggaaacaactgaatgcatccaaggtcaaggagaaggctacaggggcactgtcaataccatttggaatggaattccatgtcagcgttgggattctcagtatcctcacgagcatgacatgactcctgaaaatttcaagtgcaaggacctacgagaaaattactgccgaaatccagatgggtctgaatcaccctggtgttttaccactgatccaaacatccgagttggctactgctcccaaattccaaactgtgatatgtcacatggacaagattgttatcgtgggaatggcaaaaattatatgggcaacttatcccaaacaagatctggactaacatgttcaatgtgggacaagaacatggaagacttacatcgtcatatcttctgggaaccagatgcaagtaagctgaatgagaattactgccgaaatccagatgatgatgctcatggaccctggtgctacacgggaaatccactcattccttgggattattgccctatttctcgttgtgaaggtgataccacacctacaatagtcaatttagaccatcccgtaatatcttgtgccaaaacgaaacaattgcgagttgtaaatgggattccaacacgaacaaacataggatggatggttagtttgagatacagaaataaacatatctgcggaggatcattgataaaggagagttgggttcttactgcacgacagtgtttcccttctcgagacttgaaagattatgaagcttggcttggaattcatgatgtccacggaagaggagatgagaaatgcaaacaggttctcaatgtttcccagctggtatatggccctgaaggatcagatctggttttaatgaagcttgccaggcctgctgtcctggatgattttgttagtacgattgatttacctaattatggatgcacaattcctgaaaagaccagttgcagtgtttatggctggggctacactggattgatcaactatgatggcctattacgagtggcacatctctatataatgggaaatgagaaatgcagccagcatcatcgagggaaggtgactctgaatgagtctgaaatatgtgctggggctgaaaagattggatcaggaccatgtgagggggattatggtggcccacttgtttgtgagcaacataaaatgagaatggttcttggtgtcattgttcctggtcgtggatgtgccattccaaatcgtcctggtatttttgtccgagtagcatattatgcaaaatggatacacaaaattattttaacatataaggtaccacagtcatagctgaagtaagtgtgtctgaagcacccaccaatacaactgtcttttacatgaagatttcagagaatgtggaatttaaaatgtcacttacaacaatcctaagacaactactggagagtcatgtttgttgaaattctcattaatgtttatgggtgttttctgttgttttgtttgtcagtgttattttgtcaatgttgaagtgaattaaggtacatgcaagtgtaataacatatctcctgaagatacttgaatggattaaaaaaacacacaggtatatttgctggatgataaagatttcatgggaaaaaaaatcaattaatctgtctaagctgctttctgatgttggtttcttaataatgagtaaaccacaaattaaatgttattttaacctcaccaaaacaatttataccttgtgtccctaaattgtagccctatattaaattatattacatttcatatgctatatgttatagttcattcatttctcttcaccatgtatcctgcaatactggtacacgaacacactttttacaaaaccacatacccatgtacacatgcctaggtacacatgtgcatgcactacagtttaaattatggtgtacctaatgtaacccctaaatattttagaagtatgtacctatagttttacctcaaaaaaaccagaaatctctaaagaccagtagaaatattaaaaaatgatgcaagatcaaaatgattagctaattctccatacataatctgcagatgatcttctttggttggcatttcaggtgtggccatcacccagagttaaataacacctaatctaggtgtttacatgtattcattatcctagttatttcatgtagtttctaattcttaaaggaaagagggtaatagttctatttgtgtaatttgtttcctccaaacttaaggccacttatttacacaagatatttgtagatctattttcctaaagcatttcttaagtgctcagatcagtatctaattgaagaagtttaaaagtgttttggtcattaaaaatgtacttaaataggttaaatctaagccttgctgctgtgattggcttctagctcactgcctttaaattttaaaaaatttaagaggaaaatttccaagtctccaaagttttataaatacccttcatcaagtcatgcattaaagtatatattggagaaaaaaataaaaatacttttctcaacctggaagattttagcctaataaagcttttttgaagtaaaagacaacttgtaaaaggaaagaaactagtttgtctcaactctgtattcatttattttttttttgaagtagagtggaatctgttgaatcagatattttatcaagatatgtttattttttcttatttcattttacaaagttcactcctaatgccatatgtaacagacatttaaattttgtgttctgtataacagccaaattatcatatttatcattgtatttgtcatgcttagctaaagatcatgtatttgttgagaaatagaataacaaaaagtaataggataggctttgaatttttgcagaaatcttcctgtacaaaacacctttaaaaataattttttgaatggtgtgaatccagtagtcccatttctctgacttagttttcttgagtgatttttatcaaggccaagtccccaaacaattccctaccagctctttagagtactgttcaatctggactaaaatggttttaagtttatggagagcttagtccacagaatatagggcggcgagtccagaaatgcttatacaatttttttttcataataagatatgtgctggcatcaagaaacttaaagtggaagcaaaaagacatccaactagttgctggtctctatcatcttatctgatggtatttctattttccttatataatacaccattttagtaagaactcctagaaatttcaagagcatattgccaaaatataaagtatatttcatagtttcttctggctgaaccagtgaaattttattattgcatattaatgatatttgtaaaacttttataaaaattgtcataattttaaatactcacattttaaaaatacttctttaatgactcttcctctaaatttcctggaaatacagataaagattagctagatacaagatacagctaagtatttagacattttgaggctagtatttttcattttattaaaggctaaaaacaataccaccaataaatcatcaaacaaaccgtacaaagtaattctctctttgggaggctcctttcgtgatagagggacatgggtggaattgacaatgaaacttagatgaacaaggtccatgttattttaggtggtagaacagggtagagtcatgtcattatttgctggtggaagacactatttaccaggtgttctttgctgaataaatcattaaacatttttaaaaatccaacaatccactttattttgtgtcattgacaaaaggatcttttaaatcagaaggtttcaatgcaatttttggtttggctgtttgaataatggttatgtactgttataattgtagacattttctcacgtctaccaggaattgaagtgtaaaactaaaatatttttcataatgcctctgccgtgcagaaggaatgataatccttttgtatacttctttaattttattgtaaaatgtgtaatgacttttacctatatgctgtgggcaggtcctcagtaaaatctattgagtcaatttctagtattaacaggcttttgcttgctatctaagtgtttcaaattatgggaagtgtgagacactggaaggcaagaaaattaacaataatggcatgtgatagcaaaattgtatttcacttattcctgtgaatatttcttgttggtaccaatggtactgtacaaagtgaatgttatagccacaacattctcttgaaaagaacactgtcaagaagtgggaaattgctgtcaggcatttcattgttgtttttaaacttttttaaaagaaatactggttttgcaatatagagatcatgtggtaaagaattttaataagatcttatactaaaaagccttaaatcaatttattgagattcaaaaaatactattataattaattacatcccatacatataggcaaactcatttaaaaaataaaactaattttggtaaaagtacatggcctttgtttttaaaatacataattttaaaataaatcacttgtcatgataaagtccaaaaagaagttatcattcaacattcaactaaggttggagctaagaatttactaatacaaaaaaagttaaaattttttggaccatatatatcttgacagtgtaacttttaagtaggttcatttccatttgcacagaaagtttctgtctttaggaaactgaaaatgaaatactgtggatgctatgactgtttgtcttgtatgtaaataggaaattaataagctgcctattgagtggtatagctgtatgcttacccaaaaaagggaacactgtggttatgacttgtattataaactttctgtagttaataaagttgttatttttataaccatgattatattattattattaataaaatattttatcaaaatgaaaaaaaaaaaaaaa

SEQ ID NO: 4148 - DNA, 2102 bp, Homo sapiens
  source 1..2102: mol_type = genomic DNA
gaggaaaggagggggctggaagagagtaaagggctgttgttaaacagtttcttaccgtaagagggagttcagacctagatctttccagttaatcacacaacaaacttagctcatcgcaataaaaagcagctcagagccgactggctcttttaggcactgactccgaacaggattctttcacccaggcatctcctccagagggatccgccagcccgtccagcagcaccatgtgggtgaccaaactcctgccagccctgctgctgcagcatgtcctcctgcatctcctcctgctccccatcgccatcccctatgcagagggacaaaggaaaagaagaaatacaattcatgaattcaaaaaatcagcaaagactaccctaatcaaaatagatccagcactgaagataaaaaccaaaaaagtgaatactgcagaccaatgtgctaatagatgtactaggaataaaggacttccattcacttgcaaggcttttgtttttgataaagcaagaaaacaatgcctctggttccccttcaatagcatgtcaagtggagtgaaaaaagaatttggccatgaatttgacctctatgaaaacaaagactacattagaaactgcatcattggtaaaggacgcagctacaagggaacagtatctatcactaagagtggcatcaaatgtcagccctggagttccatgataccacacgaacacagctttttgccttcgagctatcggggtaaagacctacaggaaaactactgtcgaaatcctcgaggggaagaagggggaccctggtgtttcacaagcaatccagaggtacgctacgaagtctgtgacattcctcagtgttcagaaggtaaataaacctgaatgccatgtgggccattctattccccctatgtgtagaactgtaactcacattaaaggttaacagcaacgaatcaatcataacaaatatgttgttcgtgcaaatgcaactacaaataattatttaaacatttttatacaatgtttttaaaactgttggattatcaccagattaatgcaaaataacagagcgagttatcagtttgaatttcaacactgcctgagacatccctctggggaaagtgaaagagagggtttacttacctactgtcttgagctcacatacctcaaaatctactactgtgtggcacctgaaaggagttgaatgaagcttagcctttcattagcaatgttaattctattcaaccagcacctgcttccacagaaattctgtccaaactatcatgaagtggtgtgacaagggtatatggacccagaagataatacaatataagaagggatcactggaagcttgaccccatgcacattttggtgaaaatgtgcctagaatcaaatgtgacacgtaggctggaactgagtaccattcagaataggatctgaagagatcaaagcaatggagaccaccaaactgtcttgaaggcatgtctatggaccttaagtccatgtctatgttttcagctcttctcacagcataaaagggcattgtccttacttttgcagtggaaaactgaatggctgacaagatggaagagtaaccatttcagcattgtatgtggtttcatttttcttagttatctggctactgaatagccggatttttcagttctgtcagaaactctaaatttccaaaaatctaagtgaaacatggatgaaactctgttagaaaattgttaggattttggagtatttggggagggggactactggaatgctgtccaagttttatactaagatatcttacctgtttgttattaaccaaatatttttaaaaatatttcctccataaatattcatttaatattaggttgatatttatcacataaaaagtaaaggctactgttagctaattgtcacagagaaggatttgttttctgttgttagtgaatttgaaatccttgactttatgtgctacagccagttccatctctgtttgtaaattcttactttccattccatatcatattctgttccctataacctcttcattgttttcttttcttttaaaaataataaacttttctatgatcaaaaaaaaaaaaaaaaaaaaaaaaaaaaaaa

SEQ ID NO: 4149 - DNA, 1929 bp, Homo sapiens
  source 1..1929: mol_type = genomic DNA
agtttcccgggagagacgaaagcaggaacgagagcggagcggagcacagtccgccgagcacaagctccagcatcccgtcaggggttgcaggtgtgtgggaggtaagcgtgggtccttcttcggggcgtctgcactgccctggagaaaacgtcttccaataggaattacatcaagacacagctaaaagagtccgcgttgggttaggaaaccggtgcaaaacctctcgggtgaaagatttacatttttcgactttaagggcaaaaaagcaaaaggaagcttgactctgggtataaagggcgtggttagtgtttttggtttgagttgcaccagtaaaactgttctgggagatctgaagattgagaaaaatcctgctaattgaggacgaggtggatgttatctggtggatgttataggcttgaaactgttacaatatggctttccttggactcttctctttgctggttctgcaaagtatggctacaggggccactttccctgaggaagccattgctgacttgtcagtgaatatgtataatcgtcttagagccactggtgaagatgaaaatattctcttctctccattgagtattgctcttgcaatgggaatgatggaacttggggcccaaggatctacccagaaagaaatccgccactcaatgggatatgacagcctaaaaaatggtgaagaattttctttcttgaaggagttttcaaacatggtaactgctaaagagagccaatatgtgatgaaaattgccaattccttgtttgtgcaaaatggatttcatgtcaatgaggagtttttgcaaatgatgaaaaaatattttaatgcagcagtaaatcatgtggacttcagtcaaaatgtagccgtggccaactacatcaataagtgggtggagaataacacaaacaatctggtgaaagatttggtatccccaagggattttgatgctgccacttatctggccctcattaatgctgtctatttcaaggggaactggaagtcgcagtttaggcctgaaaatactagaaccttttctttcactaaagatgatgaaagtgaagtccaaattccaatgatgtatcagcaaggagaattttattatggggaatttagtgatggctccaatgaagctggtggtatctaccaagtcctagaaataccatatgaaggagatgaaataagcatgatgctggtgctgtccagacaggaagttcctcttgctactctggagccattagtcaaagcacagctggttgaagaatgggcaaactctgtgaagaagcaaaaagtagaagtatacctgcccaggttcacagtggaacaggaaattgatttaaaagatgttttgaaggctcttggaataactgaaattttcatcaaagatgcaaatttgacaggcctctctgataataaggagatttttctttccaaagcaattcacaagtccttcctagaggttaatgaagaaggctcagaagctgctgctgtctcaggaatgattgcaattagtaggatggctgtgctgtatcctcaagttattgtcgaccatccatttttctttcttatcagaaacaggagaactggtacaattctattcatgggacgagtcatgcatcctgaaacaatgaacacaagtggacatgatttcgaagaactttaagttactttatttgaataacaaggaaaacagtaactaagcacattatgtttgcaactggtatatatttaggatttgtgttttacagtatatcttaagataatatttaaaatagttccagataaaaacaatatatgtaaattataagtaacttgtcaaggaatgttatcagtattaagctaatggtcctgttatgtcattgtgtttgtgtgctgttgtttaaaataaaagtacctattgaacatgtgaaaaaaaaaaaaaaaaaaaa

SEQ ID NO: 4150 - DNA, 1696 bp, Homo sapiens
  source 1..1696: mol_type = genomic DNA
agctgccaaattcgccaactagaggagggagaggcggagcttgggtccctgtagaagccagaggcgcagtctggactgtagtttcccgggagagacgaaagcaggaacgagagcggagcggagcacagtccgccgagcacaagctccagcatcccgtcaggggttgcaggtgtgtgggaggcttgaaactgttacaatatggctttccttggactcttctctttgctggttctgcaaagtatggctacaggggccactttccctgaggaagccattgctgacttgtcagtgaatatgtataatcgtcttagagccactggtgaagatgaaaatattctcttctctccattgagtattgctcttgcaatgggaatgatggaacttggggcccaaggatctacccagaaagaaatccgccactcaatgggatatgacagcctaaaaaatggtgaagaattttctttcttgaaggagttttcaaacatggtaactgctaaagagagccaatatgtgatgaaaattgccaattccttgtttgtgcaaaatggatttcatgtcaatgaggagtttttgcaaatgatgaaaaaatattttaatgcagcagtaaatcatgtggacttcagtcaaaatgtagccgtggccaactacatcaataagtgggtggagaataacacaaacaatctggtgaaagatttggtatccccaagggattttgatgctgccacttatctggccctcattaatgctgtctatttcaaggggaactggaagtcgcagtttaggcctgaaaatactagaaccttttctttcactaaagatgatgaaagtgaagtccaaattccaatgatgtatcagcaaggagaattttattatggggaatttagtgatggctccaatgaagctggtggtatctaccaagtcctagaaataccatatgaaggagatgaaataagcatgatgctggtgctgtccagacaggaagttcctcttgctactctggagccattagtcaaagcacagctggttgaagaatgggcaaactctgtgaagaagcaaaaagtagaagtatacctgcccaggttcacagtggaacaggaaattgatttaaaagatgttttgaaggctcttggaataactgaaattttcatcaaagatgcaaatttgacaggcctctctgataataaggagatttttctttccaaagcaattcacaagtccttcctagaggttaatgaagaaggctcagaagctgctgctgtctcaggaatgattgcaattagtaggatggctgtgctgtatcctcaagttattgtcgaccatccatttttctttcttatcagaaacaggagaactggtacaattctattcatgggacgagtcatgcatcctgaaacaatgaacacaagtggacatgatttcgaagaactttaagttactttatttgaataacaaggaaaacagtaactaagcacattatgtttgcaactggtatatatttaggatttgtgttttacagtatatcttaagataatatttaaaatagttccagataaaaacaatatatgtaaattataagtaacttgtcaaggaatgttatcagtattaagctaatggtcctgttatgtcattgtgtttgtgtgctgttgtttaaaataaaagtacctattgaacatgtgaaaaaaaaaaaaaaaaaaaa

SEQ ID NO: 4151 - DNA, 1375 bp, Homo sapiens
  source 1..1375: mol_type = genomic DNA
gcaaacagccggggctccagcgggagaacgataatgcaaagtgctatgttcttggctgttcaacacgactgcagacccatggacaagagcgcaggcagtggccacaagagcgaggagaagcgagaaaagatgaaacggacccttttaaaagattggaagacccgtttgagctacttcttacaaaattcctctactcctgggaagcccaaaaccggcaaaaaaagcaaacagcaagctttcatcaagccttctcctgaggaagcacagctgtggtcagaagcatttgacgagctgctagccagcaaatatggtcttgctgcattcagggcttttttaaagtcggaattctgtgaagaaaatattgaattctggctggcctgtgaagacttcaaaaaaaccaaatcaccccaaaagctgtcctcaaaagcaaggaaaatatatactgacttcatagaaaaggaagctccaaaagagataaacatagattttcaaaccaaaactctgattgcccagaatatacaagaagctacaagtggctgctttacaactgcccagaaaagggtatacagcttgatggagaacaactcttatcctcgtttcttggagtcagaattctaccaggacttgtgtaaaaagccacaaatcaccacagagcctcatgctacatgaaatgtaaaagggagcccagaaatggaggacatttcattctttttcctgaggggaaggactgtgacctgccataaagactgaccttgaattcagcctgggtgttcaggaaacatcactcagaactattgattcaaagttgggtagtgaatcaggaagccagtaactgactaggagaagctggtatcagaacagcttccctcactgtgtacagaacgcaagaagggaataggtggtctgaacgtggtgtctcactctgaaaagcaggaatgtaagatgatgaaagagacaatgtaatactgttggtccaaaagcatttaaaatcaatagatctgggattatgtggccttaggtagctggttgtacatctttccctaaatcgatccatgttaccacatagtagttttagtttaggattcagtaacagtgaagtgtttactatgtgcaacggtattgaagttcttatgaccacagatcatcagtactgttgtctcatgtaatgctaaaactgaaatggtccgtgtttgcattgttaaaaatgatgtgtgaaatagaatgagtgctatggtgttgaaaactgcagtgtccgttatgagtgccaaaaatctgtcttgaaggcagctacactttgaagtggtctttgaatacttttaataaatttattttgataaataatattgaacaaaaaaaaaaaaaaaaaaaaaaaaaa

SEQ ID NO: 4152 - DNA, 576 bp, Homo sapiens
  source 1..576: mol_type = genomic DNA
gcaccccatccgctggctctcacccctcggagacgctcgcccgacagcatagtacttgccgcccagccacgcccgcgcgccagccaccatgctaggtaacaagcgactggggctgtccggactgaccctcgccctgtccctgctcgtgtgcctgggtgcgctggccgaggcgtacccctccaagccggacaacccgggcgaggacgcaccagcggaggacatggccagatactactcggcgctgcgacactacatcaacctcatcaccaggcagagatatggaaaacgatccagcccagagacactgatttcagacctcttgatgagagaaagcacagaaaatgttcccagaactcggcttgaagaccctgcaatgtggtgatgggaaatgagacttgctctctggccttttcctattttcagcccatatttcatcgtgtaaaacgagaatccacccatcctaccaatgcatgcagccactgtgctgaattctgcaatgttttcctttgtcatcattgtatatatgtgtgtttaaataaagtatcatgcattcaaaagtgaaaaaaaaaaaaaaaa

SEQ ID NO: 4153 - DNA, 1646 bp, Homo sapiens
  source 1..1646: mol_type = genomic DNA
cactgcgaagcccagctgcgcgcgccttgggattgactgtccacgctcgcccggctcgtccgacgcgccctccgccagccgacagacacagccgcacgcactgccgtgttctccctgcggctcggacacatagtatgaccattaggtgtttcgtctcccacccattttctatggaaaaccaaggggatcgggccatgatagccactggcagctttgaagaacgggacacctttagagaagcttgatcttggaggcctcaccgtgagaccttacaaagccggattccggcagagttcctctatctcgtcttgttgctgattaaaggtgcccctgtctccagtttttctccatctcctgggacgtagcaggaaatcagcatcatggttgggttcaaggccacagatgtgccccctactgccactgtgaagtttcttggggctggcacagctgcctgcatcgcagatctcatcacctttcctctggatactgctaaagtccggttacagatccaaggagaaagtcaggggccagtgcgcgctacagccagcgcccagtaccgcggtgtgatgggcaccattctgaccatggtgcgtactgagggcccccgaagcctctacaatgggctggttgccggcctgcagcgccaaatgagctttgcctctgtccgcatcggcctgtatgattctgtcaaacagttctacaccaagggctctgagcatgccagcattgggagccgcctcctagcaggcagcaccacaggtgccctggctgtggctgtggcccagcccacggatgtggtaaaggtccgattccaagctcaggcccgggctggaggtggtcggagataccaaagcaccgtcaatgcctacaagaccattgcccgagaggaagggttccggggcctctggaaagggacctctcccaatgttgctcgtaatgccattgtcaactgtgctgagctggtgacctatgacctcatcaaggatgccctcctgaaagccaacctcatgacagatgacctcccttgccacttcacttctgcctttggggcaggcttctgcaccactgtcatcgcctcccctgtagacgtggtcaagacgagatacatgaactctgccctgggccagtacagtagcgctggccactgtgcccttaccatgctccagaaggaggggccccgagccttctacaaagggttcatgccctcctttctccgcttgggttcctggaacgtggtgatgttcgtcacctatgagcagctgaaacgagccctcatggctgcctgcacttcccgagaggctcccttctgagcctctcctgctgctgacctgatcacctctggctttgtctctagccgggccatgctttccttttcttccttctttctcttccctccttcccttctctccttccctctttccccacctcttccttccgctcctttacctaccaccttccctctttctacattctcatctactcattgtctcagtgctggtggagttgacatttgacagtgtgggaggcctcgtaccagccaggatcccaagcgtcccgtcccttggaaagttcagccagaatcttcgtcctgcccccgacagcccagcctagcccacttgtcatccataaagcaagctcaaccttgg

SEQ ID NO: 4154 - DNA, 665 bp, Homo sapiens
  source 1..665: mol_type = genomic DNA
gggagacggttgagagcacacaagccgctttaggagcgaggttcggagccatcgctgctgcctgctgatccgcgcctagagtttgaccagccactctccagctcggctttcgcggcgccgagatgctgtcctgccgcctccagtgcgcgctggctgcgctgtccatcgtcctggccctgggctgtgtcaccggcgctccctcggaccccagactccgtcagtttctgcagaagtccctggctgctgccgcggggaagcaggaactggccaagtacttcttggcagagctgctgtctgaacccaaccagacggagaatgatgccctggaacctgaagatctgtcccaggctgctgagcaggatgaaatgaggcttgagctgcagagatctgctaactcaaacccggctatggcaccccgagaacgcaaagctggctgcaagaatttcttctggaagactttcacatcctgttagctttcttaactagtattgtccatatcagacctctgatccctcgcccccacaccccatctctcttccctaatcctccaagtcttcagcgagacccttgcattagaaactgaaaactgtaaatacaaaataaaattatggtgaaattatgaaaaatgtgaaaaaaaaaaaaaaaaaaaaaaaaaaaaaaaaaaa

SEQ ID NO: 4155 - DNA, 2770 bp, Homo sapiens
  source 1..2770: mol_type = genomic DNA
gaccggggtcggggcagggggcggggccgagcgggagaccagagagccggagccggatcccgatcccgagtccgagccgccgccgccatgagctgccccgtgcccgcctgctgcgcgctgctgctagtcctggggctctgccgggcgcgtccccggaacgcactgctgctcctcgcggatgacggaggctttgagagtggcgcgtacaacaacagcgccatcgccaccccgcacctggacgccttggcccgccgcagcctcctctttcgcaatgccttcacctcggtcagcagctgctctcccagccgcgccagcctcctcactggcctgccccagcatcagaatgggatgtacgggctgcaccaggacgtgcaccacttcaactccttcgacaaggtgcggagcctgccgctgctgctcagccaagctggtgtgcgcacaggcatcatcgggaagaagcacgtggggccggagaccgtgtacccgtttgactttgcgtacacggaggagaatggctccgtcctccaggtggggcggaacatcactagaattaagctgctcgtccggaaattcctgcagactcaggatgaccggcctttcttcctctacgtcgccttccacgacccccaccgctgtgggcactcccagccccagtacggaaccttctgtgagaagtttggcaacggagagagcggcatgggtcgtatcccagactggaccccccaggcctacgacccactggacgtgctggtgccttacttcgtccccaacaccccggcagcccgagccgacctggccgctcagtacaccaccgtcggccgcatggaccaaggagttggactggtgctccaggagctgcgtgacgccggtgtcctgaacgacacactggtgatcttcacgtccgacaacgggatccccttccccagcggcaggaccaacctgtactggccgggcactgctgaacccttactggtgtcatccccggagcacccaaaacgctggggccaagtcagcgaggcctacgtgagcctcctagacctcacgcccaccatcttggattggttctcgatcccgtaccccagctacgccatctttggctcgaagaccatccacctcactggccggtccctcctgccggcgctggaggccgagcccctctgggccaccgtctttggcagccagagccaccacgaggtcaccatgtcctaccccatgcgctccgtgcagcaccggcacttccgcctcgtgcacaacctcaacttcaagatgccctttcccatcgaccaggacttctacgtctcacccaccttccaggacctcctgaaccgcaccacagctggtcagcccacgggctggtacaaggacctccgtcattactactaccgggcgcgctgggagctctacgaccggagccgggacccccacgagacccagaacctggccaccgacccgcgctttgctcagcttctggagatgcttcgggaccagctggccaagtggcagtgggagacccacgacccctgggtgtgcgcccccgacggcgtcctggaggagaagctctctccccagtgccagcccctccacaatgagctgtgaccatcccaggaggcctgtgcacacatcccaggcatgtcccagacacatcccacacgtgtccgtgtggccggccagcctggggagtagtggcaacagcccttccgtccacactcccatccaaggagggttcttccttcctgtggggtcactcttgccattgcctggagggggaccagagcatgtgaccagagcatgtgcccagcccctccaccaccaggggcactgccgtcatggcaggggacacagttgtccttgtgtctgaaccatgtcccagcacgggaattctagacatacgtggtctgcggacagggcagcgcccccagcccatgacaagggagtcttgttttctggcttggtttggggacctgcaaatgggaggcctgaggccctcttcaggctttggcagccacagatacttctgaacccttcacagagagcaggcaggggcttcggtgccgcgtgggcagtacgcaggtcccaccgacactcacctgggagcacggcgcctggctcttaccagcgtctggcctagaggaagcctttgagcgacctttgggcaggtttctgcttcttctgttttgccccatggtcaagtccctgttccccaggcaggtttcagctgattggcagcaggctccctgagtgatgagcttgaacctgtggtgtttctgggcagaagcttatcttttttgagagtgtccgaagatgaaggcatggcgatgcccgtcctctggcttgggttaattcttcggtgacactggcattgctgggtggtgatgcccgtcctctggcttgggttaattcttcggtgacactggcgttgctgggtggcaatgcccatcctctgccttgggttaattcttcggtgacactggcgttgctgggtggcgatgcccgtcctctggcttgggttaattcttggatgacgtcggcgttgctgggagaatgtgccgttcctgccctgcctccacccacctcgggagcagaagcccggcctggacacccctcggcctggacacccctcgaaggagagggcgcttccttgagtaggtgggctccccttgcccttccctccctatcactccatactggggtgggctggaggaggccacaggccagctattgtaaaagctttttattttagtaaaatatacagaagttctttttctgaaaa

SEQ ID NO: 4156 - DNA, 1927 bp, Homo sapiens
  source 1..1927: mol_type = genomic DNA
gctgggaccgccgcctgcttggaccgcagaagagcaggaggacgtctgagccatgctcgcggcgatgggctctctggcggctgccctctgggcagtggtccatcctcggactctcctactgggcactgtcgcctttctgctcgctgctgactttctcaaaagacggcgcccaaagaactacccgccggggccctggcgcctgcccttccttggcaacttcttccttgtggacttcgagcagtcgcacctggaggttcagctgtttgtgaagaaatatgggaacctttttagcttggagcttggtgacatatctgcagttcttattactggcttgcccttaatcaaagaagcccttatccacatggaccaaaactttgggaaccgccccgtgacccctatgcgagaacatatctttaagaaaaatggattgattatgtcaagtggccaggcatggaaggagcaaagaaggttcactctgacagcactaaggaactttggtttaggaaagaagagcttagaggaacgcattcaggaggaggcccaacacctcactgaagcaataaaagaggagaacggacagccttttgaccctcatttcaagatcaacaatgcagtttccaatatcatttgctccatcaccttcggagaacgctttgagtaccaggatagttggtttcagcagctgctgaagttactagatgaagtcacatacttggaggcttcaaagacatgccagctctacaatgtctttccatggataatgaaattcctgcctggaccccaccaaactctcttcagcaactggaaaaaactgaaattgtttgtttctcatatgattgacaaacacagaaaggattggaatcctgcagaaacaagagactttattgatgcttaccttaaagaaatgtcaaagcacacaggcaatcctacttcaagtttccatgaagaaaacctcatctgcagcaccctggacctcttctttgccggaaccgagacaacttccacaactctgcgatgggctctgctttatatggccctctacccagaaatccaagaaaaagtacaagctgagattgacagagtgattggccaggggcagcagccgagcacagccgcccgggagtccatgccctacaccaatgctgtcatccatgaggtgcagagaatgggcaacatcatccccctgaacgttcccagggaagtgacagttgataccactttggctgggtaccacctgcccaagggtaccatgatcctgaccaatttgacggcgctgcacagggaccccacagagtgggccacccctgacacattcaatccggaccattttctggagaatggacagtttaagaaaagggaagcctttatgcctttctcaataggaaagcgggcatgcctcggagaacagttggccaggactgagctgtttattttcttcacttcccttatgcaaaaatttaccttcaggcccccaaacaatgagaagctgagcctgaagtttagaatgggtatcaccatttccccagtcagtcaccgcctctgcgctgttcctcaggtgtaatattgttaagaaagaaaggggcaaggaaagtaagaagacatggcacgtgttctgaaaccactggtgtctgctcagatgtgttgggacaaaatgaaagtgactttcaagaaagatcagaggaatttgactcagagaaaactagatccaaatcccagctctactgtctcgtccgaattagccttgggaaaatcatttatatgctaaataatttacctttttatctaggagatgaaaagaggataatgtttccttccataaagaaagttcttgtaagaatcaaaagaaatggtgagctttaagtggtttgtaaaccataaaacacatcataaaagttctatctataaaaaaaaaaaaaaaaaaaaaaaa

SEQ ID NO: 4157 - DNA, 3690 bp, Homo sapiens
  source 1..3690: mol_type = genomic DNA
aatcggtccaattctcggccgggaagtctctggccgggacggggcagggcgaacctgccagtgactggactcagcttctttgcgtaaccaatactggaaggcatttaaaggcacctctgccgccacagaccttgcagttaactccgccctgacccacccttcccgatgcagtccctgatgcaggctcccctcctgatcgccctgggcttgcttctcgcggcccctgcgcaagcccacctgaaaaagccatcccagctcagtagcttttcctgggataactgtgatgaagggaaggaccctgcggtgatcagaagcctgactctggagcctgaccccatcatcgttcctggaaatgtgaccctcagtgtcatgggcagcaccagtgtccccctgagttctcctctgaaggtggatttagttttggagaaggaggtggctggcctctggatcaagatcccatgcacagactacattggcagctgtacctttgaacacttctgtgatgtgcttgacatgttaattcctactggggagccctgcccagagcccctgcgtacctatgggcttccttgccactgtcccttcaaagaaggaacctactcactgcccaagagcgaattcgttgtgcctgacctggagctgcccagttggctcaccaccgggaactaccgcatagagagcgtcctgagcagcagtgggaagcgtctgggctgcatcaagatcgctgcctctctaaagggcatataacatggcatctgccacagcagaatggagcggtgtgaggaaggtcccttttcctctgttttgtgtttgccaaggccaaactcccactctctgcccccctttaatcccctttctacagtgagtccactaccctcactgaaaatcattttgtaccacttacattttaggctggggcaagcagccctgacctaagggagaatgagttggacagttcttgatagcccagggcatctgctgggctgaccacgttactcatccccgttaacattctctctaaagagcctcgttcatttccaaagcagttaaggaatgggaaccagagtgttttaggacctgaagaatctttatgactctctctctttcactcttttttttttttgtcactaagttaaaagcgaagtgagagtattaacgtttttgttctcctccggccccctgttacaatgaaggggcaaaagtatttgctcttagtctattcctcccttaacttctgtgactaatttttatttcctttctagatttgcccaattaatactagggtgcagtgtatcctggagaggtagggtgtgtgggggaggaatcccttgggggagatattaggagtgctctgttgtttacaaactcaggtacccgcagggcctagcaagagacttaaatgactgataagaaccgtgagaaacatgttgcttccaggcttgatttcgatttttcgctttttttttttttgagacagaatctcactttgtcaccaggctggagtgcagtggtgcaatctcacctcactgcaacctccgcctcctgggttcaagcaattctcctgcctcagcctcccaagtagcttggactacaggccctgccaccacgcccggctaatttgtgtatttttagtagagatggggtttcaccatgttggccaggatggtctcgatctcttgacctcgtgatctgtccaccttggccttgcaaagcgctggattacaggcatgagccactacacccagccgatttttcctttttgattaaagatgctattacaatgtaaatatttcttacacagaaagtcacagcacatgtgcccattgatacaaggctgctgaggcctggtctccagttggaaatataattaagggtggcaaggactggagtcagttggagagtgcatagccagtctgtgaagacaactgccagatactggcaatactccagcctggtgacagagtgagactctgtctcaaaaaaaaagtttcaatgtttactcctagagaagccaaaaatccagatttgtatatgaaatcttaccattttaaaagattggcagctaattatttttttaaaaagctgtgcagtgtgatgtgtcccaaacggactggctcatgggtggccacgtcacaacctctgatctcagaccgtgcatgccttgtcctcttaagacaactcctgtggcaccgtttctccctccacagggccaaagccatagtgtccggtcccaaggacaaggctcttccagtgctaggagaggtatgagcagcctctcacctgtgagctgtggggatcacaaggctgcctgcctcagtcttggagtcctgttgggtgaatgaggcagatgggaaagagcctcaccagcagctgcttttggagcaggggtccaaggaagagagggtggcctcgacatcaaactgcctggatttttctaccaccctgttacatcataacaacttctgaaacacacaccagccctgagttctgggctcatttgaagcctggaatagcaataaatctttttaacttgcggacagtttccccttgccttggctgcatatttcactgatcacatctcaggatttcaaaagcatttttggggtggggctcttttggttggaagggtttgttggaacggtacaggtgagccgaggtgattccagggacggacccttctgcaggagcttgagcttgcttgttgtctctgcttcatcgccatccagctcccttgtttgctattttgctttccatcacatcatgactgcggagagcaaaaatcacctagtgaccattgaacaggtcccagagacaaaatctttttatctgaggaatttaaaagggagcaaagaccacctggtgactatcaggccatgcagaggcaaaacgccttatttggggaaaattaaaagtaattagactttcctattatctaaagcaggcatctggttccagatttcttttccccgaaaaaaaccttagaagtaactaaaatttctgtacatctccggaatgccatgctgaaactcactgcaaccccacggtcccgctttaaggtccataaatatccctaaggaaaaatccaccgtggtacattcagtcctctcaccgaggtgccccatggcagtcttctgcagcattcttctaatacctttcctttttcaaacctatactgttgttggtgaattctttttaccaacccacgagttgaccacttcccaatgccggggatctgacacctcacctggcaatgacctccacagccgtttccctctgttggatcttccagccttattctcaacagttcatttttagttcacattcttgaccgaatctcagtagctcagttaatctttttatgtctgctctgctcttgggtcatatgttccgtgaggtttcttaggggtgggggatgaggagttaaaggtggcatcttcaatcgcaggtcaaagcagactttaataaatggtgctgagccaactggaaagccccttggagaaagttgaagttagacctgtacttcacaccatatgcaagaatgaactccatctggatccaggatccaaatgtaagaaaatgaagccatataaatacagaaggaaacgtggtggaaatatccagtggcaacaaaatattgacacatttgactacatgaagataataaaaatgcttagtaaaaacacaataaaa

SEQ ID NO: 4158 - DNA, 3480 bp, Homo sapiens
  source 1..3480: mol_type = genomic DNA
aatcggtccaattctcggccgggaagtctctggccgggacggggcagggcgaacctgccagtgactggactcagcttctttgcgtaaccaatactggaaggcatttaaaggcacctctgccgccacagaccttgcagttaactccgccctgacccacccttcccgatgcagtccctgatgcaggctcccctcctgatcgccctgggcttgcttctcgcggcccctgcgcaagcccacctgaaaaagccatcccagctcagtagcttttcctgggataactgtgatgaagggaaggaccctgcggtgatcagaagcctgactctggagcctgaccccatcatcgttcctggaaatgtgaccctcagtgtcatgggcagcaccagtgtccccctgagttctcctctgaaggtggatttagttttggagaaggaggtggctggcctctggatcaagatcccatgcacagactacattggcagctgtacctttgaacacttctgtgatgtgcttgacatgttaattcctactggggagccctgcccagagcccctgcgtacctatgggcttccttgccactgtcccttttcctctgttttgtgtttgccaaggccaaactcccactctctgcccccctttaatcccctttctacagtgagtccactaccctcactgaaaatcattttgtaccacttacattttaggctggggcaagcagccctgacctaagggagaatgagttggacagttcttgatagcccagggcatctgctgggctgaccacgttactcatccccgttaacattctctctaaagagcctcgttcatttccaaagcagttaaggaatgggaaccagagtgttttaggacctgaagaatctttatgactctctctctttcactcttttttttttttgtcactaagttaaaagcgaagtgagagtattaacgtttttgttctcctccggccccctgttacaatgaaggggcaaaagtatttgctcttagtctattcctcccttaacttctgtgactaatttttatttcctttctagatttgcccaattaatactagggtgcagtgtatcctggagaggtagggtgtgtgggggaggaatcccttgggggagatattaggagtgctctgttgtttacaaactcaggtacccgcagggcctagcaagagacttaaatgactgataagaaccgtgagaaacatgttgcttccaggcttgatttcgatttttcgctttttttttttttgagacagaatctcactttgtcaccaggctggagtgcagtggtgcaatctcacctcactgcaacctccgcctcctgggttcaagcaattctcctgcctcagcctcccaagtagcttggactacaggccctgccaccacgcccggctaatttgtgtatttttagtagagatggggtttcaccatgttggccaggatggtctcgatctcttgacctcgtgatctgtccaccttggccttgcaaagcgctggattacaggcatgagccactacacccagccgatttttcctttttgattaaagatgctattacaatgtaaatatttcttacacagaaagtcacagcacatgtgcccattgatacaaggctgctgaggcctggtctccagttggaaatataattaagggtggcaaggactggagtcagttggagagtgcatagccagtctgtgaagacaactgccagatactggcaatactccagcctggtgacagagtgagactctgtctcaaaaaaaaagtttcaatgtttactcctagagaagccaaaaatccagatttgtatatgaaatcttaccattttaaaagattggcagctaattatttttttaaaaagctgtgcagtgtgatgtgtcccaaacggactggctcatgggtggccacgtcacaacctctgatctcagaccgtgcatgccttgtcctcttaagacaactcctgtggcaccgtttctccctccacagggccaaagccatagtgtccggtcccaaggacaaggctcttccagtgctaggagaggtatgagcagcctctcacctgtgagctgtggggatcacaaggctgcctgcctcagtcttggagtcctgttgggtgaatgaggcagatgggaaagagcctcaccagcagctgcttttggagcaggggtccaaggaagagagggtggcctcgacatcaaactgcctggatttttctaccaccctgttacatcataacaacttctgaaacacacaccagccctgagttctgggctcatttgaagcctggaatagcaataaatctttttaacttgcggacagtttccccttgccttggctgcatatttcactgatcacatctcaggatttcaaaagcatttttggggtggggctcttttggttggaagggtttgttggaacggtacaggtgagccgaggtgattccagggacggacccttctgcaggagcttgagcttgcttgttgtctctgcttcatcgccatccagctcccttgtttgctattttgctttccatcacatcatgactgcggagagcaaaaatcacctagtgaccattgaacaggtcccagagacaaaatctttttatctgaggaatttaaaagggagcaaagaccacctggtgactatcaggccatgcagaggcaaaacgccttatttggggaaaattaaaagtaattagactttcctattatctaaagcaggcatctggttccagatttcttttccccgaaaaaaaccttagaagtaactaaaatttctgtacatctccggaatgccatgctgaaactcactgcaaccccacggtcccgctttaaggtccataaatatccctaaggaaaaatccaccgtggtacattcagtcctctcaccgaggtgccccatggcagtcttctgcagcattcttctaatacctttcctttttcaaacctatactgttgttggtgaattctttttaccaacccacgagttgaccacttcccaatgccggggatctgacacctcacctggcaatgacctccacagccgtttccctctgttggatcttccagccttattctcaacagttcatttttagttcacattcttgaccgaatctcagtagctcagttaatctttttatgtctgctctgctcttgggtcatatgttccgtgaggtttcttaggggtgggggatgaggagttaaaggtggcatcttcaatcgcaggtcaaagcagactttaataaatggtgctgagccaactggaaagccccttggagaaagttgaagttagacctgtacttcacaccatatgcaagaatgaactccatctggatccaggatccaaatgtaagaaaatgaagccatataaatacagaaggaaacgtggtggaaatatccagtggcaacaaaatattgacacatttgactacatgaagataataaaaatgcttagtaaaaacacaataaaa

SEQ ID NO: 4159 - DNA, 2751 bp, Homo sapiens
  source 1..2751: mol_type = genomic DNA
tcacatcacaacgacttgtggttttaatcctccgtttttctgcttctgaagttacttcagcctggcaagtcctttacctccccgtaggcctggcgagctgcatcacaacattcaagattcaccctagagccatctgggaaactttcttctccaggtcgccctgcgtcctcgcctccccaccccgttcttctcgagtcgggtgagctgtctagttccatcacggccggcacggccgcaggggtggccggttatttactgctctactgggcccgtgaacagtctggcgagccgagcagttgccgacgcccggcacaatccgctgcacgtagcaggagcctcaggtccaggccggaagtgaaagggcagggtgtgggtcctcctggggtcgcaggcgcagagccgcctctggtcacgtgattcgccgataagtcacgggggcgccgctcacctgaccagggtctcacgtggccagccccctccgagaggggagaccagcgggccatgacaagctccaggctttggttttcgctgctgctggcggcagcgttcgcaggacgggcgacggccctctggccctggcctcagaacttccaaacctccgaccagcgctacgtcctttacccgaacaactttcaattccagtacgatgtcagctcggccgcgcagcccggctgctcagtcctcgacgaggccttccagcgctatcgtgacctgcttttcggttccgggtcttggccccgtccttacctcacagggaaacggcatacactggagaagaatgtgttggttgtctctgtagtcacacctggatgtaaccagcttcctactttggagtcagtggagaattataccctgaccataaatgatgaccagtgtttactcctctctgagactgtctggggagctctccgaggtctggagacttttagccagcttgtttggaaatctgctgagggcacattctttatcaacaagactgagattgaggactttccccgctttcctcaccggggcttgctgttggatacatctcgccattacctgccactctctagcatcctggacactctggatgtcatggcgtacaataaattgaacgtgttccactggcatctggtagatgatccttccttcccatatgagagcttcacttttccagagctcatgagaaaggggtcctacaaccctgtcacccacatctacacagcacaggatgtgaaggaggtcattgaatacgcacggctccggggtatccgtgtgcttgcagagtttgacactcctggccacactttgtcctggggaccaggtatccctggattactgactccttgctactctgggtctgagccctctggcacctttggaccagtgaatcccagtctcaataatacctatgagttcatgagcacattcttcttagaagtcagctctgtcttcccagatttttatcttcatcttggaggagatgaggttgatttcacctgctggaagtccaacccagagatccaggactttatgaggaagaaaggcttcggtgaggacttcaagcagctggagtccttctacatccagacgctgctggacatcgtctcttcttatggcaagggctatgtggtgtggcaggaggtgtttgataataaagtaaagattcagccagacacaatcatacaggtgtggcgagaggatattccagtgaactatatgaaggagctggaactggtcaccaaggccggcttccgggcccttctctctgccccctggtacctgaaccgtatatcctatggccctgactggaaggatttctacatagtggaacccctggcatttgaaggtacccctgagcagaaggctctggtgattggtggagaggcttgtatgtggggagaatatgtggacaacacaaacctggtccccaggctctggcccagagcaggggctgttgccgaaaggctgtggagcaacaagttgacatctgacctgacatttgcctatgaacgtttgtcacacttccgctgtgaattgctgaggcgaggtgtccaggcccaacccctcaatgtaggcttctgtgagcaggagtttgaacagacctgagccccaggcaccgaggagggtgctggctgtaggtgaatggtagtggagccaggcttccactgcatcctggccaggggacggagccccttgccttcgtgccccttgcctgcgtgcccctgtgcttggagagaaaggggccggtgctggcgctcgcattcaataaagagtaatgtggcatttttctataataaacatggattacctgtgtttaaaaaaaaaagtgtgaatggcgttagggtaagggcacagccaggctggagtcagtgtctgcccctgaggtcttttaagttgagggctgggaatgaaacctatagcctttgtgctgttctgccttgcctgtgagctatgtcactcccctcccactcctgaccatattccagacacctgccctaatcctcagcctgctcacttcacttctgcattatatctccaaggcgttggtatatggaaaaagatgtaggggcttggaggtgttctggacagtggggagggctccagacccaacctggtcacagaagagcctctcccccatgcatactcatccacctccctcccctagagctattctcctttgggtttcttgctgcttcaattttatacaaccattatttaaatattattaaacacatattgttctctaggaaaaaaaaaaaaaaaaaa

SEQ ID NO: 4160 - DNA, 1141 bp, Homo sapiens
  source 1..1141: mol_type = genomic DNA
agtgcgtctggccggcgctttatagctgcagcctgggcggctccgctagctgtttttcgtcttccctaggctatttctgccgggcgctccgcgaagatgcagctcaagccgatggagatcaaccccgagatgctgaacaaagtgctgtcccggctgggggtcgccggccagtggcgcttcgtggacgtgctggggctggaagaggagtctctgggctcggtgccagcgcctgcctgcgcgctgctgctgctgtttcccctcacggcccagcatgagaacttcaggaaaaagcagattgaagagctgaagggacaagaagttagtcctaaagtgtacttcatgaagcagaccattgggaattcctgtggcacaatcggacttattcacgcagtggccaataatcaagacaaactgggatttgaggatggatcagttctgaaacagtttctttctgaaacagagaaaatgtcccctgaagacagagcaaaatgctttgaaaagaatgaggccatacaggcagcccatgatgccgtggcacaggaaggccaatgtcgggtagatgacaaggtgaatttccattttattctgtttaacaacgtggatggccacctctatgaacttgatggacgaatgccttttccggtgaaccatggcgccagttcagaggacaccctgctgaaggacgctgccaaggtctgcagagaattcaccgagcgtgagcaaggagaagtccgcttctctgccgtggctctctgcaaggcagcctaatgctctgtgggagggactttgctgatttcccctcttcccttcaacatgaaaatatatacccccccatgcagtctaaaatgcttcagtacttgtgaaacacagctgttcttctgttctgcagacacgccttcccctcagccacacccaggcacttaagcacaagcagagtgcacagctgtccactgggccattgtggtgtgagcttcagatggtgaagcattctccccagtgtatgtcttgtatccgatatctaacgctttaaatggctactttggtttctgtctgtaagttaagaccttggatgtggtttaattgtttgtcctcaaaaggaataaaacttttctgctgataagataaaaaaaaaaaaaaaaaa

SEQ ID NO: 4161 - DNA, 1919 bp, Homo sapiens
  source 1..1919: mol_type = genomic DNA
gcagtcatctgactcggtgactcacccgcggccgcgcttcctctgatccgggccgggcgggaagtcgggtcccgaggctccggctcggcagaccgggcggaaagcagccgagcggccatggagctgtgcgggctggggctgccccggccgcccatgctgctggcgctgctgttggcgacactgctggcggcgatgttggcgctgctgactcaggtggcgctggtggtgcaggtggcggaggcggctcgggccccgagcgtctcggccaagccggggccggcgctgtggcccctgccgctctcggtgaagatgaccccgaacctgctgcatctcgccccggagaacttctacatcagccacagccccaattccacggcgggcccctcctgcaccctgctggaggaagcgtttcgacgatatcatggctatatttttggtttctacaagtggcatcatgaacctgctgaattccaggctaaaacccaggttcagcaacttcttgtctcaatcacccttcagtcagagtgtgatgctttccccaacatatcttcagatgagtcttatactttacttgtgaaagaaccagtggctgtccttaaggccaacagagtttggggagcattacgaggtttagagacctttagccagttagtttatcaagattcttatggaactttcaccatcaatgaatccaccattattgattctccaaggttttctcacagaggaattttgattgatacatccagacattatctgccagttaagattattcttaaaactctggatgccatggcttttaataagtttaatgttcttcactggcacatagttgatgaccagtctttcccatatcagagcatcacttttcctgagttaagcaataaaggaagctattctttgtctcatgtttatacaccaaatgatgtccgtatggtgattgaatatgccagattacgaggaattcgagtcctgccagaatttgatacccctgggcatacactatcttggggaaaaggtcagaaagacctcctgactccatgttacagtagacaaaacaagttggactcttttggacctataaaccctactctgaatacaacatacagcttccttactacatttttcaaagaaattagtgaggtgtttccagatcaattcattcatttgggaggagatgaagtggaatttaaatgttgggaatcaaatccaaaaattcaagatttcatgaggcaaaaaggctttggcacagattttaagaaactagaatctttctacattcaaaaggttttggatattattgcaaccataaacaagggatccattgtctggcaggaggtttttgatgataaagcaaagcttgcgccgggcacaatagttgaagtatggaaagacagcgcatatcctgaggaactcagtagagtcacagcatctggcttccctgtaatcctttctgctccttggtacttagatttgattagctatggacaagattggaggaaatactataaagtggaacctcttgattttggcggtactcagaaacagaaacaacttttcattggtggagaagcttgtctatggggagaatatgtggatgcaactaacctcactccaagattatggcctcgggcaagtgctgttggtgagagactctggagttccaaagatgtcagagatatggatgacgcctatgacagactgacaaggcaccgctgcaggatggtcgaacgtggaatagctgcacaacctctttatgctggatattgtaaccatgagaacatgtaaaaaatggaggggaaaaaggccacagcaatctgtactacaatcaactttattttgaaatcatgtaaaataagatattagactgttttttgaataaaatatttttattgattgaaaaaaaaaaaaaaaaaaaa

SEQ ID NO: 4162 - DNA, 2680 bp, Homo sapiens
  source 1..2680: mol_type = genomic DNA
cgcagaggcaccgccccaagtttgttgtgaccggcgggggacgccggtggtggcggcagcggcggctgcgggggcaccgggccgcggcgccaccatggcggtgcgacaggcgctgggccgcggcctgcagctgggtcgagcgctgctgctgcgcttcacgggcaagcccggccgggcctacggcttggggcggccgggcccggcggcgggctgtgtccgcggggagcgtccaggctgggccgcaggaccgggcgcggagcctcgcagggtcgggctcgggctccctaaccgtctccgcttcttccgccagtcggtggccgggctggcggcgcggttgcagcggcagttcgtggtgcgggcctggggctgcgcgggcccttgcggccgggcagtctttctggccttcgggctagggctgggcctcatcgaggaaaaacaggcggagagccggcgggcggtctcggcctgtcaggagatccaggcaatttttacccagaaaagcaagccggggcctgacccgttggacacgagacgcttgcagggctttcggctggaggagtatctgatagggcagtccattggtaagggctgcagtgctgctgtgtatgaagccaccatgcctacattgccccagaacctggaggtgacaaagagcaccgggttgcttccagggagaggcccaggtaccagtgcaccaggagaagggcaggagcgagctccgggggcccctgccttccccttggccatcaagatgatgtggaacatctcggcaggttcctccagcgaagccatcttgaacacaatgagccaggagctggtcccagcgagccgagtggccttggctggggagtatggagcagtcacttacagaaaatccaagagaggtcccaagcaactagcccctcaccccaacatcatccgggttctccgcgccttcacctcttccgtgccgctgctgccaggggccctggtcgactaccctgatgtgctgccctcacgcctccaccctgaaggcctgggccatggccggacgctgttcctcgttatgaagaactatccctgtaccctgcgccagtacctttgtgtgaacacacccagcccccgcctcgccgccatgatgctgctgcagctgctggaaggcgtggaccatctggttcaacagggcatcgcgcacagagacctgaaatccgacaacatccttgtggagctggacccagacggctgcccctggctggtgatcgcagattttggctgctgcctggctgatgagagcatcggcctgcagttgcccttcagcagctggtacgtggatcggggcggaaacggctgtctgatggccccagaggtgtccacggcccgtcctggccccagggcagtgattgactacagcaaggctgatgcctgggcagtgggagccatcgcctatgaaatcttcgggcttgtcaatcccttctacggccagggcaaggcccaccttgaaagccgcagctaccaagaggctcagctacctgcactgcccgagtcagtgcctccagacgtgagacagttggtgagggcactgctccagcgagaggccagcaagagaccatctgcccgagtagccgcaaatgtgcttcatctaagcctctggggtgaacatattctagccctgaagaatctgaagttagacaagatggttggctggctcctccaacaatcggccgccactttgttggccaacaggctcacagagaagtgttgtgtggaaacaaaaatgaagatgctctttctggctaacctggagtgtgaaacgctctgccaggcagccctcctcctctgctcatggagggcagccctgtgatgtccctgcatggagctggtgaattactaaaagaacatggcatcctctgtgtcgtgatggtctgtgaatggtgagggtgggagtcaggagacaagacagcgcagagagggctggttagccggaaaaggcctcgggcttggcaaatggaagaacttgagtgagagttcagtctgcagtcctctgctcacagacatctgaaaagtgaatggccaagctggtctagtagatgaggctggactgaggaggggtaggcctgcatccacagagaggatccaggccaaggcactggctgtcagtggcagagtttggctgtgacctttgcccctaacacgaggaactcgtttgaagggggcagcgtagcatgtctgatttgccacctggatgaaggcagacatcaacatgggtcagcacgttcagttacgggagtgggaaattacatgaggcctgggcctctgcgttcccaagctgtgcgttctggaccagctactgaattattaatctcacttagcgaaagtgacggatgagcagtaagtaagtaagtgtggggatttaaacttgagggtttccctcctgactagcctctcttacaggaattgtgaaatattaaatgcaaatttacaactgcagatgacgtatgtgccttgaactgaatatttggctttaagaatgattcttatactctgaaggtgagaatattttgtgggcaggtatcaacattggggaagagatttcatgtctaactaactaactttatacatgatttttaggaagctattgcctaaatcagcgtcaacatgcagtaaaggttgtcttcaactgaaaaaaaaaaaaaaaaaaaaa

SEQ ID NO: 4163 - DNA, 1641 bp, Homo sapiens
  source 1..1641: mol_type = genomic DNA
agagggcccgctcaccaccccgtaggccccgcccctgcgtctctgcccgccccgtggcgcccgagtgcactgaagatggcggctgctgtaggacggttgctccgagcgtcggttgcccgacatgtgagtgccattccttggggcatttctgccactgcagccctcaggcctgctgcatgtggaagaacgagcttgacaaatttattgtgttctggttccagtcaagcaaaattattcagcaccagttcctcatgccatgcacctgctgtcacccagcatgcaccctattttaagggtacagccgttgtcaatggagagttcaaagacctaagccttgatgactttaaggggaaatatttggtgcttttcttctatcctttggatttcacctttgtgtgtcctacagaaattgttgcttttagtgacaaagctaacgaatttcacgacgtgaactgtgaagttgtcgcagtctcagtggattcccactttagccatcttgcctggataaatacaccaagaaagaatggtggtttgggccacatgaacatcgcactcttgtcagacttaactaagcagatttcccgagactacggtgtgctgttagaaggttctggtcttgcactaagaggtctcttcataattgaccccaatggagtcatcaagcatttgagcgtcaacgatctcccagtgggccgaagcgtggaagaaaccctccgcttggtgaaggcgttccagtatgtagaaacacatggagaagtctgcccagcgaactggacaccggattctcctacgatcaagccaagtccagctgcttccaaagagtactttcagaaggtaaatcagtagatcacccatgtgtatctgcaccttctcaactgagagaagaaccacagttgaaacctgcttttatcattttcaagatggttatttgtagaaggcaaggaaccaattatgcttgtattcataagtattactctaaatgttttgtttttgtaattctggctaagaccttttaaacatggttagttgctagtacaaggaatcctttattggtaacatcttggtggctggctagctagtttctacagaacataatttgcctctatagaaggctattcttagatcatgtctcaatggaaacactcttctttcttagccttacttgaatcttgcctataataaagtagagcaacacacattgaaagcttctgatcaacggtcctgaaattttcatcttgaatgtctttgtattaaactgaattttcttttaagctaacaaagatcataattttcaatgattagccgtgtaactcctgcaatgaatgtttatgtgattgaagcaaatgtgaatcgtattattttaaaaagtggcagagtgacttaactgatcatgcatgatccctcatccctgaaattgagtttatgtagtcattttacttattttattcattagctaactttgtctatgtatatttctagatattgattagtgtaatcgattataaaggatatttatcaaatccagggattgcattttgaaattataattattttctttgctgaagtattcattgtaaaacatacaaaataaacatattttaaaacatttgcattttaccaccagtaaaaaaaaaaaaaaaa

SEQ ID NO: 4164 - DNA, 1263 bp, Homo sapiens
  source 1..1263: mol_type = genomic DNA
gactctcgcgagatccctactggctataaaggcagcgccccggagagctcttgcgcgtcttgttcttgcctggtgtcggtggttagtttctgcgacttgtgttgggactggtgagtgtgggcagtgcggcccctgcggagtgaggcgcggcgcgcccttcttgcctgttgcctcttcctcctcctgtccggggcccgcccgcgctcgggtgggggtgctgtgatgcgtgaggcagccgggggaggcccggagtccgagactgcttgagcgctgcgcacacccctctcgtgggccccccacgtaggtgcgggaacctggttgaaccccaagctgataggaagatgtcttcaggaaatgctaaaattgggcaccctgcccccaacttcaaagccacagctgttatgccagatggtcagtttaaagatatcagcctgtctgactacaaaggaaaatatgttgtgttcttcttttaccctcttgacttcacctttgtgtgccccacggagatcattgctttcagtgatagggcagaagaatttaagaaactcaactgccaagtgattggtgcttctgtggattctcacttctgtcatctagcatgggtcaatacacctaagaaacaaggaggactgggacccatgaacattcctttggtatcagacccgaagcgcaccattgctcaggattatggggtcttaaaggctgatgaaggcatctcgttcaggggcctttttatcattgatgataagggtattcttcggcagatcactgtaaatgacctccctgttggccgctctgtggatgagactttgagactagttcaggccttccagttcactgacaaacatggggaagtgtgcccagctggctggaaacctggcagtgataccatcaagcctgatgtccaaaagagcaaagaatatttctccaagcagaagtgagcgctgggctgttttagtgccaggctgcggtgggcagccatgagaacaaaacctcttctgtattttttttttccattagtaaaacacaagacttcagattcagccgaattgtggtgtcttacaaggcaggcctttcctacagggggtggagagaccagcctttcttcctttggtaggaatggcctgagttggcgttgtgggcaggctactggtttgtatgatgtattagtagagcaacccattaatcttttgtagtttgtattaaacttgaactgagaccttgatgagtctttaaaaaaaaaaaaaaaaaaaaaaaaaaaaa

SEQ ID NO: 4165 - DNA, 1237 bp, Homo sapiens
  source 1..1237: mol_type = genomic DNA
gactctcgcgagatccctactggctataaaggcagcgccccggagagctcttgcgcgtcttgttcttgcctggtgtcggtggttagtttctgcgacttgtgttgggactggtgagtgtgggcagtgcggcccctgcggagtgaggcgcggcgcgcccttcttgcctgttgcctcttcctcctcctgtccggggcccgcccgcgctcgggtgggggtgctgtgatgcgtgaggcagccgggggaggcccggagtccgagactgcttgagcgctgcgcacacccctctcgtgggccccccacgtagctgataggaagatgtcttcaggaaatgctaaaattgggcaccctgcccccaacttcaaagccacagctgttatgccagatggtcagtttaaagatatcagcctgtctgactacaaaggaaaatatgttgtgttcttcttttaccctcttgacttcacctttgtgtgccccacggagatcattgctttcagtgatagggcagaagaatttaagaaactcaactgccaagtgattggtgcttctgtggattctcacttctgtcatctagcatgggtcaatacacctaagaaacaaggaggactgggacccatgaacattcctttggtatcagacccgaagcgcaccattgctcaggattatggggtcttaaaggctgatgaaggcatctcgttcaggggcctttttatcattgatgataagggtattcttcggcagatcactgtaaatgacctccctgttggccgctctgtggatgagactttgagactagttcaggccttccagttcactgacaaacatggggaagtgtgcccagctggctggaaacctggcagtgataccatcaagcctgatgtccaaaagagcaaagaatatttctccaagcagaagtgagcgctgggctgttttagtgccaggctgcggtgggcagccatgagaacaaaacctcttctgtattttttttttccattagtaaaacacaagacttcagattcagccgaattgtggtgtcttacaaggcaggcctttcctacagggggtggagagaccagcctttcttcctttggtaggaatggcctgagttggcgttgtgggcaggctactggtttgtatgatgtattagtagagcaacccattaatcttttgtagtttgtattaaacttgaactgagaccttgatgagtctttaaaaaaaaaaaaaaaaaaaaaaaaaaaaa

SEQ ID NO: 4166 - DNA, 1043 bp, Homo sapiens
  source 1..1043: mol_type = genomic DNA
gactctcgcgagatccctactggctataaaggcagcgccccggagagctcttgcgcgtcttgttcttgcctggtgtcggtggttagtttctgcgacttgtgttgggactgctgataggaagatgtcttcaggaaatgctaaaattgggcaccctgcccccaacttcaaagccacagctgttatgccagatggtcagtttaaagatatcagcctgtctgactacaaaggaaaatatgttgtgttcttcttttaccctcttgacttcacctttgtgtgccccacggagatcattgctttcagtgatagggcagaagaatttaagaaactcaactgccaagtgattggtgcttctgtggattctcacttctgtcatctagcatgggtcaatacacctaagaaacaaggaggactgggacccatgaacattcctttggtatcagacccgaagcgcaccattgctcaggattatggggtcttaaaggctgatgaaggcatctcgttcaggggcctttttatcattgatgataagggtattcttcggcagatcactgtaaatgacctccctgttggccgctctgtggatgagactttgagactagttcaggccttccagttcactgacaaacatggggaagtgtgcccagctggctggaaacctggcagtgataccatcaagcctgatgtccaaaagagcaaagaatatttctccaagcagaagtgagcgctgggctgttttagtgccaggctgcggtgggcagccatgagaacaaaacctcttctgtattttttttttccattagtaaaacacaagacttcagattcagccgaattgtggtgtcttacaaggcaggcctttcctacagggggtggagagaccagcctttcttcctttggtaggaatggcctgagttggcgttgtgggcaggctactggtttgtatgatgtattagtagagcaacccattaatcttttgtagtttgtattaaacttgaactgagaccttgatgagtctttaaaaaaaaaaaaaaaaaaaaaaaaaaaaa

SEQ ID NO: 4167 - DNA, 2242 bp, Homo sapiens
  source 1..2242: mol_type = genomic DNA
cacagcggggcggggcgcggggctgagcaggcgcgagggctggctgctgggccgacgaggggcggtgccaggccgtgggtccttagtcaagtgacgcgaagcggccggcctgggcgccgactgcagagccgggaggctggtggtcatgccggggttcctggttcgcatcctccctctgttgctggttctgctgcttctgggccctacgcgcggcttgcgcaatgccacccagaggatgtttgaaattgactatagccgggactccttcctcaaggatggccagccatttcgctacatctcaggaagcattcactactcccgtgtgccccgcttctactggaaggaccggctgctgaagatgaagatggctgggctgaacgccatccagacattacctggcagctgtggacaagtggttgggagtccttctgcccaagatgaagcctctcctctatcagaatggagggccagttataacagtgcaggcagcaacatcacagatgctttcctaagccagaggaagtgtgagcccaaaggacccttgatcaattctgaattctatactggctggctagatcactggggccaacctcactccacaatcaagaccgaagcagtggcttcctccctctatgatatacttgcccgtggggcgagtgtgaacttgtacatgtttataggtgggaccaattttgcctattggaatggggccaactcaccctatgcagcacagcccaccagctacgactatgatgccccactgagtgaggctggggacctcactgagaagtattttgctctgcgaaacatcatccagaagtttgaaaaagtaccagaaggtcctatccctccatctacaccaaagtttgcatatggaaaggtcactttggaaaagttaaagacagtgggagcagctctggacattctgtgtccctctgggcccatcaaaagcctttatcccttgacatttatccaggtgaaacagcattatgggtttgtgctgtaccggacaacacttcctcaagattgcagcaacccagcacctctctcttcacccctcaatggagtccacgatcgagcatatgttgctgtggatgggatcccccagggagtccttgagcgaaacaatgtgatcactctgaacataacagggaaagctggagccactctggaccttctggtagagaacatgggacgtgtgaactatggtgcatatatcaacgattttaagggtttggtttctaacctgactctcagttccaatatcctcacggactggacgatctttccactggacactgaggatgcagtgcgcagccacctggggggctggggacaccgtgacagtggccaccatgatgaagcctgggcccacaactcatccaactacacgctcccggccttttatatggggaacttctccattcccagtgggatcccagacttgccccaggacacctttatccagtttcctggatggaccaagggccaggtctggattaatggctttaaccttggccgctattggccagcccggggccctcagttgaccttgtttgtgccccagcacatcctgatgacctcggccccaaacaccatcaccgtgctggaactggagtgggcaccctgcagcagtgatgatccagaactatgtgctgtgacgttcgtggacaggccagttattggctcatctgtgacctacgatcatccctccaaacctgttgaaaaaagactcatgcccccacccccgcaaaaaaacaaagattcatggctggaccatgtatgatgatgaaagcctgtgtctttgagggattctaccctgaacatacctcacagatcctccctgtcatgccacatttcactgattggaatgtggaaatggaaaaggaatttaggatgtgcattttcacctgaggtttccctgcatccctgcagtgccaaagccccaccttcagggaccacctggaatgtgtgaggggctgacagcacagtaacgtgcatacatatctgcagggctggaatggaagctttaaaggtggtagtgatttttattttggaagaatcatgttacctttttgttaaataaaatttgtactcaaatgatgatgtcactgtttttaatgtgcaggtattgaattatatggtctgacttaaatcataactagacttgagtgggctgaataaaccacttcactaacttgaagttcaaaaggatggaaaataaaaaaaaaaaaaaaaaaaa

SEQ ID NO: 4168 - DNA, 2635 bp, Homo sapiens
  source 1..2635: mol_type = genomic DNA
cacagcggggcggggcgcggggctgagcaggcgcgagggctggctgctgggccgacgaggggcggtgccaggccgtgggtccttagtcaagtgacgcgaagcggccggcctgggcgccgactgcagagccgggaggctggtggtcatgccggggttcctggttcgcatcctccctctgttgctggttctgctgcttctgggccctacgcgcggcttgcgcaatgccacccagaggatgtttgaaattgactatagccgggactccttcctcaaggatggccagccatttcgctacatctcaggaagcattcactactcccgtgtgccccgcttctactggaaggaccggctgctgaagatgaagatggctgggctgaacgccatccagacgtatgtgccctggaactttcatgagccctggccaggacagtaccagttttctgaggaccatgatgtggaatattttcttcggctggctcatgagctgggactgctggttatcctgaggcccgggccctacatctgtgcagagtgggaaatgggaggattacctgcttggctgctagagaaagagtctattcttctccgctcctccgacccagattacctggcagctgtggacaagtggttgggagtccttctgcccaagatgaagcctctcctctatcagaatggagggccagttataacagtgcaggttgaaaatgaatatggcagctactttgcctgtgattttgactacctgcgcttcctgcagaagcgctttcgccaccatctgggggatgatgtggttctgtttaccactgatggagcacataaaacattcctgaaatgtggggccctgcagggcctctacaccacggtggactttggaacaggcagcaacatcacagatgctttcctaagccagaggaagtgtgagcccaaaggacccttgatcaattctgaattctatactggctggctagatcactggggccaacctcactccacaatcaagaccgaagcagtggcttcctccctctatgatatacttgcccgtggggcgagtgtgaacttgtacatgtttataggtgggaccaattttgcctattggaatggggccaactcaccctatgcagcacagcccaccagctacgactatgatgccccactgagtgaggctggggacctcactgagaagtattttgctctgcgaaacatcatccagaagtttgaaaaagtaccagaaggtcctatccctccatctacaccaaagtttgcatatggaaaggtcactttggaaaagttaaagacagtgggagcagctctggacattctgtgtccctctgggcccatcaaaagcctttatcccttgacatttatccaggtgaaacagcattatgggtttgtgctgtaccggacaacacttcctcaagattgcagcaacccagcacctctctcttcacccctcaatggagtccacgatcgagcatatgttgctgtggatgggatcccccagggagtccttgagcgaaacaatgtgatcactctgaacataacagggaaagctggagccactctggaccttctggtagagaacatgggacgtgtgaactatggtgcatatatcaacgattttaagggtttggtttctaacctgactctcagttccaatatcctcacggactggacgatctttccactggacactgaggatgcagtgcgcagccacctggggggctggggacaccgtgacagtggccaccatgatgaagcctgggcccacaactcatccaactacacgctcccggccttttatatggggaacttctccattcccagtgggatcccagacttgccccaggacacctttatccagtttcctggatggaccaagggccaggtctggattaatggctttaaccttggccgctattggccagcccggggccctcagttgaccttgtttgtgccccagcacatcctgatgacctcggccccaaacaccatcaccgtgctggaactggagtgggcaccctgcagcagtgatgatccagaactatgtgctgtgacgttcgtggacaggccagttattggctcatctgtgacctacgatcatccctccaaacctgttgaaaaaagactcatgcccccacccccgcaaaaaaacaaagattcatggctggaccatgtatgatgatgaaagcctgtgtctttgagggattctaccctgaacatacctcacagatcctccctgtcatgccacatttcactgattggaatgtggaaatggaaaaggaatttaggatgtgcattttcacctgaggtttccctgcatccctgcagtgccaaagccccaccttcagggaccacctggaatgtgtgaggggctgacagcacagtaacgtgcatacatatctgcagggctggaatggaagctttaaaggtggtagtgatttttattttggaagaatcatgttacctttttgttaaataaaatttgtactcaaatgatgatgtcactgtttttaatgtgcaggtattgaattatatggtctgacttaaatcataactagacttgagtgggctgaataaaccacttcactaacttgaagttcaaaaggatggaaaataaaaaaaaaaaaaaaaaaaa

SEQ ID NO: 4169 - DNA, 2529 bp, Homo sapiens
  source 1..2529: mol_type = genomic DNA
cgggccgggcggggcgcgcgtccttccaggcagctcggtcgcttgtgcgttccgctccggccgccctttgcgcttggatccacttccccatctgtaacgaggtgttgagacgagaatgccacccagaggatgtttgaaattgactatagccgggactccttcctcaaggatggccagccatttcgctacatctcaggaagcattcactactcccgtgtgccccgcttctactggaaggaccggctgctgaagatgaagatggctgggctgaacgccatccagacgtatgtgccctggaactttcatgagccctggccaggacagtaccagttttctgaggaccatgatgtggaatattttcttcggctggctcatgagctgggactgctggttatcctgaggcccgggccctacatctgtgcagagtgggaaatgggaggattacctgcttggctgctagagaaagagtctattcttctccgctcctccgacccagattacctggcagctgtggacaagtggttgggagtccttctgcccaagatgaagcctctcctctatcagaatggagggccagttataacagtgcaggttgaaaatgaatatggcagctactttgcctgtgattttgactacctgcgcttcctgcagaagcgctttcgccaccatctgggggatgatgtggttctgtttaccactgatggagcacataaaacattcctgaaatgtggggccctgcagggcctctacaccacggtggactttggaacaggcagcaacatcacagatgctttcctaagccagaggaagtgtgagcccaaaggacccttgatcaattctgaattctatactggctggctagatcactggggccaacctcactccacaatcaagaccgaagcagtggcttcctccctctatgatatacttgcccgtggggcgagtgtgaacttgtacatgtttataggtgggaccaattttgcctattggaatggggccaactcaccctatgcagcacagcccaccagctacgactatgatgccccactgagtgaggctggggacctcactgagaagtattttgctctgcgaaacatcatccagaagtttgaaaaagtaccagaaggtcctatccctccatctacaccaaagtttgcatatggaaaggtcactttggaaaagttaaagacagtgggagcagctctggacattctgtgtccctctgggcccatcaaaagcctttatcccttgacatttatccaggtgaaacagcattatgggtttgtgctgtaccggacaacacttcctcaagattgcagcaacccagcacctctctcttcacccctcaatggagtccacgatcgagcatatgttgctgtggatgggatcccccagggagtccttgagcgaaacaatgtgatcactctgaacataacagggaaagctggagccactctggaccttctggtagagaacatgggacgtgtgaactatggtgcatatatcaacgattttaagggtttggtttctaacctgactctcagttccaatatcctcacggactggacgatctttccactggacactgaggatgcagtgcgcagccacctggggggctggggacaccgtgacagtggccaccatgatgaagcctgggcccacaactcatccaactacacgctcccggccttttatatggggaacttctccattcccagtgggatcccagacttgccccaggacacctttatccagtttcctggatggaccaagggccaggtctggattaatggctttaaccttggccgctattggccagcccggggccctcagttgaccttgtttgtgccccagcacatcctgatgacctcggccccaaacaccatcaccgtgctggaactggagtgggcaccctgcagcagtgatgatccagaactatgtgctgtgacgttcgtggacaggccagttattggctcatctgtgacctacgatcatccctccaaacctgttgaaaaaagactcatgcccccacccccgcaaaaaaacaaagattcatggctggaccatgtatgatgatgaaagcctgtgtctttgagggattctaccctgaacatacctcacagatcctccctgtcatgccacatttcactgattggaatgtggaaatggaaaaggaatttaggatgtgcattttcacctgaggtttccctgcatccctgcagtgccaaagccccaccttcagggaccacctggaatgtgtgaggggctgacagcacagtaacgtgcatacatatctgcagggctggaatggaagctttaaaggtggtagtgatttttattttggaagaatcatgttacctttttgttaaataaaatttgtactcaaatgatgatgtcactgtttttaatgtgcaggtattgaattatatggtctgacttaaatcataactagacttgagtgggctgaataaaccacttcactaacttgaagttcaaaaggatggaaaataaaaaaaaaaaaaaaaaaaa

SEQ ID NO: 4170 - DNA, 3540 bp, Homo sapiens
  source 1..3540: mol_type = genomic DNA
ggtggtggaatatagagctcatgtgatccgtcacatgacagcagatccgcggaagggcagaatgggactccaagcctgcctcctagggctctttgccctcatcctctctggcaaatgcagttacagcccggagcccgaccagcggaggacgctgcccccaggctgggtgtccctgggccgtgcggaccctgaggaagagctgagtctcacctttgccctgagacagcagaatgtggaaagactctcggagctggtgcaggctgtgtcggatcccagctctcctcaatacggaaaatacctgaccctagagaatgtggctgatctggtgaggccatccccactgaccctccacacggtgcaaaaatggctcttggcagccggagcccagaagtgccattctgtgatcacacaggactttctgacttgctggctgagcatccgacaagcagagctgctgctccctggggctgagtttcatcactatgtgggaggacctacggaaacccatgttgtaaggtccccacatccctaccagcttccacaggccttggccccccatgtggactttgtggggggactgcaccgttttcccccaacatcatccctgaggcaacgtcctgagccgcaggtgacagggactgtaggcctgcatctgggggtaaccccctctgtgatccgtaagcgatacaacttgacctcacaagacgtgggctctggcaccagcaataacagccaagcctgtgcccagttcctggagcagtatttccatgactcagacctggctcagttcatgcgcctcttcggtggcaactttgcacatcaggcatcagtagcccgtgtggttggacaacagggccggggccgggccgggattgaggccagtctagatgtgcagtacctgatgagtgctggtgccaacatctccacctgggtctacagtagccctggccggcatgagggacaggagcccttcctgcagtggctcatgctgctcagtaatgagtcagccctgccacatgtgcatactgtgagctatggagatgatgaggactccctcagcagcgcctacatccagcgggtcaacactgagctcatgaaggctgccgctcggggtctcaccctgctcttcgcctcaggtgacagtggggccgggtgttggtctgtctctggaagacaccagttccgccctaccttccctgcctccagcccctatgtcaccacagtgggaggcacatccttccaggaacctttcctcatcacaaatgaaattgttgactatatcagtggtggtggcttcagcaatgtgttcccacggccttcataccaggaggaagctgtaacgaagttcctgagctctagcccccacctgccaccatccagttacttcaatgccagtggccgtgcctacccagatgtggctgcactttctgatggctactgggtggtcagcaacagagtgcccattccatgggtgtccggaacctcggcctctactccagtgtttggggggatcctatccttgatcaatgagcacaggatccttagtggccgcccccctcttggctttctcaacccaaggctctaccagcagcatggggcaggactctttgatgtaacccgtggctgccatgagtcctgtctggatgaagaggtagagggccagggtttctgctctggtcctggctgggatcctgtaacaggctggggaacacccaacttcccagctttgctgaagactctactcaacccctgaccctttcctatcaggagagatggcttgtcccctgccctgaagctggcagttcagtcccttattctgccctgttggaagccctgctgaaccctcaactattgactgctgcagacagcttatctccctaaccctgaaatgctgtgagcttgacttgactcccaaccctaccatgctccatcatactcaggtctccctactcctgccttagattcctcaataagatgctgtaactagcattttttgaatgcctctccctccgcatctcatctttctcttttcaatcaggcttttccaaagggttgtatacagactctgtgcactatttcacttgatattcattccccaattcactgcaaggagacctctactgtcaccgtttactctttcctaccctgacatccagaaacaatggcctccagtgcatacttctcaatctttgctttatggcctttccatcatagttgcccactccctctccttacttagcttccaggtcttaacttctctgactactcttgtcttcctctctcatcaatttctgcttcttcatggaatgctgaccttcattgctccatttgtagatttttgctcttctcagtttactcattgtcccctggaacaaatcactgacatctacaaccattaccatctcactaaataagactttctatccaataatgattgatacctcaaatgtaagatgcgtgatactcaacatttcatcgtccaccttcccaaccccaaacaattccatctcgtttcttcttggtaaatgatgctatgctttttccaaccaagccagaaacctgtgtcatcttttcaccccaccttcaatcaacaagtcctcaatcaacaagtcctactgactgcacatcttaaatatatctttatcagtccacaagtccttccaattatatttcccaagtatatctagaacttatccacttatatccccactgctactaccttagtttagggctatattctcttgaaaaaaagtgtccttacttcctgccaatccccaagtcatcttccagagtaaaatgcaaatcccatcaggccacttggatgaaaacccttcaaggattactggatagaattcaggctttcccctccagcccccaatcatagctcacaaaccttccttgctatttgttcttaagtaaaaaatcatttttcctcctccctccccaaaccccaaggaactctcactcttgctcaagctgttccgtccccttaccacccctgatacaactgccaggttaatttccagaattcttgcaagactcagttcagaagtcaccttctttcgtgaatgttttgattccctgaggctactttattttggtatggctgaaaaatcctagattttctaaacaaaacctgtttgaatcttggttctgatatggactaggagagagactgggtcaagtaagcttatctccctgaggctgtttcctcgtctgttaagtgtgaatatcaatacctgcctttcataatcaccagggaataaagtggaataatgttgataacagtgcttggcacctggaagtaggtggcagatgttaacgcccttcctcccttgcactgcgccccctgtgcctacctctagcattgtaacgaccacgtagtattgaaatggccagtttacttgtctgccttcctttccaagaccgttggtgcctagaggactagaatcgtgtcctatttaactttgtgttcccaggtcctagctcaggagttggcaaataagaattaaatgtctgctacaccgaaaaccaaaaaaa

SEQ ID NO: 4171 - DNA, 742 bp, Homo sapiens
  source 1..742: mol_type = genomic DNA
tccaggttcacacaactggaacccatctccaggaacaaacagctggaacccatctcccgttgaagggaaactgccagatttttgtaagattcttcctcctgggagcctgtgttggaagagatggtgatgggcctgggcgttttgttgttggtcttcgtgctgggtctgggtctgaccccaccgaccctggctcaggataactccaggtacacacacttcctgacccagcactatgatgccaaaccacagggccgggatgacagatactgtgaaagcatcatgaggagacggggcctgacctcaccctgcaaagacatcaacacatttattcatggcaacaagcgcagcatcaaggccatctgtgaaaacaagaatggaaaccctcacagagaaaacctaagaataagcaagtcttctttccaggtcaccacttgcaagctacatggaggttccccctggcctccatgccagtaccgagccacagcggggttcagaaacgttgttgttgcttgtgaaaatggcttacctgtccacttggatcagtcaattttccgtcgtccgtaaccagcgggcccctggtcaagtgctggctctgctgtccttgccttccatttcccctctgcacccagaacagtggtggcaacattcattgccaagggcccaaagaaagagctacctggaccttttgttttctgtttgacaacatgtttaataaataaaaatgtcttgatatcagtaagaa

SEQ ID NO: 4172 - DNA, 1222 bp, Homo sapiens
  source 1..1222: mol_type = genomic DNA
gtcctgccaaagaaagcagcagcgaataagtacgtggcagatggtgctgtcgaccagtgtcaagaccaagtttcatgggttcctggacgctcagccaggggtagtctctgaagggccgcctggcaattgggagcagaagccagtttcccgccatctgctctccgtggaggcagtgctctcgcggctgctgcccgttggggtccagctgaggaaggagcgcggatcccaggctcgttctttgcctgggctgcccctgcggcccctggggcgggtgctgctgcggcgccagctccaagggcggatccaggcgggaggggcctcctcggagaagcggggcgcggtcccaactacgcagaggctggcacgccgaccctccacacctcaccacgcccccatctccgtccgtgtacacacactcacacaaggacgccaaccccacctagatgcaaagcaggattcaaaagaacatctttgcgttttctaccggctccccatcatcgtactagggaggaagaagcgggtgagaaacaaaacttctttccattgtcctgcccgtttctgcggacttgttctgaggccgaggagcctgtgttggaagagatggtgatgggcctgggcgttttgttgttggtcttcgtgctgggtctgggtctgaccccaccgaccctggctcaggataactccaggtacacacacttcctgacccagcactatgatgccaaaccacagggccgggatgacagatactgtgaaagcatcatgaggagacggggcctgacctcaccctgcaaagacatcaacacatttattcatggcaacaagcgcagcatcaaggccatctgtgaaaacaagaatggaaaccctcacagagaaaacctaagaataagcaagtcttctttccaggtcaccacttgcaagctacatggaggttccccctggcctccatgccagtaccgagccacagcggggttcagaaacgttgttgttgcttgtgaaaatggcttacctgtccacttggatcagtcaattttccgtcgtccgtaaccagcgggcccctggtcaagtgctggctctgctgtccttgccttccatttcccctctgcacccagaacagtggtggcaacattcattgccaagggcccaaagaaagagctacctggaccttttgttttctgtttgacaacatgtttaataaataaaaatgtcttgatatcagtaagaa

SEQ ID NO: 4173 - DNA, 1606 bp, Homo sapiens
  source 1..1606: mol_type = genomic DNA
aaatgtgaccggccgcggctccggcagtcaacgcctgcctcctctcgagcgtcctcagcgcagccgccgcccgcggagccagcacgaacgagcccagcaccggccggatggagcgtccgcaacccgacagcatgccccaggatttgtcagaggccctgaaggaggccaccaaggaggtgcacacccaggcagagaatgctgagttcatgaggaactttcagaagggccaggtgacccgagacggcttcaagctggtgatggcctccctgtaccacatctatgtggccctggaggaggagattgagcgcaacaaggagagcccagtcttcgcccctgtctacttcccagaagagctgcaccgcaaggctgccctggagcaggacctggccttctggtacgggccccgctggcaggaggtcatcccctacacaccagccatgcagcgctatgtgaagcggctccacgaggtggggcgcacagagcccgagctgctggtggcccacgcctacacccgctacctgggtgacctgtctgggggccaggtgctcaaaaagattgcccagaaagccctggacctgcccagctctggcgagggcctggccttcttcaccttccccaacattgccagtgccaccaagttcaagcagctctaccgctcccgcatgaactccctggagatgactcccgcagtcaggcagagggtgatagaagaggccaagactgcgttcctgctcaacatccagctctttgaggagttgcaggagctgctgacccatgacaccaaggaccagagcccctcacgggcaccagggcttcgccagcgggccagcaacaaagtgcaagattctgcccccgtggagactcccagagggaagcccccactcaacacccgctcccaggctccgcttctccgatgggtccttacactcagctttctggtggcgacagttgctgtagggctttatgccatgtgaatgcaggcatgctggctcccagggccatgaactttgtccggtggaaggccttctttctagagagggaattctcttggctggcttccttaccgtgggcactgaaggctttcagggcctccagccctctcactgtgtccctctctctggaaaggaggaaggagcctatggcatcttccccaacgaaaagcacatccaggcaatggcctaaacttcagagggggcgaagggatcagccctgcccttcagcatcctcagttcctgcagcagagcctggaagacaccctaatgtggcagctgtctcaaacctccaaaagccctgagtttcaagtatccttgttgacacggccatgaccactttccccgtgggccatggcaatttttacacaaacctgaaaagatgttgtgtcttgtgtttttgtcttatttttgttggagccactctgttcctggctcagcctcaaatgcagtatttttgttgtgttctgttgtttttatagcagggttggggtggtttttgagccatgcgtgggtggggagggaggtgtttaacggcactgtggccttggtctaacttttgtgtgaaataataaacaacattgtctgatagtagcttgaaaaaaaaaaaaaaaaaa

SEQ ID NO: 4174 - DNA, 5518 bp, Homo sapiens
  source 1..5518: mol_type = genomic DNA
tgaagcgtcacctctcactccccagtaagcctccgcagcccactcggactgcagcctgtttgccgcccgtcctcccattgcagcactcggggcgacagagagggaggaggcgcgcggggacggggacgcccaggaggacccactcgcgggtcccgctccgctccggcagcagcatggggaaaggacgcgcgggccgagttggcaccacagccttgcctccccgattgaaagagatgaaaagccaggaatcggctgcaggttccaaactagtccttcggtgtgaaaccagttctgaatactcctctctcagattcaagtggttcaagaatgggaatgaattgaatcgaaaaaacaaaccacaaaatatcaagatacaaaaaaagccagggaagtcagaacttcgcattaacaaagcatcactggctgattctggagagtatatgtgcaaagtgatcagcaaattaggaaatgacagtgcctctgccaatatcaccatcgtggaatcaaacgctacatctacatccaccactgggacaagccatcttgtaaaatgtgcggagaaggagaaaactttctgtgtgaatggaggggagtgcttcatggtgaaagacctttcaaacccctcgagatacttgtgcaagtgcccaaatgagtttactggtgatcgctgccaaaactacgtaatggccagcttctacaagcatcttgggattgaatttatggaggcggaggagctgtaccagaagagagtgctgaccataaccggcatctgcatcgccctccttgtggtcggcatcatgtgtgtggtggcctactgcaaaaccaagaaacagcggaaaaagctgcatgaccgtcttcggcagagccttcggtctgaacgaaacaatatgatgaacattgccaatgggcctcaccatcctaacccaccccccgagaatgtccagctggtgaatcaatacgtatctaaaaacgtcatctccagtgagcatattgttgagagagaagcagagacatccttttccaccagtcactatacttccacagcccatcactccactactgtcacccagactcctagccacagctggagcaacggacacactgaaagcatcctttccgaaagccactctgtaatcgtgatgtcatccgtagaaaacagtaggcacagcagcccaactgggggcccaagaggacgtcttaatggcacaggaggccctcgtgaatgtaacagcttcctcaggcatgccagagaaacccctgattcctaccgagactctcctcatagtgaaaggtatgtgtcagccatgaccaccccggctcgtatgtcacctgtagatttccacacgccaagctcccccaaatcgcccccttcggaaatgtctccacccgtgtccagcatgacggtgtccatgccttccatggcggtcagccccttcatggaagaagagagacctctacttctcgtgacaccaccaaggctgcgggagaagaagtttgaccatcaccctcagcagttcagctccttccaccacaaccccgcgcatgacagtaacagcctccctgctagccccttgaggatagtggaggatgaggagtatgaaacgacccaagagtacgagccagcccaagagcctgttaagaaactcgccaatagccggcgggccaaaagaaccaagcccaatggccacattgctaacagattggaagtggacagcaacacaagctcccagagcagtaactcagagagtgaaacagaagatgaaagagtaggtgaagatacgcctttcctgggcatacagaaccccctggcagccagtcttgaggcaacacctgccttccgcctggctgacagcaggactaacccagcaggccgcttctcgacacaggaagaaatccaggccaggctgtctagtgtaattgctaaccaagaccctattgctgtataaaacctaaataaacacatagattcacctgtaaaactttattttatataataaagtattccaccttaaattaaacaatttattttattttagcagttctgcaaatagaaaacaggaaaaaaacttttataaattaaatatatgtatgtaaaaatgtgttatgtgccatatgtagcaattttttacagtatttcaaaacgagaaagatatcaatggtgcctttatgttatgttatgtcgagagcaagttttgtacagttacagtgattgcttttccacagtatttctgcaaaacctctcatagattcagtttttgctggcttcttgtgcattgcattatgatgttgactggatgtatgatttgcaagacttgcaactgtccctctgtttgcttgtagtagcacccgatcagtatgtcttgtaatggcacatccatccagatatgcctctcttgtgtatgaagttttctttgctttcagaatatgaaatgagttgtgtctactctgccagccaaaggtttgcctcattgggctctgagataatagtagatccaacagcatgctactattaaatacagcaagaaactgcattaagtaatgttaaatattaggaagaaagtaatactgtgatttaaaaaaaactatattattaatcagaagacagcttgctcttactaaaaggagctctcatttactttatttgattttatttttcttgacaaaaagcaacagttttagggatagcttagaaaatgggttctggcttgctatcagggtaaatctaacaccttacaagaggactgagtgtcactttctctctgggggaatgatccagcagcttatctagttgacaatcaaaacacggctgataaaggtgcaatcatttctgacatgtatttttcactgattttgaagctagtgattggttgtgtcttcttggctcaaaaagaagcatattacggcacaaaaagcccagcccagacagcacatgcagcattttgtctgaaatacttctagagtcaaacgtgcctgctgtacatagcgatgacttgtcatcatagggaagtatttccatcgtagagtgttcagaaggagtgactgtataggtggagagaagcttagtgactccgttgaaattttaaaatgtggatgaccacccctttctcccccttatttttcttttatctttccatgttgccttgatcaggtcataactatgcatgaacattttttatcaggaatggccgatgtgtatgtgatttgtaatcacaagtaatgattcatcaggaaatgtcaatcctgttggaaagattgcacctttacttgcagaagtgacccccacctgtgtcctgacctctccatttacaggctctctcacccatttcccccacctcctttaatttttgctttactgtcataaagtaggactaagattggtctaagcattgcatgttcttttgtgatggtaaatccaaaggaaggcctataagtattaacatttgaaataactgctaattcaggaaaatggaagaaaaaaaattatttgaaacacagaacccatttcatggcctgcctgatatctgtgaaatcagggctggagctttacttaggattcacatggcctcctaggaaccatgggacaaatgggaaacaggttatcgggggattcatgaagtcagtgagagtaattgcttcttttttgcgggtgaactgaatgtatttcttcaccaaatcttgatgttaacaattaaaaagaagaaatgacatgcaagtaggtcttagcagaaaaatgcaggctgggcatgagtcatgttgttaccctcccacatgctcctacaatccacagagatgcctgtctgcaggttcttgaagttattgttagtatttggtatctcaaatttttcgtcactgttcacatgccactttctctgtgcacagtggtatcctcatttgctttttaacctacactgaggagtctttgtcaggttgcactgattttccaattctgcagtaatgagtaagctcacggcatggggaagaagacagtcagtccaatgaagttctctaaattattttaacattgcctttgaaggccttgactcatccttagctatttcaatgaagaaattcctaccatgaatttaaaaccctaaaaattctgtttcaaattctttgggcattggggtactcagatatcccattgtggaagaattttaagaataaatagaagtttctgttgagaaccatgagcaacatgtttcttacaatgagaattgctatgcattttaaaattgcaaatatatatgaaaattgaagacaagaggaaattgtatttctaacttgattctgatcactcacagaggtggcatattattatagttgggacatcctttgcacccttcataaaaaaggccagctgactgctcagcatcacctgccaaggccactagatttgtgtttacaggggtatctctgtgatgcttgtcacatcactcttgaccacctctgttaataaattccgacagtgcagtggcgatcggagtgtgaacttatgttcccagcatatggaaagctatcttaggttttaaggtagtagaaattgcccaggagtttgacagcaactttgtttcccgggtctaaaatcgtatcccactgaggtgtatgcagtggagcataatacatgcaaatacatgcaaaactccttttgtttcacctaagattcactttctatcttactttcccttcctgcctagtgtgacttttgcccccaagagtgcctggacagcattctagtttctacaaaatggtcctctgtgtaggtgaatgtgtcccaaacctgctatcactttcttgtttcagtgtgactgtcttgttagaggtgaagtttatccagggtaacttgctcactaactattcctttttatggcctggggttaaagggcgcatggctcacactggtgaaaataaggaaggcctggtcttatcttgtattaataatactggctgcattccaccagccagagatttctatctgcgaagacctatgaaacactgaagagaaatgtaggcagaaggaaatggccacatatcacaagttctattatatattcttttgtaaatacatattgtatattacttggatgttttcttatatcatttactgtctttttgagttaatgtcagtttttactctctcaacttactatgtaacattgtaaataacataatgtcctttattatttatatttaagcatctaacatatagagttgttttcatataagtttaagataaatgtcaaaaatatatgttcttttgtttttctttgctttaaaattatgtatcttttccttttcttttttttaagaataatttattgttcaggagaaagaatgtatatgtaactgaaactatctgaagaatgcacattgaaggccgtgaggtactgataaactaaagaatttattattcaaaatactaagcaataagtaattgtgatttatttaaagttttgtccattttccatgaaagacatactgcaataaaaatgctactctgtggaaaaaaaaaaaaaaaaaa

SEQ ID NO: 4175 - DNA, 5569 bp, Homo sapiens
  source 1..5569: mol_type = genomic DNA
tgaagcgtcacctctcactccccagtaagcctccgcagcccactcggactgcagcctgtttgccgcccgtcctcccattgcagcactcggggcgacagagagggaggaggcgcgcggggacggggacgcccaggaggacccactcgcgggtcccgctccgctccggcagcagcatggggaaaggacgcgcgggccgagttggcaccacagccttgcctccccgattgaaagagatgaaaagccaggaatcggctgcaggttccaaactagtccttcggtgtgaaaccagttctgaatactcctctctcagattcaagtggttcaagaatgggaatgaattgaatcgaaaaaacaaaccacaaaatatcaagatacaaaaaaagccagggaagtcagaacttcgcattaacaaagcatcactggctgattctggagagtatatgtgcaaagtgatcagcaaattaggaaatgacagtgcctctgccaatatcaccatcgtggaatcaaacgagatcatcactggtatgccagcctcaactgaaggagcatatgtgtcttcagctacatctacatccaccactgggacaagccatcttgtaaaatgtgcggagaaggagaaaactttctgtgtgaatggaggggagtgcttcatggtgaaagacctttcaaacccctcgagatacttgtgcaagtgcccaaatgagtttactggtgatcgctgccaaaactacgtaatggccagcttctacaagcatcttgggattgaatttatggaggcggaggagctgtaccagaagagagtgctgaccataaccggcatctgcatcgccctccttgtggtcggcatcatgtgtgtggtggcctactgcaaaaccaagaaacagcggaaaaagctgcatgaccgtcttcggcagagccttcggtctgaacgaaacaatatgatgaacattgccaatgggcctcaccatcctaacccaccccccgagaatgtccagctggtgaatcaatacgtatctaaaaacgtcatctccagtgagcatattgttgagagagaagcagagacatccttttccaccagtcactatacttccacagcccatcactccactactgtcacccagactcctagccacagctggagcaacggacacactgaaagcatcctttccgaaagccactctgtaatcgtgatgtcatccgtagaaaacagtaggcacagcagcccaactgggggcccaagaggacgtcttaatggcacaggaggccctcgtgaatgtaacagcttcctcaggcatgccagagaaacccctgattcctaccgagactctcctcatagtgaaaggtatgtgtcagccatgaccaccccggctcgtatgtcacctgtagatttccacacgccaagctcccccaaatcgcccccttcggaaatgtctccacccgtgtccagcatgacggtgtccatgccttccatggcggtcagccccttcatggaagaagagagacctctacttctcgtgacaccaccaaggctgcgggagaagaagtttgaccatcaccctcagcagttcagctccttccaccacaaccccgcgcatgacagtaacagcctccctgctagccccttgaggatagtggaggatgaggagtatgaaacgacccaagagtacgagccagcccaagagcctgttaagaaactcgccaatagccggcgggccaaaagaaccaagcccaatggccacattgctaacagattggaagtggacagcaacacaagctcccagagcagtaactcagagagtgaaacagaagatgaaagagtaggtgaagatacgcctttcctgggcatacagaaccccctggcagccagtcttgaggcaacacctgccttccgcctggctgacagcaggactaacccagcaggccgcttctcgacacaggaagaaatccaggccaggctgtctagtgtaattgctaaccaagaccctattgctgtataaaacctaaataaacacatagattcacctgtaaaactttattttatataataaagtattccaccttaaattaaacaatttattttattttagcagttctgcaaatagaaaacaggaaaaaaacttttataaattaaatatatgtatgtaaaaatgtgttatgtgccatatgtagcaattttttacagtatttcaaaacgagaaagatatcaatggtgcctttatgttatgttatgtcgagagcaagttttgtacagttacagtgattgcttttccacagtatttctgcaaaacctctcatagattcagtttttgctggcttcttgtgcattgcattatgatgttgactggatgtatgatttgcaagacttgcaactgtccctctgtttgcttgtagtagcacccgatcagtatgtcttgtaatggcacatccatccagatatgcctctcttgtgtatgaagttttctttgctttcagaatatgaaatgagttgtgtctactctgccagccaaaggtttgcctcattgggctctgagataatagtagatccaacagcatgctactattaaatacagcaagaaactgcattaagtaatgttaaatattaggaagaaagtaatactgtgatttaaaaaaaactatattattaatcagaagacagcttgctcttactaaaaggagctctcatttactttatttgattttatttttcttgacaaaaagcaacagttttagggatagcttagaaaatgggttctggcttgctatcagggtaaatctaacaccttacaagaggactgagtgtcactttctctctgggggaatgatccagcagcttatctagttgacaatcaaaacacggctgataaaggtgcaatcatttctgacatgtatttttcactgattttgaagctagtgattggttgtgtcttcttggctcaaaaagaagcatattacggcacaaaaagcccagcccagacagcacatgcagcattttgtctgaaatacttctagagtcaaacgtgcctgctgtacatagcgatgacttgtcatcatagggaagtatttccatcgtagagtgttcagaaggagtgactgtataggtggagagaagcttagtgactccgttgaaattttaaaatgtggatgaccacccctttctcccccttatttttcttttatctttccatgttgccttgatcaggtcataactatgcatgaacattttttatcaggaatggccgatgtgtatgtgatttgtaatcacaagtaatgattcatcaggaaatgtcaatcctgttggaaagattgcacctttacttgcagaagtgacccccacctgtgtcctgacctctccatttacaggctctctcacccatttcccccacctcctttaatttttgctttactgtcataaagtaggactaagattggtctaagcattgcatgttcttttgtgatggtaaatccaaaggaaggcctataagtattaacatttgaaataactgctaattcaggaaaatggaagaaaaaaaattatttgaaacacagaacccatttcatggcctgcctgatatctgtgaaatcagggctggagctttacttaggattcacatggcctcctaggaaccatgggacaaatgggaaacaggttatcgggggattcatgaagtcagtgagagtaattgcttcttttttgcgggtgaactgaatgtatttcttcaccaaatcttgatgttaacaattaaaaagaagaaatgacatgcaagtaggtcttagcagaaaaatgcaggctgggcatgagtcatgttgttaccctcccacatgctcctacaatccacagagatgcctgtctgcaggttcttgaagttattgttagtatttggtatctcaaatttttcgtcactgttcacatgccactttctctgtgcacagtggtatcctcatttgctttttaacctacactgaggagtctttgtcaggttgcactgattttccaattctgcagtaatgagtaagctcacggcatggggaagaagacagtcagtccaatgaagttctctaaattattttaacattgcctttgaaggccttgactcatccttagctatttcaatgaagaaattcctaccatgaatttaaaaccctaaaaattctgtttcaaattctttgggcattggggtactcagatatcccattgtggaagaattttaagaataaatagaagtttctgttgagaaccatgagcaacatgtttcttacaatgagaattgctatgcattttaaaattgcaaatatatatgaaaattgaagacaagaggaaattgtatttctaacttgattctgatcactcacagaggtggcatattattatagttgggacatcctttgcacccttcataaaaaaggccagctgactgctcagcatcacctgccaaggccactagatttgtgtttacaggggtatctctgtgatgcttgtcacatcactcttgaccacctctgttaataaattccgacagtgcagtggcgatcggagtgtgaacttatgttcccagcatatggaaagctatcttaggttttaaggtagtagaaattgcccaggagtttgacagcaactttgtttcccgggtctaaaatcgtatcccactgaggtgtatgcagtggagcataatacatgcaaatacatgcaaaactccttttgtttcacctaagattcactttctatcttactttcccttcctgcctagtgtgacttttgcccccaagagtgcctggacagcattctagtttctacaaaatggtcctctgtgtaggtgaatgtgtcccaaacctgctatcactttcttgtttcagtgtgactgtcttgttagaggtgaagtttatccagggtaacttgctcactaactattcctttttatggcctggggttaaagggcgcatggctcacactggtgaaaataaggaaggcctggtcttatcttgtattaataatactggctgcattccaccagccagagatttctatctgcgaagacctatgaaacactgaagagaaatgtaggcagaaggaaatggccacatatcacaagttctattatatattcttttgtaaatacatattgtatattacttggatgttttcttatatcatttactgtctttttgagttaatgtcagtttttactctctcaacttactatgtaacattgtaaataacataatgtcctttattatttatatttaagcatctaacatatagagttgttttcatataagtttaagataaatgtcaaaaatatatgttcttttgtttttctttgctttaaaattatgtatcttttccttttcttttttttaagaataatttattgttcaggagaaagaatgtatatgtaactgaaactatctgaagaatgcacattgaaggccgtgaggtactgataaactaaagaatttattattcaaaatactaagcaataagtaattgtgatttatttaaagttttgtccattttccatgaaagacatactgcaataaaaatgctactctgtggaaaaaaaaaaaaaaaaaa

SEQ ID NO: 4176 - DNA, 1592 bp, Homo sapiens
  source 1..1592: mol_type = genomic DNA
gaggccaggggagggtgcgaaggaggcgcctgcctccaacctgcgggcgggaggtgggtggctgcggggcaattgaaaaagagccggcgaggagttccccgaaacttgttggaactccgggctcgcgcggaggccaggagctgagcggcggcggctgccggacgatgggagcgtgagcaggacggtgataacctctccccgatcgggttgcgagggcgccgggcagaggccaggacgcgagccgccagcggtgggacccatcgacgacttcccggggcgacaggagcagccccgagagccagggcgagcgcccgttccaggtggccggaccgcccgccgcgtccgcgccgcgctccctgcaggcaacgggagacgcccccgcgcagcgcgagcgcctcagcgcggccgctcgctctccccctcgagggacaaacttttcccaaacccgatccgagcccttggaccaaactcgcctgcgccgagagccgtccgcgtagagcgctccgtctccggcgagatgtccgagcgcaaagaaggcagaggcaaagggaagggcaagaagaaggagcgaggctccggcaagaagccggagtccgcggcgggcagccagagcccagccttgcctccccgattgaaagagatgaaaagccaggaatcggctgcaggttccaaactagtccttcggtgtgaaaccagttctgaatactcctctctcagattcaagtggttcaagaatgggaatgaattgaatcgaaaaaacaaaccacaaaatatcaagatacaaaaaaagccagggaagtcagaacttcgcattaacaaagcatcactggctgattctggagagtatatgtgcaaagtgatcagcaaattaggaaatgacagtgcctctgccaatatcaccatcgtggaatcaaacgctacatctacatccaccactgggacaagccatcttgtaaaatgtgcggagaaggagaaaactttctgtgtgaatggaggggagtgcttcatggtgaaagacctttcaaacccctcgagatacttgtgcaagtaagaaaagaaatcctgtgtgtcgcttatgtctataactccttgtttcagatgattctatgtctcatgatgtattgttgctttttttccaattttgttgcatcatgttgaataatgctgttttatatgtagagtgttttaaaacattcacaccattcgtcatcactcctctgtcatatgcagaattgttttttgctcttttcaatgtgtgtgaggtgttttttgtttttgtttttgttttttgccatgttatttatagtgttgctttccttgtggtttttcttgttgttattcagaaaagatgtgcagatatcacagaggcctataacttttggtatctacttctacatccaatgtatgaattaagctgtaagataatgttgctttcttatcccagtgatcacctgccaaatgaataagacaacaaagagaagcagaagggcagaagattatttactgacatatatctattacacttgggattgtcttactgttgcataactattttttaaacggagtttagttttatattgctagtaaaaaaa

SEQ ID NO: 4177 - DNA, 2377 bp, Homo sapiens
  source 1..2377: mol_type = genomic DNA
gaggccaggggagggtgcgaaggaggcgcctgcctccaacctgcgggcgggaggtgggtggctgcggggcaattgaaaaagagccggcgaggagttccccgaaacttgttggaactccgggctcgcgcggaggccaggagctgagcggcggcggctgccggacgatgggagcgtgagcaggacggtgataacctctccccgatcgggttgcgagggcgccgggcagaggccaggacgcgagccgccagcggtgggacccatcgacgacttcccggggcgacaggagcagccccgagagccagggcgagcgcccgttccaggtggccggaccgcccgccgcgtccgcgccgcgctccctgcaggcaacgggagacgcccccgcgcagcgcgagcgcctcagcgcggccgctcgctctccccctcgagggacaaacttttcccaaacccgatccgagcccttggaccaaactcgcctgcgccgagagccgtccgcgtagagcgctccgtctccggcgagatgtccgagcgcaaagaaggcagaggcaaagggaagggcaagaagaaggagcgaggctccggcaagaagccggagtccgcggcgggcagccagagcccagccttgcctccccgattgaaagagatgaaaagccaggaatcggctgcaggttccaaactagtccttcggtgtgaaaccagttctgaatactcctctctcagattcaagtggttcaagaatgggaatgaattgaatcgaaaaaacaaaccacaaaatatcaagatacaaaaaaagccagggaagtcagaacttcgcattaacaaagcatcactggctgattctggagagtatatgtgcaaagtgatcagcaaattaggaaatgacagtgcctctgccaatatcaccatcgtggaatcaaacgagatcatcactggtatgccagcctcaactgaaggagcatatgtgtcttcagagtctcccattagaatatcagtatccacagaaggagcaaatacttcttcatctacatctacatccaccactgggacaagccatcttgtaaaatgtgcggagaaggagaaaactttctgtgtgaatggaggggagtgcttcatggtgaaagacctttcaaacccctcgagatacttgtgcaagtgcccaaatgagtttactggtgatcgctgccaaaactacgtaatggccagcttctacaaggcggaggagctgtaccagaagagagtgctgaccataaccggcatctgcatcgccctccttgtggtcggcatcatgtgtgtggtggcctactgcaaaaccaagaaacagcggaaaaagctgcatgaccgtcttcggcagagccttcggtctgaacgaaacaatatgatgaacattgccaatgggcctcaccatcctaacccaccccccgagaatgtccagctggtgaatcaatacgtatctaaaaacgtcatctccagtgagcatattgttgagagagaagcagagacatccttttccaccagtcactatacttccacagcccatcactccactactgtcacccagactcctagccacagctggagcaacggacacactgaaagcatcctttccgaaagccactctgtaatcgtgatgtcatccgtagaaaacagtaggcacagcagcccaactgggggcccaagaggacgtcttaatggcacaggaggccctcgtgaatgtaacagcttcctcaggcatgccagagaaacccctgattcctaccgagactctcctcatagtgaaaggtaaaaccgaagggcaaagctactgcagaggagaaactcagtcagagaatccctgtgagcacctgcggtctcacctcaggaaatctactctaatcagaataaggggcggcagttacctgttctaggagtgctcctagttgatgaagtcatctctttgtttgacggaacttatttcttctgagcttctctcgtcgtcccagtgactgacaggcaacagactcttaaagagctgggatgctttgatgcggaaggtgcagcacatggagtttccagctctggccatgggctcagacccactcggggtctcagtgtcctcagttgtaacattagagagatggcatcaatgcttgataaggacccttctataattccaattgccagttatccaaactctgattcggtggtcgagctggcctcgtgttcttatctgctaaccctgtcttaccttccagcctcagttaagtcaaatcaagggctatgtcattgctgaatgtcatggggggcaactgcttgccctccaccctatagtatctattttatgaaattccaagaagggatgaataaataaatctcttggatgctgaaaaaaaaaaaaaaaaaa

SEQ ID NO: 4178 - DNA, 5425 bp, Homo sapiens
  source 1..5425: mol_type = genomic DNA
tctgaacctttcctttggaaaactaatgactccacctatcattcccttggcatctagagaagctacattaggtggcacagctctttctgctcagcttctgctccagagcttcatcttcaggaaccacctaagcatttttttccccagtaggagttcagtctgctcattatacctaattgcaaaggagctatattcagagcaagaataataatttcagattttttaactggacttcaaagagcaggaaagtatgcagattcctaaacacataagcattgaagatattacagctacatctacatccaccactgggacaagccatcttgtaaaatgtgcggagaaggagaaaactttctgtgtgaatggaggggagtgcttcatggtgaaagacctttcaaacccctcgagatacttgtgcaagtgccaacctggattcactggagcaagatgtactgagaatgtgcccatgaaagtccaaaaccaagaaaaggcggaggagctgtaccagaagagagtgctgaccataaccggcatctgcatcgccctccttgtggtcggcatcatgtgtgtggtggcctactgcaaaaccaagaaacagcggaaaaagctgcatgaccgtcttcggcagagccttcggtctgaacgaaacaatatgatgaacattgccaatgggcctcaccatcctaacccaccccccgagaatgtccagctggtgaatcaatacgtatctaaaaacgtcatctccagtgagcatattgttgagagagaagcagagacatccttttccaccagtcactatacttccacagcccatcactccactactgtcacccagactcctagccacagctggagcaacggacacactgaaagcatcctttccgaaagccactctgtaatcgtgatgtcatccgtagaaaacagtaggcacagcagcccaactgggggcccaagaggacgtcttaatggcacaggaggccctcgtgaatgtaacagcttcctcaggcatgccagagaaacccctgattcctaccgagactctcctcatagtgaaagacataaccttatagctgagctaaggagaaacaaggcacacagatccaaatgcatgcagatccagctatcagcaactcatcttagatcttcttccattccccatttgggcttcattctctaagaccccttggcctttaggaaggtatgtgtcagccatgaccaccccggctcgtatgtcacctgtagatttccacacgccaagctcccccaaatcgcccccttcggaaatgtctccacccgtgtccagcatgacggtgtccatgccttccatggcggtcagccccttcatggaagaagagagacctctacttctcgtgacaccaccaaggctgcgggagaagaagtttgaccatcaccctcagcagttcagctccttccaccacaaccccgcgcatgacagtaacagcctccctgctagccccttgaggatagtggaggatgaggagtatgaaacgacccaagagtacgagccagcccaagagcctgttaagaaactcgccaatagccggcgggccaaaagaaccaagcccaatggccacattgctaacagattggaagtggacagcaacacaagctcccagagcagtaactcagagagtgaaacagaagatgaaagagtaggtgaagatacgcctttcctgggcatacagaaccccctggcagccagtcttgaggcaacacctgccttccgcctggctgacagcaggactaacccagcaggccgcttctcgacacaggaagaaatccaggccaggctgtctagtgtaattgctaaccaagaccctattgctgtataaaacctaaataaacacatagattcacctgtaaaactttattttatataataaagtattccaccttaaattaaacaatttattttattttagcagttctgcaaatagaaaacaggaaaaaaacttttataaattaaatatatgtatgtaaaaatgtgttatgtgccatatgtagcaattttttacagtatttcaaaacgagaaagatatcaatggtgcctttatgttatgttatgtcgagagcaagttttgtacagttacagtgattgcttttccacagtatttctgcaaaacctctcatagattcagtttttgctggcttcttgtgcattgcattatgatgttgactggatgtatgatttgcaagacttgcaactgtccctctgtttgcttgtagtagcacccgatcagtatgtcttgtaatggcacatccatccagatatgcctctcttgtgtatgaagttttctttgctttcagaatatgaaatgagttgtgtctactctgccagccaaaggtttgcctcattgggctctgagataatagtagatccaacagcatgctactattaaatacagcaagaaactgcattaagtaatgttaaatattaggaagaaagtaatactgtgatttaaaaaaaactatattattaatcagaagacagcttgctcttactaaaaggagctctcatttactttatttgattttatttttcttgacaaaaagcaacagttttagggatagcttagaaaatgggttctggcttgctatcagggtaaatctaacaccttacaagaggactgagtgtcactttctctctgggggaatgatccagcagcttatctagttgacaatcaaaacacggctgataaaggtgcaatcatttctgacatgtatttttcactgattttgaagctagtgattggttgtgtcttcttggctcaaaaagaagcatattacggcacaaaaagcccagcccagacagcacatgcagcattttgtctgaaatacttctagagtcaaacgtgcctgctgtacatagcgatgacttgtcatcatagggaagtatttccatcgtagagtgttcagaaggagtgactgtataggtggagagaagcttagtgactccgttgaaattttaaaatgtggatgaccacccctttctcccccttatttttcttttatctttccatgttgccttgatcaggtcataactatgcatgaacattttttatcaggaatggccgatgtgtatgtgatttgtaatcacaagtaatgattcatcaggaaatgtcaatcctgttggaaagattgcacctttacttgcagaagtgacccccacctgtgtcctgacctctccatttacaggctctctcacccatttcccccacctcctttaatttttgctttactgtcataaagtaggactaagattggtctaagcattgcatgttcttttgtgatggtaaatccaaaggaaggcctataagtattaacatttgaaataactgctaattcaggaaaatggaagaaaaaaaattatttgaaacacagaacccatttcatggcctgcctgatatctgtgaaatcagggctggagctttacttaggattcacatggcctcctaggaaccatgggacaaatgggaaacaggttatcgggggattcatgaagtcagtgagagtaattgcttcttttttgcgggtgaactgaatgtatttcttcaccaaatcttgatgttaacaattaaaaagaagaaatgacatgcaagtaggtcttagcagaaaaatgcaggctgggcatgagtcatgttgttaccctcccacatgctcctacaatccacagagatgcctgtctgcaggttcttgaagttattgttagtatttggtatctcaaatttttcgtcactgttcacatgccactttctctgtgcacagtggtatcctcatttgctttttaacctacactgaggagtctttgtcaggttgcactgattttccaattctgcagtaatgagtaagctcacggcatggggaagaagacagtcagtccaatgaagttctctaaattattttaacattgcctttgaaggccttgactcatccttagctatttcaatgaagaaattcctaccatgaatttaaaaccctaaaaattctgtttcaaattctttgggcattggggtactcagatatcccattgtggaagaattttaagaataaatagaagtttctgttgagaaccatgagcaacatgtttcttacaatgagaattgctatgcattttaaaattgcaaatatatatgaaaattgaagacaagaggaaattgtatttctaacttgattctgatcactcacagaggtggcatattattatagttgggacatcctttgcacccttcataaaaaaggccagctgactgctcagcatcacctgccaaggccactagatttgtgtttacaggggtatctctgtgatgcttgtcacatcactcttgaccacctctgttaataaattccgacagtgcagtggcgatcggagtgtgaacttatgttcccagcatatggaaagctatcttaggttttaaggtagtagaaattgcccaggagtttgacagcaactttgtttcccgggtctaaaatcgtatcccactgaggtgtatgcagtggagcataatacatgcaaatacatgcaaaactccttttgtttcacctaagattcactttctatcttactttcccttcctgcctagtgtgacttttgcccccaagagtgcctggacagcattctagtttctacaaaatggtcctctgtgtaggtgaatgtgtcccaaacctgctatcactttcttgtttcagtgtgactgtcttgttagaggtgaagtttatccagggtaacttgctcactaactattcctttttatggcctggggttaaagggcgcatggctcacactggtgaaaataaggaaggcctggtcttatcttgtattaataatactggctgcattccaccagccagagatttctatctgcgaagacctatgaaacactgaagagaaatgtaggcagaaggaaatggccacatatcacaagttctattatatattcttttgtaaatacatattgtatattacttggatgttttcttatatcatttactgtctttttgagttaatgtcagtttttactctctcaacttactatgtaacattgtaaataacataatgtcctttattatttatatttaagcatctaacatatagagttgttttcatataagtttaagataaatgtcaaaaatatatgttcttttgtttttctttgctttaaaattatgtatcttttccttttcttttttttaagaataatttattgttcaggagaaagaatgtatatgtaactgaaactatctgaagaatgcacattgaaggccgtgaggtactgataaactaaagaatttattattcaaaatactaagcaataagtaattgtgatttatttaaagttttgtccattttccatgaaagacatactgcaataaaaatgctactctgtggaaaaaaaaaaaaaaaaaa

SEQ ID NO: 4179 - DNA, 5620 bp, Homo sapiens
  source 1..5620: mol_type = genomic DNA
tgaagcgtcacctctcactccccagtaagcctccgcagcccactcggactgcagcctgtttgccgcccgtcctcccattgcagcactcggggcgacagagagggaggaggcgcgcggggacggggacgcccaggaggacccactcgcgggtcccgctccgctccggcagcagcatggggaaaggacgcgcgggccgagttggcaccacagccttgcctccccgattgaaagagatgaaaagccaggaatcggctgcaggttccaaactagtccttcggtgtgaaaccagttctgaatactcctctctcagattcaagtggttcaagaatgggaatgaattgaatcgaaaaaacaaaccacaaaatatcaagatacaaaaaaagccagggaagtcagaacttcgcattaacaaagcatcactggctgattctggagagtatatgtgcaaagtgatcagcaaattaggaaatgacagtgcctctgccaatatcaccatcgtggaatcaaacgagatcatcactggtatgccagcctcaactgaaggagcatatgtgtcttcagagtctcccattagaatatcagtatccacagaaggagcaaatacttcttcatctacatctacatccaccactgggacaagccatcttgtaaaatgtgcggagaaggagaaaactttctgtgtgaatggaggggagtgcttcatggtgaaagacctttcaaacccctcgagatacttgtgcaagtgcccaaatgagtttactggtgatcgctgccaaaactacgtaatggccagcttctacaagcatcttgggattgaatttatggaggcggaggagctgtaccagaagagagtgctgaccataaccggcatctgcatcgccctccttgtggtcggcatcatgtgtgtggtggcctactgcaaaaccaagaaacagcggaaaaagctgcatgaccgtcttcggcagagccttcggtctgaacgaaacaatatgatgaacattgccaatgggcctcaccatcctaacccaccccccgagaatgtccagctggtgaatcaatacgtatctaaaaacgtcatctccagtgagcatattgttgagagagaagcagagacatccttttccaccagtcactatacttccacagcccatcactccactactgtcacccagactcctagccacagctggagcaacggacacactgaaagcatcctttccgaaagccactctgtaatcgtgatgtcatccgtagaaaacagtaggcacagcagcccaactgggggcccaagaggacgtcttaatggcacaggaggccctcgtgaatgtaacagcttcctcaggcatgccagagaaacccctgattcctaccgagactctcctcatagtgaaaggtatgtgtcagccatgaccaccccggctcgtatgtcacctgtagatttccacacgccaagctcccccaaatcgcccccttcggaaatgtctccacccgtgtccagcatgacggtgtccatgccttccatggcggtcagccccttcatggaagaagagagacctctacttctcgtgacaccaccaaggctgcgggagaagaagtttgaccatcaccctcagcagttcagctccttccaccacaaccccgcgcatgacagtaacagcctccctgctagccccttgaggatagtggaggatgaggagtatgaaacgacccaagagtacgagccagcccaagagcctgttaagaaactcgccaatagccggcgggccaaaagaaccaagcccaatggccacattgctaacagattggaagtggacagcaacacaagctcccagagcagtaactcagagagtgaaacagaagatgaaagagtaggtgaagatacgcctttcctgggcatacagaaccccctggcagccagtcttgaggcaacacctgccttccgcctggctgacagcaggactaacccagcaggccgcttctcgacacaggaagaaatccaggccaggctgtctagtgtaattgctaaccaagaccctattgctgtataaaacctaaataaacacatagattcacctgtaaaactttattttatataataaagtattccaccttaaattaaacaatttattttattttagcagttctgcaaatagaaaacaggaaaaaaacttttataaattaaatatatgtatgtaaaaatgtgttatgtgccatatgtagcaattttttacagtatttcaaaacgagaaagatatcaatggtgcctttatgttatgttatgtcgagagcaagttttgtacagttacagtgattgcttttccacagtatttctgcaaaacctctcatagattcagtttttgctggcttcttgtgcattgcattatgatgttgactggatgtatgatttgcaagacttgcaactgtccctctgtttgcttgtagtagcacccgatcagtatgtcttgtaatggcacatccatccagatatgcctctcttgtgtatgaagttttctttgctttcagaatatgaaatgagttgtgtctactctgccagccaaaggtttgcctcattgggctctgagataatagtagatccaacagcatgctactattaaatacagcaagaaactgcattaagtaatgttaaatattaggaagaaagtaatactgtgatttaaaaaaaactatattattaatcagaagacagcttgctcttactaaaaggagctctcatttactttatttgattttatttttcttgacaaaaagcaacagttttagggatagcttagaaaatgggttctggcttgctatcagggtaaatctaacaccttacaagaggactgagtgtcactttctctctgggggaatgatccagcagcttatctagttgacaatcaaaacacggctgataaaggtgcaatcatttctgacatgtatttttcactgattttgaagctagtgattggttgtgtcttcttggctcaaaaagaagcatattacggcacaaaaagcccagcccagacagcacatgcagcattttgtctgaaatacttctagagtcaaacgtgcctgctgtacatagcgatgacttgtcatcatagggaagtatttccatcgtagagtgttcagaaggagtgactgtataggtggagagaagcttagtgactccgttgaaattttaaaatgtggatgaccacccctttctcccccttatttttcttttatctttccatgttgccttgatcaggtcataactatgcatgaacattttttatcaggaatggccgatgtgtatgtgatttgtaatcacaagtaatgattcatcaggaaatgtcaatcctgttggaaagattgcacctttacttgcagaagtgacccccacctgtgtcctgacctctccatttacaggctctctcacccatttcccccacctcctttaatttttgctttactgtcataaagtaggactaagattggtctaagcattgcatgttcttttgtgatggtaaatccaaaggaaggcctataagtattaacatttgaaataactgctaattcaggaaaatggaagaaaaaaaattatttgaaacacagaacccatttcatggcctgcctgatatctgtgaaatcagggctggagctttacttaggattcacatggcctcctaggaaccatgggacaaatgggaaacaggttatcgggggattcatgaagtcagtgagagtaattgcttcttttttgcgggtgaactgaatgtatttcttcaccaaatcttgatgttaacaattaaaaagaagaaatgacatgcaagtaggtcttagcagaaaaatgcaggctgggcatgagtcatgttgttaccctcccacatgctcctacaatccacagagatgcctgtctgcaggttcttgaagttattgttagtatttggtatctcaaatttttcgtcactgttcacatgccactttctctgtgcacagtggtatcctcatttgctttttaacctacactgaggagtctttgtcaggttgcactgattttccaattctgcagtaatgagtaagctcacggcatggggaagaagacagtcagtccaatgaagttctctaaattattttaacattgcctttgaaggccttgactcatccttagctatttcaatgaagaaattcctaccatgaatttaaaaccctaaaaattctgtttcaaattctttgggcattggggtactcagatatcccattgtggaagaattttaagaataaatagaagtttctgttgagaaccatgagcaacatgtttcttacaatgagaattgctatgcattttaaaattgcaaatatatatgaaaattgaagacaagaggaaattgtatttctaacttgattctgatcactcacagaggtggcatattattatagttgggacatcctttgcacccttcataaaaaaggccagctgactgctcagcatcacctgccaaggccactagatttgtgtttacaggggtatctctgtgatgcttgtcacatcactcttgaccacctctgttaataaattccgacagtgcagtggcgatcggagtgtgaacttatgttcccagcatatggaaagctatcttaggttttaaggtagtagaaattgcccaggagtttgacagcaactttgtttcccgggtctaaaatcgtatcccactgaggtgtatgcagtggagcataatacatgcaaatacatgcaaaactccttttgtttcacctaagattcactttctatcttactttcccttcctgcctagtgtgacttttgcccccaagagtgcctggacagcattctagtttctacaaaatggtcctctgtgtaggtgaatgtgtcccaaacctgctatcactttcttgtttcagtgtgactgtcttgttagaggtgaagtttatccagggtaacttgctcactaactattcctttttatggcctggggttaaagggcgcatggctcacactggtgaaaataaggaaggcctggtcttatcttgtattaataatactggctgcattccaccagccagagatttctatctgcgaagacctatgaaacactgaagagaaatgtaggcagaaggaaatggccacatatcacaagttctattatatattcttttgtaaatacatattgtatattacttggatgttttcttatatcatttactgtctttttgagttaatgtcagtttttactctctcaacttactatgtaacattgtaaataacataatgtcctttattatttatatttaagcatctaacatatagagttgttttcatataagtttaagataaatgtcaaaaatatatgttcttttgtttttctttgctttaaaattatgtatcttttccttttcttttttttaagaataatttattgttcaggagaaagaatgtatatgtaactgaaactatctgaagaatgcacattgaaggccgtgaggtactgataaactaaagaatttattattcaaaatactaagcaataagtaattgtgatttatttaaagttttgtccattttccatgaaagacatactgcaataaaaatgctactctgtggaaaaaaaaaaaaaaaaaa

SEQ ID NO: 4180 - DNA, 1643 bp, Homo sapiens
  source 1..1643: mol_type = genomic DNA
gaggccaggggagggtgcgaaggaggcgcctgcctccaacctgcgggcgggaggtgggtggctgcggggcaattgaaaaagagccggcgaggagttccccgaaacttgttggaactccgggctcgcgcggaggccaggagctgagcggcggcggctgccggacgatgggagcgtgagcaggacggtgataacctctccccgatcgggttgcgagggcgccgggcagaggccaggacgcgagccgccagcggtgggacccatcgacgacttcccggggcgacaggagcagccccgagagccagggcgagcgcccgttccaggtggccggaccgcccgccgcgtccgcgccgcgctccctgcaggcaacgggagacgcccccgcgcagcgcgagcgcctcagcgcggccgctcgctctccccctcgagggacaaacttttcccaaacccgatccgagcccttggaccaaactcgcctgcgccgagagccgtccgcgtagagcgctccgtctccggcgagatgtccgagcgcaaagaaggcagaggcaaagggaagggcaagaagaaggagcgaggctccggcaagaagccggagtccgcggcgggcagccagagcccagccttgcctccccgattgaaagagatgaaaagccaggaatcggctgcaggttccaaactagtccttcggtgtgaaaccagttctgaatactcctctctcagattcaagtggttcaagaatgggaatgaattgaatcgaaaaaacaaaccacaaaatatcaagatacaaaaaaagccagggaagtcagaacttcgcattaacaaagcatcactggctgattctggagagtatatgtgcaaagtgatcagcaaattaggaaatgacagtgcctctgccaatatcaccatcgtggaatcaaacgagatcatcactggtatgccagcctcaactgaaggagcatatgtgtcttcagctacatctacatccaccactgggacaagccatcttgtaaaatgtgcggagaaggagaaaactttctgtgtgaatggaggggagtgcttcatggtgaaagacctttcaaacccctcgagatacttgtgcaagtaagaaaagaaatcctgtgtgtcgcttatgtctataactccttgtttcagatgattctatgtctcatgatgtattgttgctttttttccaattttgttgcatcatgttgaataatgctgttttatatgtagagtgttttaaaacattcacaccattcgtcatcactcctctgtcatatgcagaattgttttttgctcttttcaatgtgtgtgaggtgttttttgtttttgtttttgttttttgccatgttatttatagtgttgctttccttgtggtttttcttgttgttattcagaaaagatgtgcagatatcacagaggcctataacttttggtatctacttctacatccaatgtatgaattaagctgtaagataatgttgctttcttatcccagtgatcacctgccaaatgaataagacaacaaagagaagcagaagggcagaagattatttactgacatatatctattacacttgggattgtcttactgttgcataactattttttaaacggagtttagttttatattgctagtaaaaaaa

SEQ ID NO: 4181 - DNA, 6145 bp, Homo sapiens
  source 1..6145: mol_type = genomic DNA
gaggccaggggagggtgcgaaggaggcgcctgcctccaacctgcgggcgggaggtgggtggctgcggggcaattgaaaaagagccggcgaggagttccccgaaacttgttggaactccgggctcgcgcggaggccaggagctgagcggcggcggctgccggacgatgggagcgtgagcaggacggtgataacctctccccgatcgggttgcgagggcgccgggcagaggccaggacgcgagccgccagcggtgggacccatcgacgacttcccggggcgacaggagcagccccgagagccagggcgagcgcccgttccaggtggccggaccgcccgccgcgtccgcgccgcgctccctgcaggcaacgggagacgcccccgcgcagcgcgagcgcctcagcgcggccgctcgctctccccctcgagggacaaacttttcccaaacccgatccgagcccttggaccaaactcgcctgcgccgagagccgtccgcgtagagcgctccgtctccggcgagatgtccgagcgcaaagaaggcagaggcaaagggaagggcaagaagaaggagcgaggctccggcaagaagccggagtccgcggcgggcagccagagcccagccttgcctccccgattgaaagagatgaaaagccaggaatcggctgcaggttccaaactagtccttcggtgtgaaaccagttctgaatactcctctctcagattcaagtggttcaagaatgggaatgaattgaatcgaaaaaacaaaccacaaaatatcaagatacaaaaaaagccagggaagtcagaacttcgcattaacaaagcatcactggctgattctggagagtatatgtgcaaagtgatcagcaaattaggaaatgacagtgcctctgccaatatcaccatcgtggaatcaaacgagatcatcactggtatgccagcctcaactgaaggagcatatgtgtcttcagagtctcccattagaatatcagtatccacagaaggagcaaatacttcttcatctacatctacatccaccactgggacaagccatcttgtaaaatgtgcggagaaggagaaaactttctgtgtgaatggaggggagtgcttcatggtgaaagacctttcaaacccctcgagatacttgtgcaagtgcccaaatgagtttactggtgatcgctgccaaaactacgtaatggccagcttctacaaggcggaggagctgtaccagaagagagtgctgaccataaccggcatctgcatcgccctccttgtggtcggcatcatgtgtgtggtggcctactgcaaaaccaagaaacagcggaaaaagctgcatgaccgtcttcggcagagccttcggtctgaacgaaacaatatgatgaacattgccaatgggcctcaccatcctaacccaccccccgagaatgtccagctggtgaatcaatacgtatctaaaaacgtcatctccagtgagcatattgttgagagagaagcagagacatccttttccaccagtcactatacttccacagcccatcactccactactgtcacccagactcctagccacagctggagcaacggacacactgaaagcatcctttccgaaagccactctgtaatcgtgatgtcatccgtagaaaacagtaggcacagcagcccaactgggggcccaagaggacgtcttaatggcacaggaggccctcgtgaatgtaacagcttcctcaggcatgccagagaaacccctgattcctaccgagactctcctcatagtgaaagacataaccttatagctgagctaaggagaaacaaggcacacagatccaaatgcatgcagatccagctatcagcaactcatcttagatcttcttccattccccatttgggcttcattctctaagaccccttggcctttaggaaggtatgtgtcagccatgaccaccccggctcgtatgtcacctgtagatttccacacgccaagctcccccaaatcgcccccttcggaaatgtctccacccgtgtccagcatgacggtgtccatgccttccatggcggtcagccccttcatggaagaagagagacctctacttctcgtgacaccaccaaggctgcgggagaagaagtttgaccatcaccctcagcagttcagctccttccaccacaaccccgcgcatgacagtaacagcctccctgctagccccttgaggatagtggaggatgaggagtatgaaacgacccaagagtacgagccagcccaagagcctgttaagaaactcgccaatagccggcgggccaaaagaaccaagcccaatggccacattgctaacagattggaagtggacagcaacacaagctcccagagcagtaactcagagagtgaaacagaagatgaaagagtaggtgaagatacgcctttcctgggcatacagaaccccctggcagccagtcttgaggcaacacctgccttccgcctggctgacagcaggactaacccagcaggccgcttctcgacacaggaagaaatccaggccaggctgtctagtgtaattgctaaccaagaccctattgctgtataaaacctaaataaacacatagattcacctgtaaaactttattttatataataaagtattccaccttaaattaaacaatttattttattttagcagttctgcaaatagaaaacaggaaaaaaacttttataaattaaatatatgtatgtaaaaatgtgttatgtgccatatgtagcaattttttacagtatttcaaaacgagaaagatatcaatggtgcctttatgttatgttatgtcgagagcaagttttgtacagttacagtgattgcttttccacagtatttctgcaaaacctctcatagattcagtttttgctggcttcttgtgcattgcattatgatgttgactggatgtatgatttgcaagacttgcaactgtccctctgtttgcttgtagtagcacccgatcagtatgtcttgtaatggcacatccatccagatatgcctctcttgtgtatgaagttttctttgctttcagaatatgaaatgagttgtgtctactctgccagccaaaggtttgcctcattgggctctgagataatagtagatccaacagcatgctactattaaatacagcaagaaactgcattaagtaatgttaaatattaggaagaaagtaatactgtgatttaaaaaaaactatattattaatcagaagacagcttgctcttactaaaaggagctctcatttactttatttgattttatttttcttgacaaaaagcaacagttttagggatagcttagaaaatgggttctggcttgctatcagggtaaatctaacaccttacaagaggactgagtgtcactttctctctgggggaatgatccagcagcttatctagttgacaatcaaaacacggctgataaaggtgcaatcatttctgacatgtatttttcactgattttgaagctagtgattggttgtgtcttcttggctcaaaaagaagcatattacggcacaaaaagcccagcccagacagcacatgcagcattttgtctgaaatacttctagagtcaaacgtgcctgctgtacatagcgatgacttgtcatcatagggaagtatttccatcgtagagtgttcagaaggagtgactgtataggtggagagaagcttagtgactccgttgaaattttaaaatgtggatgaccacccctttctcccccttatttttcttttatctttccatgttgccttgatcaggtcataactatgcatgaacattttttatcaggaatggccgatgtgtatgtgatttgtaatcacaagtaatgattcatcaggaaatgtcaatcctgttggaaagattgcacctttacttgcagaagtgacccccacctgtgtcctgacctctccatttacaggctctctcacccatttcccccacctcctttaatttttgctttactgtcataaagtaggactaagattggtctaagcattgcatgttcttttgtgatggtaaatccaaaggaaggcctataagtattaacatttgaaataactgctaattcaggaaaatggaagaaaaaaaattatttgaaacacagaacccatttcatggcctgcctgatatctgtgaaatcagggctggagctttacttaggattcacatggcctcctaggaaccatgggacaaatgggaaacaggttatcgggggattcatgaagtcagtgagagtaattgcttcttttttgcgggtgaactgaatgtatttcttcaccaaatcttgatgttaacaattaaaaagaagaaatgacatgcaagtaggtcttagcagaaaaatgcaggctgggcatgagtcatgttgttaccctcccacatgctcctacaatccacagagatgcctgtctgcaggttcttgaagttattgttagtatttggtatctcaaatttttcgtcactgttcacatgccactttctctgtgcacagtggtatcctcatttgctttttaacctacactgaggagtctttgtcaggttgcactgattttccaattctgcagtaatgagtaagctcacggcatggggaagaagacagtcagtccaatgaagttctctaaattattttaacattgcctttgaaggccttgactcatccttagctatttcaatgaagaaattcctaccatgaatttaaaaccctaaaaattctgtttcaaattctttgggcattggggtactcagatatcccattgtggaagaattttaagaataaatagaagtttctgttgagaaccatgagcaacatgtttcttacaatgagaattgctatgcattttaaaattgcaaatatatatgaaaattgaagacaagaggaaattgtatttctaacttgattctgatcactcacagaggtggcatattattatagttgggacatcctttgcacccttcataaaaaaggccagctgactgctcagcatcacctgccaaggccactagatttgtgtttacaggggtatctctgtgatgcttgtcacatcactcttgaccacctctgttaataaattccgacagtgcagtggcgatcggagtgtgaacttatgttcccagcatatggaaagctatcttaggttttaaggtagtagaaattgcccaggagtttgacagcaactttgtttcccgggtctaaaatcgtatcccactgaggtgtatgcagtggagcataatacatgcaaatacatgcaaaactccttttgtttcacctaagattcactttctatcttactttcccttcctgcctagtgtgacttttgcccccaagagtgcctggacagcattctagtttctacaaaatggtcctctgtgtaggtgaatgtgtcccaaacctgctatcactttcttgtttcagtgtgactgtcttgttagaggtgaagtttatccagggtaacttgctcactaactattcctttttatggcctggggttaaagggcgcatggctcacactggtgaaaataaggaaggcctggtcttatcttgtattaataatactggctgcattccaccagccagagatttctatctgcgaagacctatgaaacactgaagagaaatgtaggcagaaggaaatggccacatatcacaagttctattatatattcttttgtaaatacatattgtatattacttggatgttttcttatatcatttactgtctttttgagttaatgtcagtttttactctctcaacttactatgtaacattgtaaataacataatgtcctttattatttatatttaagcatctaacatatagagttgttttcatataagtttaagataaatgtcaaaaatatatgttcttttgtttttctttgctttaaaattatgtatcttttccttttcttttttttaagaataatttattgttcaggagaaagaatgtatatgtaactgaaactatctgaagaatgcacattgaaggccgtgaggtactgataaactaaagaatttattattcaaaatactaagcaataagtaattgtgatttatttaaagttttgtccattttccatgaaagacatactgcaataaaaatgctactctgtggaaaaaaaaaaaaaaaaaa

SEQ ID NO: 4182 - DNA, 1694 bp, Homo sapiens
  source 1..1694: mol_type = genomic DNA
gaggccaggggagggtgcgaaggaggcgcctgcctccaacctgcgggcgggaggtgggtggctgcggggcaattgaaaaagagccggcgaggagttccccgaaacttgttggaactccgggctcgcgcggaggccaggagctgagcggcggcggctgccggacgatgggagcgtgagcaggacggtgataacctctccccgatcgggttgcgagggcgccgggcagaggccaggacgcgagccgccagcggtgggacccatcgacgacttcccggggcgacaggagcagccccgagagccagggcgagcgcccgttccaggtggccggaccgcccgccgcgtccgcgccgcgctccctgcaggcaacgggagacgcccccgcgcagcgcgagcgcctcagcgcggccgctcgctctccccctcgagggacaaacttttcccaaacccgatccgagcccttggaccaaactcgcctgcgccgagagccgtccgcgtagagcgctccgtctccggcgagatgtccgagcgcaaagaaggcagaggcaaagggaagggcaagaagaaggagcgaggctccggcaagaagccggagtccgcggcgggcagccagagcccagccttgcctccccgattgaaagagatgaaaagccaggaatcggctgcaggttccaaactagtccttcggtgtgaaaccagttctgaatactcctctctcagattcaagtggttcaagaatgggaatgaattgaatcgaaaaaacaaaccacaaaatatcaagatacaaaaaaagccagggaagtcagaacttcgcattaacaaagcatcactggctgattctggagagtatatgtgcaaagtgatcagcaaattaggaaatgacagtgcctctgccaatatcaccatcgtggaatcaaacgagatcatcactggtatgccagcctcaactgaaggagcatatgtgtcttcagagtctcccattagaatatcagtatccacagaaggagcaaatacttcttcatctacatctacatccaccactgggacaagccatcttgtaaaatgtgcggagaaggagaaaactttctgtgtgaatggaggggagtgcttcatggtgaaagacctttcaaacccctcgagatacttgtgcaagtaagaaaagaaatcctgtgtgtcgcttatgtctataactccttgtttcagatgattctatgtctcatgatgtattgttgctttttttccaattttgttgcatcatgttgaataatgctgttttatatgtagagtgttttaaaacattcacaccattcgtcatcactcctctgtcatatgcagaattgttttttgctcttttcaatgtgtgtgaggtgttttttgtttttgtttttgttttttgccatgttatttatagtgttgctttccttgtggtttttcttgttgttattcagaaaagatgtgcagatatcacagaggcctataacttttggtatctacttctacatccaatgtatgaattaagctgtaagataatgttgctttcttatcccagtgatcacctgccaaatgaataagacaacaaagagaagcagaagggcagaagattatttactgacatatatctattacacttgggattgtcttactgttgcataactattttttaaacggagtttagttttatattgctagtaaaaaaa

SEQ ID NO: 4183 - DNA, 1638 bp, Homo sapiens
  source 1..1638: mol_type = genomic DNA
gaggccaggggagggtgcgaaggaggcgcctgcctccaacctgcgggcgggaggtgggtggctgcggggcaattgaaaaagagccggcgaggagttccccgaaacttgttggaactccgggctcgcgcggaggccaggagctgagcggcggcggctgccggacgatgggagcgtgagcaggacggtgataacctctccccgatcgggttgcgagggcgccgggcagaggccaggacgcgagccgccagcggtgggacccatcgacgacttcccggggcgacaggagcagccccgagagccagggcgagcgcccgttccaggtggccggaccgcccgccgcgtccgcgccgcgctccctgcaggcaacgggagacgcccccgcgcagcgcgagcgcctcagcgcggccgctcgctctccccctcgagggacaaacttttcccaaacccgatccgagcccttggaccaaactcgcctgcgccgagagccgtccgcgtagagcgctccgtctccggcgagatgtccgagcgcaaagaaggcagaggcaaagggaagggcaagaagaaggagcgaggctccggcaagaagccggagtccgcggcgggcagccagagcccagccttgcctccccgattgaaagagatgaaaagccaggaatcggctgcaggttccaaactagtccttcggtgtgaaaccagttctgaatactcctctctcagattcaagtggttcaagaatgggaatgaattgaatcgaaaaaacaaaccacaaaatatcaagatacaaaaaaagccagggaagtcagaacttcgcattaacaaagcatcactggctgattctggagagtatatgtgcaaagtgatcagcaaattaggaaatgacagtgcctctgccaatatcaccatcgtggaatcaaacgctacatctacatccaccactgggacaagccatcttgtaaaatgtgcggagaaggagaaaactttctgtgtgaatggaggggagtgcttcatggtgaaagacctttcaaacccctcgagatacttgtgcaagtgcccaaatgagtttactggtgatcgctgccaaaactacgtaatggccagcttctacagtacgtccactccctttctgtctctgcctgaataggagcatgctcagttggtgctgctttcttgttgctgcatctcccctcagattccacctagagctagatgtgtcttaccagatctaatattgactgcctctgcctgtcgcatgagaacattaacaaaagcaattgtattacttcctctgttcgcgactagttggctctgagatactaataggtgtgtgaggctccggatgtttctggaattgatattgaatgatgtgatacaaattgatagtcaatatcaagcagtgaaatatgataataaaggcatttcaaagtctcacttttattgataaaataaaaatcattctactgaacagtccatcttctttatacaatgaccacatcctgaaaagggtgttgctaagctgtaaccgatatgcacttgaaatgatggtaagttaattttgattcagaatgtgttatttgtcacaaataaacataataaaaggagttcagatgtttttcttcattaaccaaaaaaaaaaaaaaa

SEQ ID NO: 4184 - DNA, 6012 bp, Homo sapiens
  source 1..6012: mol_type = genomic DNA
gaggccaggggagggtgcgaaggaggcgcctgcctccaacctgcgggcgggaggtgggtggctgcggggcaattgaaaaagagccggcgaggagttccccgaaacttgttggaactccgggctcgcgcggaggccaggagctgagcggcggcggctgccggacgatgggagcgtgagcaggacggtgataacctctccccgatcgggttgcgagggcgccgggcagaggccaggacgcgagccgccagcggtgggacccatcgacgacttcccggggcgacaggagcagccccgagagccagggcgagcgcccgttccaggtggccggaccgcccgccgcgtccgcgccgcgctccctgcaggcaacgggagacgcccccgcgcagcgcgagcgcctcagcgcggccgctcgctctccccctcgagggacaaacttttcccaaacccgatccgagcccttggaccaaactcgcctgcgccgagagccgtccgcgtagagcgctccgtctccggcgagatgtccgagcgcaaagaaggcagaggcaaagggaagggcaagaagaaggagcgaggctccggcaagaagccggagtccgcggcgggcagccagagcccagccttgcctccccgattgaaagagatgaaaagccaggaatcggctgcaggttccaaactagtccttcggtgtgaaaccagttctgaatactcctctctcagattcaagtggttcaagaatgggaatgaattgaatcgaaaaaacaaaccacaaaatatcaagatacaaaaaaagccagggaagtcagaacttcgcattaacaaagcatcactggctgattctggagagtatatgtgcaaagtgatcagcaaattaggaaatgacagtgcctctgccaatatcaccatcgtggaatcaaacgagatcatcactggtatgccagcctcaactgaaggagcatatgtgtcttcagagtctcccattagaatatcagtatccacagaaggagcaaatacttcttcatctacatctacatccaccactgggacaagccatcttgtaaaatgtgcggagaaggagaaaactttctgtgtgaatggaggggagtgcttcatggtgaaagacctttcaaacccctcgagatacttgtgcaagtgccaacctggattcactggagcaagatgtactgagaatgtgcccatgaaagtccaaaaccaagaaaaggcggaggagctgtaccagaagagagtgctgaccataaccggcatctgcatcgccctccttgtggtcggcatcatgtgtgtggtggcctactgcaaaaccaagaaacagcggaaaaagctgcatgaccgtcttcggcagagccttcggtctgaacgaaacaatatgatgaacattgccaatgggcctcaccatcctaacccaccccccgagaatgtccagctggtgaatcaatacgtatctaaaaacgtcatctccagtgagcatattgttgagagagaagcagagacatccttttccaccagtcactatacttccacagcccatcactccactactgtcacccagactcctagccacagctggagcaacggacacactgaaagcatcctttccgaaagccactctgtaatcgtgatgtcatccgtagaaaacagtaggcacagcagcccaactgggggcccaagaggacgtcttaatggcacaggaggccctcgtgaatgtaacagcttcctcaggcatgccagagaaacccctgattcctaccgagactctcctcatagtgaaaggtatgtgtcagccatgaccaccccggctcgtatgtcacctgtagatttccacacgccaagctcccccaaatcgcccccttcggaaatgtctccacccgtgtccagcatgacggtgtccatgccttccatggcggtcagccccttcatggaagaagagagacctctacttctcgtgacaccaccaaggctgcgggagaagaagtttgaccatcaccctcagcagttcagctccttccaccacaaccccgcgcatgacagtaacagcctccctgctagccccttgaggatagtggaggatgaggagtatgaaacgacccaagagtacgagccagcccaagagcctgttaagaaactcgccaatagccggcgggccaaaagaaccaagcccaatggccacattgctaacagattggaagtggacagcaacacaagctcccagagcagtaactcagagagtgaaacagaagatgaaagagtaggtgaagatacgcctttcctgggcatacagaaccccctggcagccagtcttgaggcaacacctgccttccgcctggctgacagcaggactaacccagcaggccgcttctcgacacaggaagaaatccaggccaggctgtctagtgtaattgctaaccaagaccctattgctgtataaaacctaaataaacacatagattcacctgtaaaactttattttatataataaagtattccaccttaaattaaacaatttattttattttagcagttctgcaaatagaaaacaggaaaaaaacttttataaattaaatatatgtatgtaaaaatgtgttatgtgccatatgtagcaattttttacagtatttcaaaacgagaaagatatcaatggtgcctttatgttatgttatgtcgagagcaagttttgtacagttacagtgattgcttttccacagtatttctgcaaaacctctcatagattcagtttttgctggcttcttgtgcattgcattatgatgttgactggatgtatgatttgcaagacttgcaactgtccctctgtttgcttgtagtagcacccgatcagtatgtcttgtaatggcacatccatccagatatgcctctcttgtgtatgaagttttctttgctttcagaatatgaaatgagttgtgtctactctgccagccaaaggtttgcctcattgggctctgagataatagtagatccaacagcatgctactattaaatacagcaagaaactgcattaagtaatgttaaatattaggaagaaagtaatactgtgatttaaaaaaaactatattattaatcagaagacagcttgctcttactaaaaggagctctcatttactttatttgattttatttttcttgacaaaaagcaacagttttagggatagcttagaaaatgggttctggcttgctatcagggtaaatctaacaccttacaagaggactgagtgtcactttctctctgggggaatgatccagcagcttatctagttgacaatcaaaacacggctgataaaggtgcaatcatttctgacatgtatttttcactgattttgaagctagtgattggttgtgtcttcttggctcaaaaagaagcatattacggcacaaaaagcccagcccagacagcacatgcagcattttgtctgaaatacttctagagtcaaacgtgcctgctgtacatagcgatgacttgtcatcatagggaagtatttccatcgtagagtgttcagaaggagtgactgtataggtggagagaagcttagtgactccgttgaaattttaaaatgtggatgaccacccctttctcccccttatttttcttttatctttccatgttgccttgatcaggtcataactatgcatgaacattttttatcaggaatggccgatgtgtatgtgatttgtaatcacaagtaatgattcatcaggaaatgtcaatcctgttggaaagattgcacctttacttgcagaagtgacccccacctgtgtcctgacctctccatttacaggctctctcacccatttcccccacctcctttaatttttgctttactgtcataaagtaggactaagattggtctaagcattgcatgttcttttgtgatggtaaatccaaaggaaggcctataagtattaacatttgaaataactgctaattcaggaaaatggaagaaaaaaaattatttgaaacacagaacccatttcatggcctgcctgatatctgtgaaatcagggctggagctttacttaggattcacatggcctcctaggaaccatgggacaaatgggaaacaggttatcgggggattcatgaagtcagtgagagtaattgcttcttttttgcgggtgaactgaatgtatttcttcaccaaatcttgatgttaacaattaaaaagaagaaatgacatgcaagtaggtcttagcagaaaaatgcaggctgggcatgagtcatgttgttaccctcccacatgctcctacaatccacagagatgcctgtctgcaggttcttgaagttattgttagtatttggtatctcaaatttttcgtcactgttcacatgccactttctctgtgcacagtggtatcctcatttgctttttaacctacactgaggagtctttgtcaggttgcactgattttccaattctgcagtaatgagtaagctcacggcatggggaagaagacagtcagtccaatgaagttctctaaattattttaacattgcctttgaaggccttgactcatccttagctatttcaatgaagaaattcctaccatgaatttaaaaccctaaaaattctgtttcaaattctttgggcattggggtactcagatatcccattgtggaagaattttaagaataaatagaagtttctgttgagaaccatgagcaacatgtttcttacaatgagaattgctatgcattttaaaattgcaaatatatatgaaaattgaagacaagaggaaattgtatttctaacttgattctgatcactcacagaggtggcatattattatagttgggacatcctttgcacccttcataaaaaaggccagctgactgctcagcatcacctgccaaggccactagatttgtgtttacaggggtatctctgtgatgcttgtcacatcactcttgaccacctctgttaataaattccgacagtgcagtggcgatcggagtgtgaacttatgttcccagcatatggaaagctatcttaggttttaaggtagtagaaattgcccaggagtttgacagcaactttgtttcccgggtctaaaatcgtatcccactgaggtgtatgcagtggagcataatacatgcaaatacatgcaaaactccttttgtttcacctaagattcactttctatcttactttcccttcctgcctagtgtgacttttgcccccaagagtgcctggacagcattctagtttctacaaaatggtcctctgtgtaggtgaatgtgtcccaaacctgctatcactttcttgtttcagtgtgactgtcttgttagaggtgaagtttatccagggtaacttgctcactaactattcctttttatggcctggggttaaagggcgcatggctcacactggtgaaaataaggaaggcctggtcttatcttgtattaataatactggctgcattccaccagccagagatttctatctgcgaagacctatgaaacactgaagagaaatgtaggcagaaggaaatggccacatatcacaagttctattatatattcttttgtaaatacatattgtatattacttggatgttttcttatatcatttactgtctttttgagttaatgtcagtttttactctctcaacttactatgtaacattgtaaataacataatgtcctttattatttatatttaagcatctaacatatagagttgttttcatataagtttaagataaatgtcaaaaatatatgttcttttgtttttctttgctttaaaattatgtatcttttccttttcttttttttaagaataatttattgttcaggagaaagaatgtatatgtaactgaaactatctgaagaatgcacattgaaggccgtgaggtactgataaactaaagaatttattattcaaaatactaagcaataagtaattgtgatttatttaaagttttgtccattttccatgaaagacatactgcaataaaaatgctactctgtggaaaaaaaaaaaaaaaaaa

SEQ ID NO: 4185 - DNA, 6154 bp, Homo sapiens
  source 1..6154: mol_type = genomic DNA
gaggccaggggagggtgcgaaggaggcgcctgcctccaacctgcgggcgggaggtgggtggctgcggggcaattgaaaaagagccggcgaggagttccccgaaacttgttggaactccgggctcgcgcggaggccaggagctgagcggcggcggctgccggacgatgggagcgtgagcaggacggtgataacctctccccgatcgggttgcgagggcgccgggcagaggccaggacgcgagccgccagcggtgggacccatcgacgacttcccggggcgacaggagcagccccgagagccagggcgagcgcccgttccaggtggccggaccgcccgccgcgtccgcgccgcgctccctgcaggcaacgggagacgcccccgcgcagcgcgagcgcctcagcgcggccgctcgctctccccctcgagggacaaacttttcccaaacccgatccgagcccttggaccaaactcgcctgcgccgagagccgtccgcgtagagcgctccgtctccggcgagatgtccgagcgcaaagaaggcagaggcaaagggaagggcaagaagaaggagcgaggctccggcaagaagccggagtccgcggcgggcagccagagcccagccttgcctccccgattgaaagagatgaaaagccaggaatcggctgcaggttccaaactagtccttcggtgtgaaaccagttctgaatactcctctctcagattcaagtggttcaagaatgggaatgaattgaatcgaaaaaacaaaccacaaaatatcaagatacaaaaaaagccagggaagtcagaacttcgcattaacaaagcatcactggctgattctggagagtatatgtgcaaagtgatcagcaaattaggaaatgacagtgcctctgccaatatcaccatcgtggaatcaaacgagatcatcactggtatgccagcctcaactgaaggagcatatgtgtcttcagagtctcccattagaatatcagtatccacagaaggagcaaatacttcttcatctacatctacatccaccactgggacaagccatcttgtaaaatgtgcggagaaggagaaaactttctgtgtgaatggaggggagtgcttcatggtgaaagacctttcaaacccctcgagatacttgtgcaagtgccaacctggattcactggagcaagatgtactgagaatgtgcccatgaaagtccaaaaccaagaaaaggcggaggagctgtaccagaagagagtgctgaccataaccggcatctgcatcgccctccttgtggtcggcatcatgtgtgtggtggcctactgcaaaaccaagaaacagcggaaaaagctgcatgaccgtcttcggcagagccttcggtctgaacgaaacaatatgatgaacattgccaatgggcctcaccatcctaacccaccccccgagaatgtccagctggtgaatcaatacgtatctaaaaacgtcatctccagtgagcatattgttgagagagaagcagagacatccttttccaccagtcactatacttccacagcccatcactccactactgtcacccagactcctagccacagctggagcaacggacacactgaaagcatcctttccgaaagccactctgtaatcgtgatgtcatccgtagaaaacagtaggcacagcagcccaactgggggcccaagaggacgtcttaatggcacaggaggccctcgtgaatgtaacagcttcctcaggcatgccagagaaacccctgattcctaccgagactctcctcatagtgaaagacataaccttatagctgagctaaggagaaacaaggcacacagatccaaatgcatgcagatccagctatcagcaactcatcttagatcttcttccattccccatttgggcttcattctctaagaccccttggcctttaggaaggtatgtgtcagccatgaccaccccggctcgtatgtcacctgtagatttccacacgccaagctcccccaaatcgcccccttcggaaatgtctccacccgtgtccagcatgacggtgtccatgccttccatggcggtcagccccttcatggaagaagagagacctctacttctcgtgacaccaccaaggctgcgggagaagaagtttgaccatcaccctcagcagttcagctccttccaccacaaccccgcgcatgacagtaacagcctccctgctagccccttgaggatagtggaggatgaggagtatgaaacgacccaagagtacgagccagcccaagagcctgttaagaaactcgccaatagccggcgggccaaaagaaccaagcccaatggccacattgctaacagattggaagtggacagcaacacaagctcccagagcagtaactcagagagtgaaacagaagatgaaagagtaggtgaagatacgcctttcctgggcatacagaaccccctggcagccagtcttgaggcaacacctgccttccgcctggctgacagcaggactaacccagcaggccgcttctcgacacaggaagaaatccaggccaggctgtctagtgtaattgctaaccaagaccctattgctgtataaaacctaaataaacacatagattcacctgtaaaactttattttatataataaagtattccaccttaaattaaacaatttattttattttagcagttctgcaaatagaaaacaggaaaaaaacttttataaattaaatatatgtatgtaaaaatgtgttatgtgccatatgtagcaattttttacagtatttcaaaacgagaaagatatcaatggtgcctttatgttatgttatgtcgagagcaagttttgtacagttacagtgattgcttttccacagtatttctgcaaaacctctcatagattcagtttttgctggcttcttgtgcattgcattatgatgttgactggatgtatgatttgcaagacttgcaactgtccctctgtttgcttgtagtagcacccgatcagtatgtcttgtaatggcacatccatccagatatgcctctcttgtgtatgaagttttctttgctttcagaatatgaaatgagttgtgtctactctgccagccaaaggtttgcctcattgggctctgagataatagtagatccaacagcatgctactattaaatacagcaagaaactgcattaagtaatgttaaatattaggaagaaagtaatactgtgatttaaaaaaaactatattattaatcagaagacagcttgctcttactaaaaggagctctcatttactttatttgattttatttttcttgacaaaaagcaacagttttagggatagcttagaaaatgggttctggcttgctatcagggtaaatctaacaccttacaagaggactgagtgtcactttctctctgggggaatgatccagcagcttatctagttgacaatcaaaacacggctgataaaggtgcaatcatttctgacatgtatttttcactgattttgaagctagtgattggttgtgtcttcttggctcaaaaagaagcatattacggcacaaaaagcccagcccagacagcacatgcagcattttgtctgaaatacttctagagtcaaacgtgcctgctgtacatagcgatgacttgtcatcatagggaagtatttccatcgtagagtgttcagaaggagtgactgtataggtggagagaagcttagtgactccgttgaaattttaaaatgtggatgaccacccctttctcccccttatttttcttttatctttccatgttgccttgatcaggtcataactatgcatgaacattttttatcaggaatggccgatgtgtatgtgatttgtaatcacaagtaatgattcatcaggaaatgtcaatcctgttggaaagattgcacctttacttgcagaagtgacccccacctgtgtcctgacctctccatttacaggctctctcacccatttcccccacctcctttaatttttgctttactgtcataaagtaggactaagattggtctaagcattgcatgttcttttgtgatggtaaatccaaaggaaggcctataagtattaacatttgaaataactgctaattcaggaaaatggaagaaaaaaaattatttgaaacacagaacccatttcatggcctgcctgatatctgtgaaatcagggctggagctttacttaggattcacatggcctcctaggaaccatgggacaaatgggaaacaggttatcgggggattcatgaagtcagtgagagtaattgcttcttttttgcgggtgaactgaatgtatttcttcaccaaatcttgatgttaacaattaaaaagaagaaatgacatgcaagtaggtcttagcagaaaaatgcaggctgggcatgagtcatgttgttaccctcccacatgctcctacaatccacagagatgcctgtctgcaggttcttgaagttattgttagtatttggtatctcaaatttttcgtcactgttcacatgccactttctctgtgcacagtggtatcctcatttgctttttaacctacactgaggagtctttgtcaggttgcactgattttccaattctgcagtaatgagtaagctcacggcatggggaagaagacagtcagtccaatgaagttctctaaattattttaacattgcctttgaaggccttgactcatccttagctatttcaatgaagaaattcctaccatgaatttaaaaccctaaaaattctgtttcaaattctttgggcattggggtactcagatatcccattgtggaagaattttaagaataaatagaagtttctgttgagaaccatgagcaacatgtttcttacaatgagaattgctatgcattttaaaattgcaaatatatatgaaaattgaagacaagaggaaattgtatttctaacttgattctgatcactcacagaggtggcatattattatagttgggacatcctttgcacccttcataaaaaaggccagctgactgctcagcatcacctgccaaggccactagatttgtgtttacaggggtatctctgtgatgcttgtcacatcactcttgaccacctctgttaataaattccgacagtgcagtggcgatcggagtgtgaacttatgttcccagcatatggaaagctatcttaggttttaaggtagtagaaattgcccaggagtttgacagcaactttgtttcccgggtctaaaatcgtatcccactgaggtgtatgcagtggagcataatacatgcaaatacatgcaaaactccttttgtttcacctaagattcactttctatcttactttcccttcctgcctagtgtgacttttgcccccaagagtgcctggacagcattctagtttctacaaaatggtcctctgtgtaggtgaatgtgtcccaaacctgctatcactttcttgtttcagtgtgactgtcttgttagaggtgaagtttatccagggtaacttgctcactaactattcctttttatggcctggggttaaagggcgcatggctcacactggtgaaaataaggaaggcctggtcttatcttgtattaataatactggctgcattccaccagccagagatttctatctgcgaagacctatgaaacactgaagagaaatgtaggcagaaggaaatggccacatatcacaagttctattatatattcttttgtaaatacatattgtatattacttggatgttttcttatatcatttactgtctttttgagttaatgtcagtttttactctctcaacttactatgtaacattgtaaataacataatgtcctttattatttatatttaagcatctaacatatagagttgttttcatataagtttaagataaatgtcaaaaatatatgttcttttgtttttctttgctttaaaattatgtatcttttccttttcttttttttaagaataatttattgttcaggagaaagaatgtatatgtaactgaaactatctgaagaatgcacattgaaggccgtgaggtactgataaactaaagaatttattattcaaaatactaagcaataagtaattgtgatttatttaaagttttgtccattttccatgaaagacatactgcaataaaaatgctactctgtggaaaaaaaaaaaaaaaaaa

SEQ ID NO: 4186 - DNA, 1987 bp, Homo sapiens
  source 1..1987: mol_type = genomic DNA
tttttttttttgcccttatacctcttcgcctttctgtggttccatccacttcttccccctcctcctcccataaacaactctcctacccctgcacccccaataaataaataaaaggaggagggcaaggggggaggaggaggagtggtgctgcgaggggaaggaaaagggaggcagcgcgagagagccgggcagagtccgaaccgacagccagaagcccgcacgcacctcgcaccatgagatggcgacgcgccccgcgccgctccgggcgtcccggcccccgggcccagcgccccggctccgccgcccgctcgtcgccgccgctgccgctgctgccactactgctgctgctggggaccgcggccctggcgccgggggcggcggccggcaacgaggcggctcccgcgggggcctcggtgtgctactcgtccccgcccagcgtgggatcggtgcaggagctagctcagcgcgccgcggtggtgatcgagggaaaggtgcacccgcagcggcggcagcagggggcactcgacaggaaggcggcggcggcggcgggcgaggcaggggcgtggggcggcgatcgcgagccgccagccgcgggcccacgggcgctggggccgcccgccgaggagccgctgctcgccgccaacgggaccgtgccctcttggcccaccgccccggtgcccagcgccggcgagcccggggaggaggcgccctatctggtgaaggtgcaccaggtgtgggcggtgaaagccgggggcttgaagaaggactcgctgctcaccgtgcgcctggggacctggggccaccccgccttcccctcctgcgggaggctcaaggaggacagcaggtacatcttcttcatggagcccgacgccaacagcaccagccgcgcgccggccgccttccgagcctctttcccccctctggagacgggccggaacctcaagaaggaggtcagccgggtgctgtgcaagcggtgcgccttgcctccccgattgaaagagatgaaaagccaggaatcggctgcaggttccaaactagtccttcggtgtgaaaccagttctgaatactcctctctcagattcaagtggttcaagaatgggaatgaattgaatcgaaaaaacaaaccacaaaatatcaagatacaaaaaaagccagggaagtcagaacttcgcattaacaaagcatcactggctgattctggagagtatatgtgcaaagtgatcagcaaattaggaaatgacagtgcctctgccaatatcaccatcgtggaatcaaacgctacatctacatccaccactgggacaagccatcttgtaaaatgtgcggagaaggagaaaactttctgtgtgaatggaggggagtgcttcatggtgaaagacctttcaaacccctcgagatacttgtgcaagtgcccaaatgagtttactggtgatcgctgccaaaactacgtaatggccagcttctacagtacgtccactccctttctgtctctgcctgaataggagcatgctcagttggtgctgctttcttgttgctgcatctcccctcagattccacctagagctagatgtgtcttaccagatctaatattgactgcctctgcctgtcgcatgagaacattaacaaaagcaattgtattacttcctctgttcgcgactagttggctctgagatactaataggtgtgtgaggctccggatgtttctggaattgatattgaatgatgtgatacaaattgatagtcaatatcaagcagtgaaatatgataataaaggcatttcaaagtctcacttttattgataaaataaaaatcattctactgaacagtccatcttctttatacaatgaccacatcctgaaaagggtgttgctaagctgtaaccgatatgcacttgaaatgatggtaagttaattttgattcagaatgtgttatttgtcacaaataaacataataaaaggagttcagatgtttttcttcattaaccaaa

SEQ ID NO: 4187 - DNA, 2374 bp, Homo sapiens
  source 1..2374: mol_type = genomic DNA
ggcttaactgatgcctgcctgcctctctttgatttgatggcctttattccttctaattggataaaataggaagtcactggcagtcctgtgtggctggggatactgattttactcagaccagcctgcagctctagagtgtgggtagagagcggggagtgggggttgggagagggggaggaaagagagagaggagagaggacgggcttggatgaagaagggaaagaaagagaaagagactgaagcagagaagagccgcagaggaagaaagtgaatgagcactcaagaaggacaaagaggagtagtcgggggtggggtggaggcagggcggggaagggagtgaccgcccctcctggctgcactcttgcctccggagccctctgatcctgtttgcagtgatgctccgagggcaggcacctgctgctctgtaatgattcagcccctttcagccgtcgtcgcgttaacacaacaggatgctgttgctattgtcactactgcctctcctgccgccgctgctgctgccgccgccgccaccgccgctggtcctccttctgcttttacttctcctgcatgacagttgttttcttcatctgagcagacaccagcttcagatgctcgaggtgagaaacatgcctttcagtttgggctactggtttacttaattaatcagccggcagctccgtcgatctattttcgtccctgtcctcttgacgagcccgggatggtttggagtagcatttaaaagaactagaaaagtggcccagaaacagcagcttaaagaattattacgatatactttgattttgtagttgctaggagcttttcttccccccttgcatctttctgaactcttcttgattttaataatggccttggacttggacgatttatcgatttccccctgtaagatgctgtatcatttggttgggggggcctctgcgtggtaatggaccgtgagagcggccaggccttcttctggaggtgagccgatggagatttattccccagacatgtctgaggtcgccgccgagaggtcctccagcccctccactcagctgagtgcagacccatctcttgatgggcttccggcagcagaagacatgccagagccccagactgaagatgggagaacccctggactcgtgggcctggccgtgccctgctgtgcgtgcctagaagctgagcgcctgagaggttgcctcaactcagagaaaatctgcattgtccccatcctggcttgcctggtcagcctctgcctctgcatcgccggcctcaagtgggtatttgtggacaagatctttgaatatgactctcctactcaccttgaccctggggggttaggccaggaccctattatttctctggacgcaactgctgcctcagctgtgtgggtgtcgtctgaggcatacacttcacctgtctctagggctcaatctgaaagtgaggttcaagttacagtgcaaggtgacaaggctgttgtctcctttgaaccatcagcggcaccgacaccgaagaatcgtatttttgccttttctttcttgccgtccactgcgccatccttcccttcacccacccggaaccctgaggtgagaacgcccaagtcagcaactcagccacaaacaacagaaactaatctccaaactgctcctaaactttctacatctacatccaccactgggacaagccatcttgtaaaatgtgcggagaaggagaaaactttctgtgtgaatggaggggagtgcttcatggtgaaagacctttcaaacccctcgagatacttgtgcaagtgcccaaatgagtttactggtgatcgctgccaaaactacgtaatggccagcttctacagtacgtccactccctttctgtctctgcctgaataggagcatgctcagttggtgctgctttcttgttgctgcatctcccctcagattccacctagagctagatgtgtcttaccagatctaatattgactgcctctgcctgtcgcatgagaacattaacaaaagcaattgtattacttcctctgttcgcgactagttggctctgagatactaataggtgtgtgaggctccggatgtttctggaattgatattgaatgatgtgatacaaattgatagtcaatatcaagcagtgaaatatgataataaaggcatttcaaagtctcacttttattgataaaataaaaatcattctactgaacagtccatcttctttatacaatgaccacatcctgaaaagggtgttgctaagctgtaaccgatatgcacttgaaatgatggtaagttaattttgattcagaatgtgttatttgtcacaaataaacataataaaaggagttcagatgtttttcttcattaaccaaaaaaaaaaaaaaa

SEQ ID NO: 4188 - DNA, 1740 bp, Homo sapiens
  source 1..1740: mol_type = genomic DNA
gaggccaggggagggtgcgaaggaggcgcctgcctccaacctgcgggcgggaggtgggtggctgcggggcaattgaaaaagagccggcgaggagttccccgaaacttgttggaactccgggctcgcgcggaggccaggagctgagcggcggcggctgccggacgatgggagcgtgagcaggacggtgataacctctccccgatcgggttgcgagggcgccgggcagaggccaggacgcgagccgccagcggtgggacccatcgacgacttcccggggcgacaggagcagccccgagagccagggcgagcgcccgttccaggtggccggaccgcccgccgcgtccgcgccgcgctccctgcaggcaacgggagacgcccccgcgcagcgcgagcgcctcagcgcggccgctcgctctccccctcgagggacaaacttttcccaaacccgatccgagcccttggaccaaactcgcctgcgccgagagccgtccgcgtagagcgctccgtctccggcgagatgtccgagcgcaaagaaggcagaggcaaagggaagggcaagaagaaggagcgaggctccggcaagaagccggagtccgcggcgggcagccagagcccagccttgcctccccgattgaaagagatgaaaagccaggaatcggctgcaggttccaaactagtccttcggtgtgaaaccagttctgaatactcctctctcagattcaagtggttcaagaatgggaatgaattgaatcgaaaaaacaaaccacaaaatatcaagatacaaaaaaagccagggaagtcagaacttcgcattaacaaagcatcactggctgattctggagagtatatgtgcaaagtgatcagcaaattaggaaatgacagtgcctctgccaatatcaccatcgtggaatcaaacgagatcatcactggtatgccagcctcaactgaaggagcatatgtgtcttcagagtctcccattagaatatcagtatccacagaaggagcaaatacttcttcatctacatctacatccaccactgggacaagccatcttgtaaaatgtgcggagaaggagaaaactttctgtgtgaatggaggggagtgcttcatggtgaaagacctttcaaacccctcgagatacttgtgcaagtgcccaaatgagtttactggtgatcgctgccaaaactacgtaatggccagcttctacagtacgtccactccctttctgtctctgcctgaataggagcatgctcagttggtgctgctttcttgttgctgcatctcccctcagattccacctagagctagatgtgtcttaccagatctaatattgactgcctctgcctgtcgcatgagaacattaacaaaagcaattgtattacttcctctgttcgcgactagttggctctgagatactaataggtgtgtgaggctccggatgtttctggaattgatattgaatgatgtgatacaaattgatagtcaatatcaagcagtgaaatatgataataaaggcatttcaaagtctcacttttattgataaaataaaaatcattctactgaacagtccatcttctttatacaatgaccacatcctgaaaagggtgttgctaagctgtaaccgatatgcacttgaaatgatggtaagttaattttgattcagaatgtgttatttgtcacaaataaacataataaaaggagttcagatgtttttcttcattaaccaaaaaaaaaaaaaaa

SEQ ID NO: 4189 - DNA, 6003 bp, Homo sapiens
  source 1..6003: mol_type = genomic DNA
gaggccaggggagggtgcgaaggaggcgcctgcctccaacctgcgggcgggaggtgggtggctgcggggcaattgaaaaagagccggcgaggagttccccgaaacttgttggaactccgggctcgcgcggaggccaggagctgagcggcggcggctgccggacgatgggagcgtgagcaggacggtgataacctctccccgatcgggttgcgagggcgccgggcagaggccaggacgcgagccgccagcggtgggacccatcgacgacttcccggggcgacaggagcagccccgagagccagggcgagcgcccgttccaggtggccggaccgcccgccgcgtccgcgccgcgctccctgcaggcaacgggagacgcccccgcgcagcgcgagcgcctcagcgcggccgctcgctctccccctcgagggacaaacttttcccaaacccgatccgagcccttggaccaaactcgcctgcgccgagagccgtccgcgtagagcgctccgtctccggcgagatgtccgagcgcaaagaaggcagaggcaaagggaagggcaagaagaaggagcgaggctccggcaagaagccggagtccgcggcgggcagccagagcccagccttgcctccccgattgaaagagatgaaaagccaggaatcggctgcaggttccaaactagtccttcggtgtgaaaccagttctgaatactcctctctcagattcaagtggttcaagaatgggaatgaattgaatcgaaaaaacaaaccacaaaatatcaagatacaaaaaaagccagggaagtcagaacttcgcattaacaaagcatcactggctgattctggagagtatatgtgcaaagtgatcagcaaattaggaaatgacagtgcctctgccaatatcaccatcgtggaatcaaacgagatcatcactggtatgccagcctcaactgaaggagcatatgtgtcttcagagtctcccattagaatatcagtatccacagaaggagcaaatacttcttcatctacatctacatccaccactgggacaagccatcttgtaaaatgtgcggagaaggagaaaactttctgtgtgaatggaggggagtgcttcatggtgaaagacctttcaaacccctcgagatacttgtgcaagtgcccaaatgagtttactggtgatcgctgccaaaactacgtaatggccagcttctacaaggcggaggagctgtaccagaagagagtgctgaccataaccggcatctgcatcgccctccttgtggtcggcatcatgtgtgtggtggcctactgcaaaaccaagaaacagcggaaaaagctgcatgaccgtcttcggcagagccttcggtctgaacgaaacaatatgatgaacattgccaatgggcctcaccatcctaacccaccccccgagaatgtccagctggtgaatcaatacgtatctaaaaacgtcatctccagtgagcatattgttgagagagaagcagagacatccttttccaccagtcactatacttccacagcccatcactccactactgtcacccagactcctagccacagctggagcaacggacacactgaaagcatcctttccgaaagccactctgtaatcgtgatgtcatccgtagaaaacagtaggcacagcagcccaactgggggcccaagaggacgtcttaatggcacaggaggccctcgtgaatgtaacagcttcctcaggcatgccagagaaacccctgattcctaccgagactctcctcatagtgaaaggtatgtgtcagccatgaccaccccggctcgtatgtcacctgtagatttccacacgccaagctcccccaaatcgcccccttcggaaatgtctccacccgtgtccagcatgacggtgtccatgccttccatggcggtcagccccttcatggaagaagagagacctctacttctcgtgacaccaccaaggctgcgggagaagaagtttgaccatcaccctcagcagttcagctccttccaccacaaccccgcgcatgacagtaacagcctccctgctagccccttgaggatagtggaggatgaggagtatgaaacgacccaagagtacgagccagcccaagagcctgttaagaaactcgccaatagccggcgggccaaaagaaccaagcccaatggccacattgctaacagattggaagtggacagcaacacaagctcccagagcagtaactcagagagtgaaacagaagatgaaagagtaggtgaagatacgcctttcctgggcatacagaaccccctggcagccagtcttgaggcaacacctgccttccgcctggctgacagcaggactaacccagcaggccgcttctcgacacaggaagaaatccaggccaggctgtctagtgtaattgctaaccaagaccctattgctgtataaaacctaaataaacacatagattcacctgtaaaactttattttatataataaagtattccaccttaaattaaacaatttattttattttagcagttctgcaaatagaaaacaggaaaaaaacttttataaattaaatatatgtatgtaaaaatgtgttatgtgccatatgtagcaattttttacagtatttcaaaacgagaaagatatcaatggtgcctttatgttatgttatgtcgagagcaagttttgtacagttacagtgattgcttttccacagtatttctgcaaaacctctcatagattcagtttttgctggcttcttgtgcattgcattatgatgttgactggatgtatgatttgcaagacttgcaactgtccctctgtttgcttgtagtagcacccgatcagtatgtcttgtaatggcacatccatccagatatgcctctcttgtgtatgaagttttctttgctttcagaatatgaaatgagttgtgtctactctgccagccaaaggtttgcctcattgggctctgagataatagtagatccaacagcatgctactattaaatacagcaagaaactgcattaagtaatgttaaatattaggaagaaagtaatactgtgatttaaaaaaaactatattattaatcagaagacagcttgctcttactaaaaggagctctcatttactttatttgattttatttttcttgacaaaaagcaacagttttagggatagcttagaaaatgggttctggcttgctatcagggtaaatctaacaccttacaagaggactgagtgtcactttctctctgggggaatgatccagcagcttatctagttgacaatcaaaacacggctgataaaggtgcaatcatttctgacatgtatttttcactgattttgaagctagtgattggttgtgtcttcttggctcaaaaagaagcatattacggcacaaaaagcccagcccagacagcacatgcagcattttgtctgaaatacttctagagtcaaacgtgcctgctgtacatagcgatgacttgtcatcatagggaagtatttccatcgtagagtgttcagaaggagtgactgtataggtggagagaagcttagtgactccgttgaaattttaaaatgtggatgaccacccctttctcccccttatttttcttttatctttccatgttgccttgatcaggtcataactatgcatgaacattttttatcaggaatggccgatgtgtatgtgatttgtaatcacaagtaatgattcatcaggaaatgtcaatcctgttggaaagattgcacctttacttgcagaagtgacccccacctgtgtcctgacctctccatttacaggctctctcacccatttcccccacctcctttaatttttgctttactgtcataaagtaggactaagattggtctaagcattgcatgttcttttgtgatggtaaatccaaaggaaggcctataagtattaacatttgaaataactgctaattcaggaaaatggaagaaaaaaaattatttgaaacacagaacccatttcatggcctgcctgatatctgtgaaatcagggctggagctttacttaggattcacatggcctcctaggaaccatgggacaaatgggaaacaggttatcgggggattcatgaagtcagtgagagtaattgcttcttttttgcgggtgaactgaatgtatttcttcaccaaatcttgatgttaacaattaaaaagaagaaatgacatgcaagtaggtcttagcagaaaaatgcaggctgggcatgagtcatgttgttaccctcccacatgctcctacaatccacagagatgcctgtctgcaggttcttgaagttattgttagtatttggtatctcaaatttttcgtcactgttcacatgccactttctctgtgcacagtggtatcctcatttgctttttaacctacactgaggagtctttgtcaggttgcactgattttccaattctgcagtaatgagtaagctcacggcatggggaagaagacagtcagtccaatgaagttctctaaattattttaacattgcctttgaaggccttgactcatccttagctatttcaatgaagaaattcctaccatgaatttaaaaccctaaaaattctgtttcaaattctttgggcattggggtactcagatatcccattgtggaagaattttaagaataaatagaagtttctgttgagaaccatgagcaacatgtttcttacaatgagaattgctatgcattttaaaattgcaaatatatatgaaaattgaagacaagaggaaattgtatttctaacttgattctgatcactcacagaggtggcatattattatagttgggacatcctttgcacccttcataaaaaaggccagctgactgctcagcatcacctgccaaggccactagatttgtgtttacaggggtatctctgtgatgcttgtcacatcactcttgaccacctctgttaataaattccgacagtgcagtggcgatcggagtgtgaacttatgttcccagcatatggaaagctatcttaggttttaaggtagtagaaattgcccaggagtttgacagcaactttgtttcccgggtctaaaatcgtatcccactgaggtgtatgcagtggagcataatacatgcaaatacatgcaaaactccttttgtttcacctaagattcactttctatcttactttcccttcctgcctagtgtgacttttgcccccaagagtgcctggacagcattctagtttctacaaaatggtcctctgtgtaggtgaatgtgtcccaaacctgctatcactttcttgtttcagtgtgactgtcttgttagaggtgaagtttatccagggtaacttgctcactaactattcctttttatggcctggggttaaagggcgcatggctcacactggtgaaaataaggaaggcctggtcttatcttgtattaataatactggctgcattccaccagccagagatttctatctgcgaagacctatgaaacactgaagagaaatgtaggcagaaggaaatggccacatatcacaagttctattatatattcttttgtaaatacatattgtatattacttggatgttttcttatatcatttactgtctttttgagttaatgtcagtttttactctctcaacttactatgtaacattgtaaataacataatgtcctttattatttatatttaagcatctaacatatagagttgttttcatataagtttaagataaatgtcaaaaatatatgttcttttgtttttctttgctttaaaattatgtatcttttccttttcttttttttaagaataatttattgttcaggagaaagaatgtatatgtaactgaaactatctgaagaatgcacattgaaggccgtgaggtactgataaactaaagaatttattattcaaaatactaagcaataagtaattgtgatttatttaaagttttgtccattttccatgaaagacatactgcaataaaaatgctactctgtggaaaaaaaaaaaaaaaaaa

SEQ ID NO: 4190 - DNA, 6027 bp, Homo sapiens
  source 1..6027: mol_type = genomic DNA
gaggccaggggagggtgcgaaggaggcgcctgcctccaacctgcgggcgggaggtgggtggctgcggggcaattgaaaaagagccggcgaggagttccccgaaacttgttggaactccgggctcgcgcggaggccaggagctgagcggcggcggctgccggacgatgggagcgtgagcaggacggtgataacctctccccgatcgggttgcgagggcgccgggcagaggccaggacgcgagccgccagcggtgggacccatcgacgacttcccggggcgacaggagcagccccgagagccagggcgagcgcccgttccaggtggccggaccgcccgccgcgtccgcgccgcgctccctgcaggcaacgggagacgcccccgcgcagcgcgagcgcctcagcgcggccgctcgctctccccctcgagggacaaacttttcccaaacccgatccgagcccttggaccaaactcgcctgcgccgagagccgtccgcgtagagcgctccgtctccggcgagatgtccgagcgcaaagaaggcagaggcaaagggaagggcaagaagaaggagcgaggctccggcaagaagccggagtccgcggcgggcagccagagcccagccttgcctccccgattgaaagagatgaaaagccaggaatcggctgcaggttccaaactagtccttcggtgtgaaaccagttctgaatactcctctctcagattcaagtggttcaagaatgggaatgaattgaatcgaaaaaacaaaccacaaaatatcaagatacaaaaaaagccagggaagtcagaacttcgcattaacaaagcatcactggctgattctggagagtatatgtgcaaagtgatcagcaaattaggaaatgacagtgcctctgccaatatcaccatcgtggaatcaaacgagatcatcactggtatgccagcctcaactgaaggagcatatgtgtcttcagagtctcccattagaatatcagtatccacagaaggagcaaatacttcttcatctacatctacatccaccactgggacaagccatcttgtaaaatgtgcggagaaggagaaaactttctgtgtgaatggaggggagtgcttcatggtgaaagacctttcaaacccctcgagatacttgtgcaagtgcccaaatgagtttactggtgatcgctgccaaaactacgtaatggccagcttctacaagcatcttgggattgaatttatggaggcggaggagctgtaccagaagagagtgctgaccataaccggcatctgcatcgccctccttgtggtcggcatcatgtgtgtggtggcctactgcaaaaccaagaaacagcggaaaaagctgcatgaccgtcttcggcagagccttcggtctgaacgaaacaatatgatgaacattgccaatgggcctcaccatcctaacccaccccccgagaatgtccagctggtgaatcaatacgtatctaaaaacgtcatctccagtgagcatattgttgagagagaagcagagacatccttttccaccagtcactatacttccacagcccatcactccactactgtcacccagactcctagccacagctggagcaacggacacactgaaagcatcctttccgaaagccactctgtaatcgtgatgtcatccgtagaaaacagtaggcacagcagcccaactgggggcccaagaggacgtcttaatggcacaggaggccctcgtgaatgtaacagcttcctcaggcatgccagagaaacccctgattcctaccgagactctcctcatagtgaaaggtatgtgtcagccatgaccaccccggctcgtatgtcacctgtagatttccacacgccaagctcccccaaatcgcccccttcggaaatgtctccacccgtgtccagcatgacggtgtccatgccttccatggcggtcagccccttcatggaagaagagagacctctacttctcgtgacaccaccaaggctgcgggagaagaagtttgaccatcaccctcagcagttcagctccttccaccacaaccccgcgcatgacagtaacagcctccctgctagccccttgaggatagtggaggatgaggagtatgaaacgacccaagagtacgagccagcccaagagcctgttaagaaactcgccaatagccggcgggccaaaagaaccaagcccaatggccacattgctaacagattggaagtggacagcaacacaagctcccagagcagtaactcagagagtgaaacagaagatgaaagagtaggtgaagatacgcctttcctgggcatacagaaccccctggcagccagtcttgaggcaacacctgccttccgcctggctgacagcaggactaacccagcaggccgcttctcgacacaggaagaaatccaggccaggctgtctagtgtaattgctaaccaagaccctattgctgtataaaacctaaataaacacatagattcacctgtaaaactttattttatataataaagtattccaccttaaattaaacaatttattttattttagcagttctgcaaatagaaaacaggaaaaaaacttttataaattaaatatatgtatgtaaaaatgtgttatgtgccatatgtagcaattttttacagtatttcaaaacgagaaagatatcaatggtgcctttatgttatgttatgtcgagagcaagttttgtacagttacagtgattgcttttccacagtatttctgcaaaacctctcatagattcagtttttgctggcttcttgtgcattgcattatgatgttgactggatgtatgatttgcaagacttgcaactgtccctctgtttgcttgtagtagcacccgatcagtatgtcttgtaatggcacatccatccagatatgcctctcttgtgtatgaagttttctttgctttcagaatatgaaatgagttgtgtctactctgccagccaaaggtttgcctcattgggctctgagataatagtagatccaacagcatgctactattaaatacagcaagaaactgcattaagtaatgttaaatattaggaagaaagtaatactgtgatttaaaaaaaactatattattaatcagaagacagcttgctcttactaaaaggagctctcatttactttatttgattttatttttcttgacaaaaagcaacagttttagggatagcttagaaaatgggttctggcttgctatcagggtaaatctaacaccttacaagaggactgagtgtcactttctctctgggggaatgatccagcagcttatctagttgacaatcaaaacacggctgataaaggtgcaatcatttctgacatgtatttttcactgattttgaagctagtgattggttgtgtcttcttggctcaaaaagaagcatattacggcacaaaaagcccagcccagacagcacatgcagcattttgtctgaaatacttctagagtcaaacgtgcctgctgtacatagcgatgacttgtcatcatagggaagtatttccatcgtagagtgttcagaaggagtgactgtataggtggagagaagcttagtgactccgttgaaattttaaaatgtggatgaccacccctttctcccccttatttttcttttatctttccatgttgccttgatcaggtcataactatgcatgaacattttttatcaggaatggccgatgtgtatgtgatttgtaatcacaagtaatgattcatcaggaaatgtcaatcctgttggaaagattgcacctttacttgcagaagtgacccccacctgtgtcctgacctctccatttacaggctctctcacccatttcccccacctcctttaatttttgctttactgtcataaagtaggactaagattggtctaagcattgcatgttcttttgtgatggtaaatccaaaggaaggcctataagtattaacatttgaaataactgctaattcaggaaaatggaagaaaaaaaattatttgaaacacagaacccatttcatggcctgcctgatatctgtgaaatcagggctggagctttacttaggattcacatggcctcctaggaaccatgggacaaatgggaaacaggttatcgggggattcatgaagtcagtgagagtaattgcttcttttttgcgggtgaactgaatgtatttcttcaccaaatcttgatgttaacaattaaaaagaagaaatgacatgcaagtaggtcttagcagaaaaatgcaggctgggcatgagtcatgttgttaccctcccacatgctcctacaatccacagagatgcctgtctgcaggttcttgaagttattgttagtatttggtatctcaaatttttcgtcactgttcacatgccactttctctgtgcacagtggtatcctcatttgctttttaacctacactgaggagtctttgtcaggttgcactgattttccaattctgcagtaatgagtaagctcacggcatggggaagaagacagtcagtccaatgaagttctctaaattattttaacattgcctttgaaggccttgactcatccttagctatttcaatgaagaaattcctaccatgaatttaaaaccctaaaaattctgtttcaaattctttgggcattggggtactcagatatcccattgtggaagaattttaagaataaatagaagtttctgttgagaaccatgagcaacatgtttcttacaatgagaattgctatgcattttaaaattgcaaatatatatgaaaattgaagacaagaggaaattgtatttctaacttgattctgatcactcacagaggtggcatattattatagttgggacatcctttgcacccttcataaaaaaggccagctgactgctcagcatcacctgccaaggccactagatttgtgtttacaggggtatctctgtgatgcttgtcacatcactcttgaccacctctgttaataaattccgacagtgcagtggcgatcggagtgtgaacttatgttcccagcatatggaaagctatcttaggttttaaggtagtagaaattgcccaggagtttgacagcaactttgtttcccgggtctaaaatcgtatcccactgaggtgtatgcagtggagcataatacatgcaaatacatgcaaaactccttttgtttcacctaagattcactttctatcttactttcccttcctgcctagtgtgacttttgcccccaagagtgcctggacagcattctagtttctacaaaatggtcctctgtgtaggtgaatgtgtcccaaacctgctatcactttcttgtttcagtgtgactgtcttgttagaggtgaagtttatccagggtaacttgctcactaactattcctttttatggcctggggttaaagggcgcatggctcacactggtgaaaataaggaaggcctggtcttatcttgtattaataatactggctgcattccaccagccagagatttctatctgcgaagacctatgaaacactgaagagaaatgtaggcagaaggaaatggccacatatcacaagttctattatatattcttttgtaaatacatattgtatattacttggatgttttcttatatcatttactgtctttttgagttaatgtcagtttttactctctcaacttactatgtaacattgtaaataacataatgtcctttattatttatatttaagcatctaacatatagagttgttttcatataagtttaagataaatgtcaaaaatatatgttcttttgtttttctttgctttaaaattatgtatcttttccttttcttttttttaagaataatttattgttcaggagaaagaatgtatatgtaactgaaactatctgaagaatgcacattgaaggccgtgaggtactgataaactaaagaatttattattcaaaatactaagcaataagtaattgtgatttatttaaagttttgtccattttccatgaaagacatactgcaataaaaatgctactctgtggaaaaaaaaaaaaaaaaaa

SEQ ID NO: 4191 - DNA, 2104 bp, Homo sapiens
  source 1..2104: mol_type = genomic DNA
acgtagcgcggcgctcggaactgacctactaacacacatctctccgcgcggccacggcgcccgcggacccggcgcgcccgcccgcctcccgcgccgcgccctcgccgccgcccgcctcccgccgcggccccggaggcccggcccggcccgagccccgagcgccggcggcccgactcccggccgcccctttctttctcctcgccggcccgagagcaggaacacgataacgaaggaggcccaacttcattcaataaggagcctgacggatttatcccagacggtagaacaaaaggaagaatattgatggattttaaaccagagtttttaaagagcttgagaatacggggaaattaatttgttctcctacacacatagatagggtaaggttgtttctgatgcagctgagaaaaatgcagaccgtcaaaaaggagcaggcgtctcttgatgccagtagcaatgtggacaagatgatggtccttaattctgctttaacggaagtgtcagaagactccacaacaggtgaggagctgcttctcagtgaaggaagtgtggggaagaacaaatcttctgcatgtcggaggaaacgggaattcattcctgatgaaaagaaagatgctatgtattgggaaaaaaggcggaaaaataatgaagctgccaaaagatctcgtgagaagcgtcgactgaatgacctggttttagagaacaaactaattgcactgggagaagaaaacgccactttaaaagctgagctgctttcactaaaattaaagtttggtttaattagctccacagcatatgctcaagagattcagaaactcagtaattctacagctgtgtactttcaagattaccagacttccaaatccaatgtgagttcatttgtggacgagcacgaaccctcgatggtgtcaagtagttgtatttctgtcattaaacactctccacaaagctcgctgtccgatgtttcagaagtgtcctcagtagaacacacgcaggagagctctgtgcagggaagctgcagaagtcctgaaaacaagttccagattatcaagcaagagccgatggaattagagagctacacaagggagccaagagatgaccgaggctcttacacagcgtccatctatcaaaactatatggggaattctttctctgggtactcacactctcccccactactgcaagtcaaccgatcctccagcaactccccgagaacgtcggaaactgatgatggtgtggtaggaaagtcatctgatggagaagacgagcaacaggtccccaagggccccatccattctccagttgaactcaagcatgtgcatgcaactgtggttaaagttccagaagtgaattcctctgccttgccacacaagctccggatcaaagccaaagccatgcagatcaaagtagaagcctttgataatgaatttgaggccacgcaaaaactttcctcacctattgacatgacatctaaaagacatttcgaactcgaaaagcatagtgccccaagtatggtacattcttctcttactcctttctcagtgcaagtgactaacattcaagattggtctctcaaatcggagcactggcatcaaaaagaactgagtggcaaaactcagaatagtttcaaaactggagttgttgaaatgaaagacagtggctacaaagtttctgacccagagaacttgtatttgaagcaggggatagcaaacttatctgcagaggttgtctcactcaagagacttatagccacacaaccaatctctgcttcagactctgggtaaattactactgagtaagagctgggcatttagaaagatgtcatttgcaatagagcagtccattttgtattatgctgaattttcactggacctgtgatgtcatttcactgtgatgtgcacatgttgtctgtttggtgtctttttgtgcacagattatgatgaagattagattgtgttatcactctgcctgtgtatagtcagatagtccatgcgaaggctgtatatattgaacattatttttgttgttctattataaagtgtgtaagttaccagtttcaataaaggattggtgacaaacacagaaaaaaaaaaaaaaaaaaaaa

SEQ ID NO: 4192 - DNA, 3231 bp, Homo sapiens
  source 1..3231: mol_type = genomic DNA
cccggccgggtctgggggcggggcgtttgcccggcctttccagggccggggaaccccaggaggaagctgctgagccatgggcgcctacgcgcgggcttcgggggtctgcgctcgcggctgcctggactcagcaggcccctggaccatgtcccgcgccctgcggccaccgctcccgcctctctgctttttccttttgttgctggcggctgccggtgctcgggccgggggatacgagacatgccccacagtgcagccgaacatgctgaacgtgcacctgctgcctcacacacatgatgacgtgggctggctcaaaaccgtggaccagtacttttatggaatcaagaatgacatccagcacgccggtgtgcagtacatcctggactcggtcatctctgccttgctggcagatcccacccgtcgcttcatttacgtggagattgccttcttctcccgttggtggcaccagcagacaaatgccacacaggaagtcgtgcgagaccttgtgcgccaggggcgcctggagttcgccaatggtggctgggtgatgaacgatgaggcagccacccactacggtgccatcgtggaccagatgacacttgggctgcgctttctggaggacacatttggcaatgatgggcgaccccgtgtggcctggcacattgaccccttcggccactctcgggagcaggcctcgctgtttgcgcagatgggcttcgacggcttcttctttgggcgccttgattatcaagataagtgggtacggatgcagaagctggagatggagcaggtgtggcgggccagcaccagcctgaagcccccgaccgcggacctcttcactggtgtgcttcccaatggttacaacccgccaaggaatctgtgctgggatgtgctgtgtgtcgatcagccgctggtggaggaccctcgcagccccgagtacaacgccaaggagctggtcgattacttcctaaatgtggccactgcccagggccggtattaccgcaccaaccacactgtgatgaccatgggctcggacttccaatatgagaatgccaacatgtggttcaagaaccttgacaagctcatccggctggtaaatgcgcagcaggcaaaaggaagcagtgtccatgttctctactccacccccgcttgttacctctgggagctgaacaaggccaacctcacctggtcagtgaaacatgacgacttcttcccttacgcggatggcccccaccagttctggaccggttacttttccagtcggccggccctcaaacgctacgagcgcctcagctacaacttcctgcaggtgtgcaaccagctggaggcgctggtgggcctggcggccaacgtgggaccctatggctccggagacagtgcacccctcaatgaggcgatggctgtgctccagcatcacgacgccgtcagcggcacctcccgccagcacgtggccaacgactacgcgcgccagcttgcggcaggctgggggccttgcgaggttcttctgagcaacgcgctggcgcggctcagaggcttcaaagatcacttcaccttttgccaacagctaaacatcagcatctgcccgctcagccagacggcggcgcgcttccaggtcatcgtttataatcccctggggcggaaggtgaattggatggtacggctgccggtcagcgaaggcgttttcgttgtgaaggaccccaatggcaggacagtgcccagcgatgtggtaatatttcccagctcagacagccaggcgcaccctccggagctgctgttctcagcctcactgcccgccctgggcttcagcacctattcagtagcccaggtgcctcgctggaagccccaggcccgcgcaccacagcccatccccagaagatcctggtcccctgctttaaccatcgaaaatgagcacatccgggcaacgtttgatcctgacacagggctgttgatggagattatgaacatgaatcagcaactcctgctgcctgttcgccagaccttcttctggtacaacgccagtataggtgacaacgaaagtgaccaggcctcaggtgcctacatcttcagacccaaccaacagaaaccgctgcctgtgagccgctgggctcagatccacctggtgaagacacccttggtgcaggaggtgcaccagaacttctcagcttggtgttcccaggtggttcgcctgtacccaggacagcggcacctggagctagagtggtcggtggggccgatacctgtgggcgacacctgggggaaggaggtcatcagccgttttgacacaccgctggagacaaagggacgcttctacacagacagcaatggccgggagatcctggagaggaggcgggattatcgacccacctggaaactgaaccagacggagcccgtggcaggaaactactatccagtcaacacccggatttacatcacggatggaaacatgcagctgactgtgctgactgaccgctcccaggggggcagcagcctgagagatggctcgctggagctcatggtgcaccgaaggctgctgaaggacgatggacgcggagtatcggagccactaatggagaacgggtcgggggcgtgggtgcgagggcgccacctggtgctgctggacacagcccaggctgcagccgccggacaccggctcctggcggagcaggaggtcctggcccctcaggtggtgctggccccgggtggcggcgccgcctacaatctcggggctcctccgcgcacgcagttctcagggctgcgcagggacctgccgccctcggtgcacctgctcacgctggccagctggggccccgaaatggtgctgctgcgcttggagcaccagtttgccgtaggagaggattccggacgtaacctgagcgcccccgttaccttgaacttgagggacctgttctccaccttcaccatcacccgcctgcaggagaccacgctggtggccaaccagctccgcgaggcagcctccaggctcaagtggacaacaaacacaggccccacaccccaccaaactccgtaccagctggacccggccaacatcacgctggaacccatggaaatccgcactttcctggcctcagttcaatggaaggaggtggatggttaggtctgctgggatgggccctccaagcccaagcctcctgctccgggggcagaccagactctgactctcctcttggggctgctgccattaaaacgctactactaagactcaggtcaaaaaaa

SEQ ID NO: 4193 - DNA, 4286 bp, Homo sapiens
  source 1..4286: mol_type = genomic DNA
aatcgcgaggcggcgggcgatcccgggctccccgggctgtgggctacaggcgcagagcgggccaggcgcggagctggcggcagtgacaggaggcgcgaacccgcagcgcttaccgcgcggcgccgcaccatggagcccgccgtgtcgctggccgtgtgcgcgctgctcttcctgctgtgggtgcgcctgaaggggctggagttcgtgctcatccaccagcgctgggtgttcgtgtgcctcttcctcctgccgctctcgcttatcttcgatatctactactacgtgcgcgcctgggtggtgttcaagctcagcagcgctccgcgcctgcacgagcagcgcgtgcgggacatccagaagcaggtgcgggaatggaaggagcagggtagcaagaccttcatgtgcacggggcgccctggctggctcactgtctcactacgtgtcgggaagtacaagaagacacacaaaaacatcatgatcaacctgatggacattctggaagtggacaccaagaaacagattgtccgtgtggagcccttggtgaccatgggccaggtgactgccctgctgacctccattggctggactctccccgtgttgcctgagcttgatgacctcacagtggggggcttgatcatgggcacaggcatcgagtcatcatcccacaagtacggcctgttccaacacatctgcactgcttacgagctggtcctggctgatggcagctttgtgcgatgcactccgtccgaaaactcagacctgttctatgccgtaccctggtcctgtgggacgctgggtttcctggtggccgctgagatccgcatcatccctgccaagaagtacgtcaagctgcgtttcgagccagtgcggggcctggaggctatctgtgccaagttcacccacgagtcccagcggcaggagaaccacttcgtggaagggctgctctactccctggatgaggctgtcattatgacaggggtcatgacagatgaggcagagcccagcaagctgaatagcattggcaattactacaagccgtggttctttaagcatgtggagaactatctgaagacaaaccgagagggcctggagtacattcccttgagacactactaccaccgccacacgcgcagcatcttctgggagctccaggacattatcccctttggcaacaaccccatcttccgctacctctttggctggatggtgcctcccaagatctccctcctgaagctgacccagggtgagaccctgcgcaagctgtacgagcagcaccacgtggtgcaggacatgctggtgcccatgaagtgcctgcagcaggccctgcacaccttccaaaacgacatccacgtctaccccatctggctgtgtccgttcatcctgcccagccagccaggcctagtgcaccccaaaggaaatgaggcagagctctacatcgacattggagcatatggggagccgcgtgtgaaacactttgaagccaggtcctgcatgaggcagctggagaagtttgtccgcagcgtgcatggcttccagatgctgtatgccgactgctacatgaaccgggaggagttctgggagatgtttgatggctccttgtaccacaagctgcgagagaagctgggttgccaggacgccttccccgaggtgtacgacaagatctgcaaggccgccaggcactgagctggagcccgcctggagagacagacacgtgtgagtggtcaggcatcttcccttcactcaagcttggctgctttcctagatccacactttcaaagagaaacccctccagaactcccaccctgacagcccaacaccaccttcctcctggcttccagggggcagcccagtggaatggaaagaatgtgggatttggagtcagacaagcctgagtccagttccccgtttagaactcattagctgtgtgactctgggtgagtcccttaacccctctgagcccgggtctcttcattagttgaaagggatagtaatacctacttgcaggttgttgtcatctgagttgagcactggtcacattgaaggtgctgggtaagtggtagctcttgttgcttcccgttcagcgtcacatctgcagtggagcctgaaaaggctccacattaggtcacctgtgcacagccatggctggaatgatgaaggggatacgctggagttgccctgccatcgcctccatcagccagacgaggtcctcacaggagaaggacagctcttccccaccctgggatctcaggagggcagccacggagtggggaggccccagatgcgctgtgccaaagccaggtccgaggccaaagttctccctgccatccttggtgccgtcctgccccttcctccttcatgcctgggcctgcaggcccaccccagccaccactgagtccactcggagtgccctgtgttcctggagaaggcattccagggttgaatcttgtcccagcctcagcctgggacacctaggtggagagagtggtctccgctctgaattggatccaggggacctgggctcattcttcttggctcaccaaccctgcaggcctcatctttcccaaaacccactttgtcttggtgggagtgggtccgcgctgctctgcagcaggggctggggagtggacagcatcaggtgggaaagtggagtccaccctcatgtttctgtaggattctcaccgtggggctggaagaaaagagcatcgacttgatttctccaaccactcatccctctttttctttcttccaccactccccaccccagctgtagttaatttcagtgccttacaaatcctaagctcagagaaagttccatttccgttccagagggaagggaacctccctaggtccttccctggcttgttataacgcaaagcttggttgtttatgcaactctatcttaagaactgcccagcctcagctgaaaacccgaatctgagaaggaattgcgtcatgtaagggaagctggaattaagggagctgagccagtcatggttgtggcgtgtgagtcaggagacctaggtttcagcccctctctactgtcagcgagctgtgcaacgtgggcaagtcattgtcctctgagctgcagtttcctcatctgtcacatcgctacagacaagacctccctggaacccttctgattgtcttagacactgtggttgcaaaacccacggaaagcctcatttgtgtggaaagtcagaggaaaaatgatccagtggacacttggggattatctgtcattcaagatccttccttcaaccccaaggtcagctcccatctcatttccagaaaggctcatacctggcttgcagggaagcatctgtcttgtcattccaggtgccagaatcctctcagagtcattgaagggtgttcacccatcccacccaaggcttggcacactgccagtgtcttagcagggtcttgtgagggctgggggcatccaggcactcagaaggcaaaggaaccaccctacccatttggcctctggagggggcagaagaaagaaataaacctcatcctatattttacaaagcatgtgaattctggcattagctctcataggagacccatgtgcttccttgctcagtgcaaaactgatgattctacttgctgtagatgaatggttaacacgagctagttaaacagtgccattgttttgccagtgaagcctccaaccctaagccactgggacggtggccagagatgccagcagcctctgtcgcccttagtcatataaccaaaatccagaccttatccacaacccggggcttggaaaggaaggtattttggaatcacaccctccggttatgttgctccagtaaaatcttgcctggaaagaggcagtcttcttagcatggtgagctgagttcatggcttttttttgtagccagtcctgtccctggccatccatgtgatggttttggatggagttaaacttgatgccagtgggcagtgcatgtggaaagtatcagagtaaggctctcccctccagagccctgagtttcttggctgcatgaaggttttctttagaatcagaattgtagccagtttctttggccagaaggatgaatacttggatattactgaaagggaggggtggagatgggtgtggcagtgtatggtgtgtgatttttattttcttctttggtcatgggggccaaggagaaaggcatgaatcttccctgtcaggctcttacagccacaggcactgtgtctactgtctggaagacatgtccccatggctgtggggccgctgcttctgtttaaataaaagtggcctggaagctggc

SEQ ID NO: 4194 - DNA, 2090 bp, Homo sapiens
  source 1..2090: mol_type = genomic DNA
ggcacatgtggctggaaatgcaagaagagggaaacgtgtggcttggagtttcaagaagagtgactgtctcagtgccgagtgcctcagcagcttctccacatgctcttcagtccccaaagttggagaatcccatcaaggagagtagccctgtaaggaattcgaatttccagcatttttcacctctgacagagcccagacaccatgaacgcaagtgaattccgaaggagagggaaggagatggtggattacgtggccaactacatggaaggcattgagggacgccaggtctaccctgacgtggagcccgggtacctgcggccgctgatccctgccgctgcccctcaggagccagacacgtttgaggacatcatcaacgacgttgagaagataatcatgcctggggtgacgcactggcacagcccctacttcttcgcctacttccccactgccagctcgtacccggccatgcttgcggacatgctgtgcggggccattggctgcatcggcttctcctgggcggcaagcccagcatgcacagagctggagactgtgatgatggactggctcgggaagatgctggaactaccaaaggcatttttgaatgagaaagctggagaagggggaggagtgatccagggaagtgccagtgaagccaccctggtggccctgctggccgctcggaccaaagtgatccatcggctgcaggcagcgtccccagagctcacacaggccgctatcatggagaagctggtggcttactcatccgatcaggcacactcctcagtggaaagagctgggttaattggtggagtgaaattaaaagccatcccctcagatggcaacttcgccatgcgtgcgtctgccctgcaggaagccctggagagagacaaagcggctggcctgattcctttctttatggttgccaccctggggaccacaacatgctgctcctttgacaatctcttagaagtcggtcctatctgcaacaaggaagacatatggctgcacgttgatgcagcctacgcaggcagtgcattcatctgccctgagttccggcaccttctgaatggagtggagtttgcagattcattcaactttaatccccacaaatggctattggtgaattttgactgttctgccatgtgggtgaaaaagagaacagacttaacgggagcctttagactggaccccacttacctgaagcacagccatcaggattcagggcttatcactgactaccggcattggcagataccactgggcagaagatttcgctctttgaaaatgtggtttgtatttaggatgtatggagtcaaaggactgcaggcttatatccgcaagcatgtccagctgtcccatgagtttgagtcactggtgcgccaggatccccgctttgaaatctgtgtggaagtcattctggggcttgtctgctttcggctaaagggttccaacaaagtgaatgaagctcttctgcaaagaataaacagtgccaaaaaaatccacttggttccatgtcacctcagggacaagtttgtcctgcgctttgccatctgttctcgcacggtggaatctgcccatgtgcagcgggcctgggaacacatcaaagagctggcggccgacgtgctgcgagcagagagggagtaggagtgaagccagctgcaggaatcaaaaattgaagagagatatatctgaaaactggaataagaagcaaataaatatcatcctgccttcatggaactcagctgtctgtggcttcccatgtctttctccaaagttatccagagggttgtgattttgtctgcttagtatctcatcaacaaagaaatattatttgctaattaaaaagttaatcttcatggccatagcttttattcattagctgtgatttttgttgattaaaacattatagattttcatgttcttgcagtcatcagaagtggtaggaaagcctcactgatatattttccagggcaatcaatgttcacgcaacttgaaattatatctgtggtcttcaaattgtcttttgtcatgtggctaaatgcctaataaacaattcaagtgaaatactaaaaaaaaaaaaaaaaaaaaaa

SEQ ID NO: 4195 - DNA, 1975 bp, Homo sapiens
  source 1..1975: mol_type = genomic DNA
aactgtcactgtggagaggagagagagaggacagagagcaagtcactcccggctgcctttttcacctctgacagagcccagacaccatgaacgcaagtgaattccgaaggagagggaaggagatggtggattacgtggccaactacatggaaggcattgagggacgccaggtctaccctgacgtggagcccgggtacctgcggccgctgatccctgccgctgcccctcaggagccagacacgtttgaggacatcatcaacgacgttgagaagataatcatgcctggggtgacgcactggcacagcccctacttcttcgcctacttccccactgccagctcgtacccggccatgcttgcggacatgctgtgcggggccattggctgcatcggcttctcctgggcggcaagcccagcatgcacagagctggagactgtgatgatggactggctcgggaagatgctggaactaccaaaggcatttttgaatgagaaagctggagaagggggaggagtgatccagggaagtgccagtgaagccaccctggtggccctgctggccgctcggaccaaagtgatccatcggctgcaggcagcgtccccagagctcacacaggccgctatcatggagaagctggtggcttactcatccgatcaggcacactcctcagtggaaagagctgggttaattggtggagtgaaattaaaagccatcccctcagatggcaacttcgccatgcgtgcgtctgccctgcaggaagccctggagagagacaaagcggctggcctgattcctttctttatggttgccaccctggggaccacaacatgctgctcctttgacaatctcttagaagtcggtcctatctgcaacaaggaagacatatggctgcacgttgatgcagcctacgcaggcagtgcattcatctgccctgagttccggcaccttctgaatggagtggagtttgcagattcattcaactttaatccccacaaatggctattggtgaattttgactgttctgccatgtgggtgaaaaagagaacagacttaacgggagcctttagactggaccccacttacctgaagcacagccatcaggattcagggcttatcactgactaccggcattggcagataccactgggcagaagatttcgctctttgaaaatgtggtttgtatttaggatgtatggagtcaaaggactgcaggcttatatccgcaagcatgtccagctgtcccatgagtttgagtcactggtgcgccaggatccccgctttgaaatctgtgtggaagtcattctggggcttgtctgctttcggctaaagggttccaacaaagtgaatgaagctcttctgcaaagaataaacagtgccaaaaaaatccacttggttccatgtcacctcagggacaagtttgtcctgcgctttgccatctgttctcgcacggtggaatctgcccatgtgcagcgggcctgggaacacatcaaagagctggcggccgacgtgctgcgagcagagagggagtaggagtgaagccagctgcaggaatcaaaaattgaagagagatatatctgaaaactggaataagaagcaaataaatatcatcctgccttcatggaactcagctgtctgtggcttcccatgtctttctccaaagttatccagagggttgtgattttgtctgcttagtatctcatcaacaaagaaatattatttgctaattaaaaagttaatcttcatggccatagcttttattcattagctgtgatttttgttgattaaaacattatagattttcatgttcttgcagtcatcagaagtggtaggaaagcctcactgatatattttccagggcaatcaatgttcacgcaacttgaaattatatctgtggtcttcaaattgtcttttgtcatgtggctaaatgcctaataaacaattcaagtgaaatactaaaaaaaaaaaaaaaaaaaaaa

SEQ ID NO: 4196 - DNA, 2651 bp, Homo sapiens
  source 1..2651: mol_type = genomic DNA
gatgggattggggttttcccctcccatgtgctcaagactggcgctaaaagttttgagcttctcaaaagtctagagccaccgtccagggagcaggtagctgctgggctccggggacactttgcgttcgggctgggagcgtgctttccacgacggtgacacgcttccctggattggcagccagactgccttccgggtcactgccatggaggagccgcagtcagatcctagcgtcgagccccctctgagtcaggaaacattttcagacctatggaaactacttcctgaaaacaacgttctgtcccccttgccgtcccaagcaatggatgatttgatgctgtccccggacgatattgaacaatggttcactgaagacccaggtccagatgaagctcccagaatgccagaggctgctccccccgtggcccctgcaccagcagctcctacaccggcggcccctgcaccagccccctcctggcccctgtcatcttctgtcccttcccagaaaacctaccagggcagctacggtttccgtctgggcttcttgcattctgggacagccaagtctgtgacttgcacgtactcccctgccctcaacaagatgttttgccaactggccaagacctgccctgtgcagctgtgggttgattccacacccccgcccggcacccgcgtccgcgccatggccatctacaagcagtcacagcacatgacggaggttgtgaggcgctgcccccaccatgagcgctgctcagatagcgatggtctggcccctcctcagcatcttatccgagtggaaggaaatttgcgtgtggagtatttggatgacagaaacacttttcgacatagtgtggtggtgccctatgagccgcctgaggttggctctgactgtaccaccatccactacaactacatgtgtaacagttcctgcatgggcggcatgaaccggaggcccatcctcaccatcatcacactggaagactccagtggtaatctactgggacggaacagctttgaggtgcgtgtttgtgcctgtcctgggagagaccggcgcacagaggaagagaatctccgcaagaaaggggagcctcaccacgagctgcccccagggagcactaagcgagcactgcccaacaacaccagctcctctccccagccaaagaagaaaccactggatggagaatatttcacccttcagatgctacttgacttacgatggtgttacttcctgataaactcgtcgtaagttgaaaatattatccgtgggcgtgagcgcttcgagatgttccgagagctgaatgaggccttggaactcaaggatgcccaggctgggaaggagccaggggggagcagggctcactccagccacctgaagtccaaaaagggtcagtctacctcccgccataaaaaactcatgttcaagacagaagggcctgactcagactgacattctccacttcttgttccccactgacagcctcccacccccatctctccctcccctgccattttgggttttgggtctttgaacccttgcttgcaataggtgtgcgtcagaagcacccaggacttccatttgctttgtcccggggctccactgaacaagttggcctgcactggtgttttgttgtggggaggaggatggggagtaggacataccagcttagattttaaggtttttactgtgagggatgtttgggagatgtaagaaatgttcttgcagttaagggttagtttacaatcagccacattctaggtaggggcccacttcaccgtactaaccagggaagctgtccctcactgttgaattttctctaacttcaaggcccatatctgtgaaatgctggcatttgcacctacctcacagagtgcattgtgagggttaatgaaataatgtacatctggccttgaaaccaccttttattacatggggtctagaacttgacccccttgagggtgcttgttccctctccctgttggtcggtgggttggtagtttctacagttgggcagctggttaggtagagggagttgtcaagtctctgctggcccagccaaaccctgtctgacaacctcttggtgaaccttagtacctaaaaggaaatctcaccccatcccacaccctggaggatttcatctcttgtatatgatgatctggatccaccaagacttgttttatgctcagggtcaatttcttttttcttttttttttttttttttctttttctttgagactgggtctcgctttgttgcccaggctggagtggagtggcgtgatcttggcttactgcagcctttgcctccccggctcgagcagtcctgcctcagcctccggagtagctgggaccacaggttcatgccaccatggccagccaacttttgcatgttttgtagagatggggtctcacagtgttgcccaggctggtctcaaactcctgggctcaggcgatccacctgtctcagcctcccagagtgctgggattacaattgtgagccaccacgtccagctggaagggtcaacatcttttacattctgcaagcacatctgcattttcaccccacccttcccctccttctccctttttatatcccatttttatatcgatctcttattttacaataaaactttgctgccacctgtgtgtctgaggggtg

SEQ ID NO: 4197 - DNA, 2588 bp, Homo sapiens
  source 1..2588: mol_type = genomic DNA
gatgggattggggttttcccctcccatgtgctcaagactggcgctaaaagttttgagcttctcaaaagtctagagccaccgtccagggagcaggtagctgctgggctccggggacactttgcgttcgggctgggagcgtgctttccacgacggtgacacgcttccctggattggccagactgccttccgggtcactgccatggaggagccgcagtcagatcctagcgtcgagccccctctgagtcaggaaacattttcagacctatggaaactacttcctgaaaacaacgttctgtcccccttgccgtcccaagcaatggatgatttgatgctgtccccggacgatattgaacaatggttcactgaagacccaggtccagatgaagctcccagaatgccagaggctgctccccccgtggcccctgcaccagcagctcctacaccggcggcccctgcaccagccccctcctggcccctgtcatcttctgtcccttcccagaaaacctaccagggcagctacggtttccgtctgggcttcttgcattctgggacagccaagtctgtgacttgcacgtactcccctgccctcaacaagatgttttgccaactggccaagacctgccctgtgcagctgtgggttgattccacacccccgcccggcacccgcgtccgcgccatggccatctacaagcagtcacagcacatgacggaggttgtgaggcgctgcccccaccatgagcgctgctcagatagcgatggtctggcccctcctcagcatcttatccgagtggaaggaaatttgcgtgtggagtatttggatgacagaaacacttttcgacatagtgtggtggtgccctatgagccgcctgaggttggctctgactgtaccaccatccactacaactacatgtgtaacagttcctgcatgggcggcatgaaccggaggcccatcctcaccatcatcacactggaagactccagtggtaatctactgggacggaacagctttgaggtgcgtgtttgtgcctgtcctgggagagaccggcgcacagaggaagagaatctccgcaagaaaggggagcctcaccacgagctgcccccagggagcactaagcgagcactgcccaacaacaccagctcctctccccagccaaagaagaaaccactggatggagaatatttcacccttcagatccgtgggcgtgagcgcttcgagatgttccgagagctgaatgaggccttggaactcaaggatgcccaggctgggaaggagccaggggggagcagggctcactccagccacctgaagtccaaaaagggtcagtctacctcccgccataaaaaactcatgttcaagacagaagggcctgactcagactgacattctccacttcttgttccccactgacagcctcccacccccatctctccctcccctgccattttgggttttgggtctttgaacccttgcttgcaataggtgtgcgtcagaagcacccaggacttccatttgctttgtcccggggctccactgaacaagttggcctgcactggtgttttgttgtggggaggaggatggggagtaggacataccagcttagattttaaggtttttactgtgagggatgtttgggagatgtaagaaatgttcttgcagttaagggttagtttacaatcagccacattctaggtaggggcccacttcaccgtactaaccagggaagctgtccctcactgttgaattttctctaacttcaaggcccatatctgtgaaatgctggcatttgcacctacctcacagagtgcattgtgagggttaatgaaataatgtacatctggccttgaaaccaccttttattacatggggtctagaacttgacccccttgagggtgcttgttccctctccctgttggtcggtgggttggtagtttctacagttgggcagctggttaggtagagggagttgtcaagtctctgctggcccagccaaaccctgtctgacaacctcttggtgaaccttagtacctaaaaggaaatctcaccccatcccacaccctggaggatttcatctcttgtatatgatgatctggatccaccaagacttgttttatgctcagggtcaatttcttttttcttttttttttttttttttctttttctttgagactgggtctcgctttgttgcccaggctggagtggagtggcgtgatcttggcttactgcagcctttgcctccccggctcgagcagtcctgcctcagcctccggagtagctgggaccacaggttcatgccaccatggccagccaacttttgcatgttttgtagagatggggtctcacagtgttgcccaggctggtctcaaactcctgggctcaggcgatccacctgtctcagcctcccagagtgctgggattacaattgtgagccaccacgtccagctggaagggtcaacatcttttacattctgcaagcacatctgcattttcaccccacccttcccctccttctccctttttatatcccatttttatatcgatctcttattttacaataaaactttgctgccacctgtgtgtctgaggggtg

SEQ ID NO: 4198 - DNA, 2591 bp, Homo sapiens
  source 1..2591: mol_type = genomic DNA
gatgggattggggttttcccctcccatgtgctcaagactggcgctaaaagttttgagcttctcaaaagtctagagccaccgtccagggagcaggtagctgctgggctccggggacactttgcgttcgggctgggagcgtgctttccacgacggtgacacgcttccctggattggcagccagactgccttccgggtcactgccatggaggagccgcagtcagatcctagcgtcgagccccctctgagtcaggaaacattttcagacctatggaaactacttcctgaaaacaacgttctgtcccccttgccgtcccaagcaatggatgatttgatgctgtccccggacgatattgaacaatggttcactgaagacccaggtccagatgaagctcccagaatgccagaggctgctccccccgtggcccctgcaccagcagctcctacaccggcggcccctgcaccagccccctcctggcccctgtcatcttctgtcccttcccagaaaacctaccagggcagctacggtttccgtctgggcttcttgcattctgggacagccaagtctgtgacttgcacgtactcccctgccctcaacaagatgttttgccaactggccaagacctgccctgtgcagctgtgggttgattccacacccccgcccggcacccgcgtccgcgccatggccatctacaagcagtcacagcacatgacggaggttgtgaggcgctgcccccaccatgagcgctgctcagatagcgatggtctggcccctcctcagcatcttatccgagtggaaggaaatttgcgtgtggagtatttggatgacagaaacacttttcgacatagtgtggtggtgccctatgagccgcctgaggttggctctgactgtaccaccatccactacaactacatgtgtaacagttcctgcatgggcggcatgaaccggaggcccatcctcaccatcatcacactggaagactccagtggtaatctactgggacggaacagctttgaggtgcgtgtttgtgcctgtcctgggagagaccggcgcacagaggaagagaatctccgcaagaaaggggagcctcaccacgagctgcccccagggagcactaagcgagcactgcccaacaacaccagctcctctccccagccaaagaagaaaccactggatggagaatatttcacccttcagatccgtgggcgtgagcgcttcgagatgttccgagagctgaatgaggccttggaactcaaggatgcccaggctgggaaggagccaggggggagcagggctcactccagccacctgaagtccaaaaagggtcagtctacctcccgccataaaaaactcatgttcaagacagaagggcctgactcagactgacattctccacttcttgttccccactgacagcctcccacccccatctctccctcccctgccattttgggttttgggtctttgaacccttgcttgcaataggtgtgcgtcagaagcacccaggacttccatttgctttgtcccggggctccactgaacaagttggcctgcactggtgttttgttgtggggaggaggatggggagtaggacataccagcttagattttaaggtttttactgtgagggatgtttgggagatgtaagaaatgttcttgcagttaagggttagtttacaatcagccacattctaggtaggggcccacttcaccgtactaaccagggaagctgtccctcactgttgaattttctctaacttcaaggcccatatctgtgaaatgctggcatttgcacctacctcacagagtgcattgtgagggttaatgaaataatgtacatctggccttgaaaccaccttttattacatggggtctagaacttgacccccttgagggtgcttgttccctctccctgttggtcggtgggttggtagtttctacagttgggcagctggttaggtagagggagttgtcaagtctctgctggcccagccaaaccctgtctgacaacctcttggtgaaccttagtacctaaaaggaaatctcaccccatcccacaccctggaggatttcatctcttgtatatgatgatctggatccaccaagacttgttttatgctcagggtcaatttcttttttcttttttttttttttttttctttttctttgagactgggtctcgctttgttgcccaggctggagtggagtggcgtgatcttggcttactgcagcctttgcctccccggctcgagcagtcctgcctcagcctccggagtagctgggaccacaggttcatgccaccatggccagccaacttttgcatgttttgtagagatggggtctcacagtgttgcccaggctggtctcaaactcctgggctcaggcgatccacctgtctcagcctcccagagtgctgggattacaattgtgagccaccacgtccagctggaagggtcaacatcttttacattctgcaagcacatctgcattttcaccccacccttcccctccttctccctttttatatcccatttttatatcgatctcttattttacaataaaactttgctgccacctgtgtgtctgaggggtg

SEQ ID NO: 4199 - DNA, 2404 bp, Homo sapiens
  source 1..2404: mol_type = genomic DNA
tgaggccaggagatggaggctgcagtgagctgtgatcacaccactgtgctccagcctgagtgacagagcaagaccctatctcaaaaaaaaaaaaaaaaaagaaaagctcctgaggtgtagacgccaactctctctagctcgctagtgggttgcaggaggtgcttacgcatgtttgtttctttgctgccgtcttccagttgctttatctgttcacttgtgccctgactttcaactctgtctccttcctcttcctacagtactcccctgccctcaacaagatgttttgccaactggccaagacctgccctgtgcagctgtgggttgattccacacccccgcccggcacccgcgtccgcgccatggccatctacaagcagtcacagcacatgacggaggttgtgaggcgctgcccccaccatgagcgctgctcagatagcgatggtctggcccctcctcagcatcttatccgagtggaaggaaatttgcgtgtggagtatttggatgacagaaacacttttcgacatagtgtggtggtgccctatgagccgcctgaggttggctctgactgtaccaccatccactacaactacatgtgtaacagttcctgcatgggcggcatgaaccggaggcccatcctcaccatcatcacactggaagactccagtggtaatctactgggacggaacagctttgaggtgcgtgtttgtgcctgtcctgggagagaccggcgcacagaggaagagaatctccgcaagaaaggggagcctcaccacgagctgcccccagggagcactaagcgagcactgcccaacaacaccagctcctctccccagccaaagaagaaaccactggatggagaatatttcacccttcaggaccagaccagctttcaaaaagaaaattgttaaagagagcatgaaaatggttctatgactttgcctgatacagatgctacttgacttacgatggtgttacttcctgataaactcgtcgtaagttgaaaatattatccgtgggcgtgagcgcttcgagatgttccgagagctgaatgaggccttggaactcaaggatgcccaggctgggaaggagccaggggggagcagggctcactccagccacctgaagtccaaaaagggtcagtctacctcccgccataaaaaactcatgttcaagacagaagggcctgactcagactgacattctccacttcttgttccccactgacagcctcccacccccatctctccctcccctgccattttgggttttgggtctttgaacccttgcttgcaataggtgtgcgtcagaagcacccaggacttccatttgctttgtcccggggctccactgaacaagttggcctgcactggtgttttgttgtggggaggaggatggggagtaggacataccagcttagattttaaggtttttactgtgagggatgtttgggagatgtaagaaatgttcttgcagttaagggttagtttacaatcagccacattctaggtaggggcccacttcaccgtactaaccagggaagctgtccctcactgttgaattttctctaacttcaaggcccatatctgtgaaatgctggcatttgcacctacctcacagagtgcattgtgagggttaatgaaataatgtacatctggccttgaaaccaccttttattacatggggtctagaacttgacccccttgagggtgcttgttccctctccctgttggtcggtgggttggtagtttctacagttgggcagctggttaggtagagggagttgtcaagtctctgctggcccagccaaaccctgtctgacaacctcttggtgaaccttagtacctaaaaggaaatctcaccccatcccacaccctggaggatttcatctcttgtatatgatgatctggatccaccaagacttgttttatgctcagggtcaatttcttttttcttttttttttttttttttctttttctttgagactgggtctcgctttgttgcccaggctggagtggagtggcgtgatcttggcttactgcagcctttgcctccccggctcgagcagtcctgcctcagcctccggagtagctgggaccacaggttcatgccaccatggccagccaacttttgcatgttttgtagagatggggtctcacagtgttgcccaggctggtctcaaactcctgggctcaggcgatccacctgtctcagcctcccagagtgctgggattacaattgtgagccaccacgtccagctggaagggtcaacatcttttacattctgcaagcacatctgcattttcaccccacccttcccctccttctccctttttatatcccatttttatatcgatctcttattttacaataaaactttgctgccacctgtgtgtctgaggggtg

SEQ ID NO: 4200 - DNA, 2331 bp, Homo sapiens
  source 1..2331: mol_type = genomic DNA
tgaggccaggagatggaggctgcagtgagctgtgatcacaccactgtgctccagcctgagtgacagagcaagaccctatctcaaaaaaaaaaaaaaaaaagaaaagctcctgaggtgtagacgccaactctctctagctcgctagtgggttgcaggaggtgcttacgcatgtttgtttctttgctgccgtcttccagttgctttatctgttcacttgtgccctgactttcaactctgtctccttcctcttcctacagtactcccctgccctcaacaagatgttttgccaactggccaagacctgccctgtgcagctgtgggttgattccacacccccgcccggcacccgcgtccgcgccatggccatctacaagcagtcacagcacatgacggaggttgtgaggcgctgcccccaccatgagcgctgctcagatagcgatggtctggcccctcctcagcatcttatccgagtggaaggaaatttgcgtgtggagtatttggatgacagaaacacttttcgacatagtgtggtggtgccctatgagccgcctgaggttggctctgactgtaccaccatccactacaactacatgtgtaacagttcctgcatgggcggcatgaaccggaggcccatcctcaccatcatcacactggaagactccagtggtaatctactgggacggaacagctttgaggtgcgtgtttgtgcctgtcctgggagagaccggcgcacagaggaagagaatctccgcaagaaaggggagcctcaccacgagctgcccccagggagcactaagcgagcactgcccaacaacaccagctcctctccccagccaaagaagaaaccactggatggagaatatttcacccttcagatgctacttgacttacgatggtgttacttcctgataaactcgtcgtaagttgaaaatattatccgtgggcgtgagcgcttcgagatgttccgagagctgaatgaggccttggaactcaaggatgcccaggctgggaaggagccaggggggagcagggctcactccagccacctgaagtccaaaaagggtcagtctacctcccgccataaaaaactcatgttcaagacagaagggcctgactcagactgacattctccacttcttgttccccactgacagcctcccacccccatctctccctcccctgccattttgggttttgggtctttgaacccttgcttgcaataggtgtgcgtcagaagcacccaggacttccatttgctttgtcccggggctccactgaacaagttggcctgcactggtgttttgttgtggggaggaggatggggagtaggacataccagcttagattttaaggtttttactgtgagggatgtttgggagatgtaagaaatgttcttgcagttaagggttagtttacaatcagccacattctaggtaggggcccacttcaccgtactaaccagggaagctgtccctcactgttgaattttctctaacttcaaggcccatatctgtgaaatgctggcatttgcacctacctcacagagtgcattgtgagggttaatgaaataatgtacatctggccttgaaaccaccttttattacatggggtctagaacttgacccccttgagggtgcttgttccctctccctgttggtcggtgggttggtagtttctacagttgggcagctggttaggtagagggagttgtcaagtctctgctggcccagccaaaccctgtctgacaacctcttggtgaaccttagtacctaaaaggaaatctcaccccatcccacaccctggaggatttcatctcttgtatatgatgatctggatccaccaagacttgttttatgctcagggtcaatttcttttttcttttttttttttttttttctttttctttgagactgggtctcgctttgttgcccaggctggagtggagtggcgtgatcttggcttactgcagcctttgcctccccggctcgagcagtcctgcctcagcctccggagtagctgggaccacaggttcatgccaccatggccagccaacttttgcatgttttgtagagatggggtctcacagtgttgcccaggctggtctcaaactcctgggctcaggcgatccacctgtctcagcctcccagagtgctgggattacaattgtgagccaccacgtccagctggaagggtcaacatcttttacattctgcaagcacatctgcattttcaccccacccttcccctccttctccctttttatatcccatttttatatcgatctcttattttacaataaaactttgctgccacctgtgtgtctgaggggtg

SEQ ID NO: 4201 - DNA, 2724 bp, Homo sapiens
  source 1..2724: mol_type = genomic DNA
gatgggattggggttttcccctcccatgtgctcaagactggcgctaaaagttttgagcttctcaaaagtctagagccaccgtccagggagcaggtagctgctgggctccggggacactttgcgttcgggctgggagcgtgctttccacgacggtgacacgcttccctggattggcagccagactgccttccgggtcactgccatggaggagccgcagtcagatcctagcgtcgagccccctctgagtcaggaaacattttcagacctatggaaactacttcctgaaaacaacgttctgtcccccttgccgtcccaagcaatggatgatttgatgctgtccccggacgatattgaacaatggttcactgaagacccaggtccagatgaagctcccagaatgccagaggctgctccccccgtggcccctgcaccagcagctcctacaccggcggcccctgcaccagccccctcctggcccctgtcatcttctgtcccttcccagaaaacctaccagggcagctacggtttccgtctgggcttcttgcattctgggacagccaagtctgtgacttgcacgtactcccctgccctcaacaagatgttttgccaactggccaagacctgccctgtgcagctgtgggttgattccacacccccgcccggcacccgcgtccgcgccatggccatctacaagcagtcacagcacatgacggaggttgtgaggcgctgcccccaccatgagcgctgctcagatagcgatggtctggcccctcctcagcatcttatccgagtggaaggaaatttgcgtgtggagtatttggatgacagaaacacttttcgacatagtgtggtggtgccctatgagccgcctgaggttggctctgactgtaccaccatccactacaactacatgtgtaacagttcctgcatgggcggcatgaaccggaggcccatcctcaccatcatcacactggaagactccagtggtaatctactgggacggaacagctttgaggtgcgtgtttgtgcctgtcctgggagagaccggcgcacagaggaagagaatctccgcaagaaaggggagcctcaccacgagctgcccccagggagcactaagcgagcactgcccaacaacaccagctcctctccccagccaaagaagaaaccactggatggagaatatttcacccttcaggaccagaccagctttcaaaaagaaaattgttaaagagagcatgaaaatggttctatgactttgcctgatacagatgctacttgacttacgatggtgttacttcctgataaactcgtcgtaagttgaaaatattatccgtgggcgtgagcgcttcgagatgttccgagagctgaatgaggccttggaactcaaggatgcccaggctgggaaggagccaggggggagcagggctcactccagccacctgaagtccaaaaagggtcagtctacctcccgccataaaaaactcatgttcaagacagaagggcctgactcagactgacattctccacttcttgttccccactgacagcctcccacccccatctctccctcccctgccattttgggttttgggtctttgaacccttgcttgcaataggtgtgcgtcagaagcacccaggacttccatttgctttgtcccggggctccactgaacaagttggcctgcactggtgttttgttgtggggaggaggatggggagtaggacataccagcttagattttaaggtttttactgtgagggatgtttgggagatgtaagaaatgttcttgcagttaagggttagtttacaatcagccacattctaggtaggggcccacttcaccgtactaaccagggaagctgtccctcactgttgaattttctctaacttcaaggcccatatctgtgaaatgctggcatttgcacctacctcacagagtgcattgtgagggttaatgaaataatgtacatctggccttgaaaccaccttttattacatggggtctagaacttgacccccttgagggtgcttgttccctctccctgttggtcggtgggttggtagtttctacagttgggcagctggttaggtagagggagttgtcaagtctctgctggcccagccaaaccctgtctgacaacctcttggtgaaccttagtacctaaaaggaaatctcaccccatcccacaccctggaggatttcatctcttgtatatgatgatctggatccaccaagacttgttttatgctcagggtcaatttcttttttcttttttttttttttttttctttttctttgagactgggtctcgctttgttgcccaggctggagtggagtggcgtgatcttggcttactgcagcctttgcctccccggctcgagcagtcctgcctcagcctccggagtagctgggaccacaggttcatgccaccatggccagccaacttttgcatgttttgtagagatggggtctcacagtgttgcccaggctggtctcaaactcctgggctcaggcgatccacctgtctcagcctcccagagtgctgggattacaattgtgagccaccacgtccagctggaagggtcaacatcttttacattctgcaagcacatctgcattttcaccccacccttcccctccttctccctttttatatcccatttttatatcgatctcttattttacaataaaactttgctgccacctgtgtgtctgaggggtg

SEQ ID NO: 4202 - DNA, 2271 bp, Homo sapiens
  source 1..2271: mol_type = genomic DNA
tgaggccaggagatggaggctgcagtgagctgtgatcacaccactgtgctccagcctgagtgacagagcaagaccctatctcaaaaaaaaaaaaaaaaaagaaaagctcctgaggtgtagacgccaactctctctagctcgctagtgggttgcaggaggtgcttacgcatgtttgtttctttgctgccgtcttccagttgctttatctgttcacttgtgccctgactttcaactctgtctccttcctcttcctacagtactcccctgccctcaacaagatgttttgccaactggccaagacctgccctgtgcagctgtgggttgattccacacccccgcccggcacccgcgtccgcgccatggccatctacaagcagtcacagcacatgacggaggttgtgaggcgctgcccccaccatgagcgctgctcagatagcgatggtctggcccctcctcagcatcttatccgagtggaaggaaatttgcgtgtggagtatttggatgacagaaacacttttcgacatagtgtggtggtgccctatgagccgcctgaggttggctctgactgtaccaccatccactacaactacatgtgtaacagttcctgcatgggcggcatgaaccggaggcccatcctcaccatcatcacactggaagactccagtggtaatctactgggacggaacagctttgaggtgcgtgtttgtgcctgtcctgggagagaccggcgcacagaggaagagaatctccgcaagaaaggggagcctcaccacgagctgcccccagggagcactaagcgagcactgcccaacaacaccagctcctctccccagccaaagaagaaaccactggatggagaatatttcacccttcagatccgtgggcgtgagcgcttcgagatgttccgagagctgaatgaggccttggaactcaaggatgcccaggctgggaaggagccaggggggagcagggctcactccagccacctgaagtccaaaaagggtcagtctacctcccgccataaaaaactcatgttcaagacagaagggcctgactcagactgacattctccacttcttgttccccactgacagcctcccacccccatctctccctcccctgccattttgggttttgggtctttgaacccttgcttgcaataggtgtgcgtcagaagcacccaggacttccatttgctttgtcccggggctccactgaacaagttggcctgcactggtgttttgttgtggggaggaggatggggagtaggacataccagcttagattttaaggtttttactgtgagggatgtttgggagatgtaagaaatgttcttgcagttaagggttagtttacaatcagccacattctaggtaggggcccacttcaccgtactaaccagggaagctgtccctcactgttgaattttctctaacttcaaggcccatatctgtgaaatgctggcatttgcacctacctcacagagtgcattgtgagggttaatgaaataatgtacatctggccttgaaaccaccttttattacatggggtctagaacttgacccccttgagggtgcttgttccctctccctgttggtcggtgggttggtagtttctacagttgggcagctggttaggtagagggagttgtcaagtctctgctggcccagccaaaccctgtctgacaacctcttggtgaaccttagtacctaaaaggaaatctcaccccatcccacaccctggaggatttcatctcttgtatatgatgatctggatccaccaagacttgttttatgctcagggtcaatttcttttttcttttttttttttttttttctttttctttgagactgggtctcgctttgttgcccaggctggagtggagtggcgtgatcttggcttactgcagcctttgcctccccggctcgagcagtcctgcctcagcctccggagtagctgggaccacaggttcatgccaccatggccagccaacttttgcatgttttgtagagatggggtctcacagtgttgcccaggctggtctcaaactcctgggctcaggcgatccacctgtctcagcctcccagagtgctgggattacaattgtgagccaccacgtccagctggaagggtcaacatcttttacattctgcaagcacatctgcattttcaccccacccttcccctccttctccctttttatatcccatttttatatcgatctcttattttacaataaaactttgctgccacctgtgtgtctgaggggtg

SEQ ID NO: 4203 - DNA, 5983 bp, Homo sapiens
  source 1..5983: mol_type = genomic DNA
cggccgcggcgcgagccggagtccgccgagccggagcgcgacgaggccccgggcgcgccctccccgctgccgccaccgccgtgccgccgccatccgcccgccgccgccgccgctgtccggcccccgagcacgccggccccgcgcgcgcctcgaggccgagtcaagaaactatgttccaacttcctgtcaacaatcttggcagtttaagaaaagcccggaaaactgtgaaaaaaatacttagtgacattgggttggaatactgtaaagaacatatagaagattttaaacaatttgaacctaatgacttttatttgaaaaacactacatgggaggatgtaggactgtgggacccatcacttacgaaaaaccaggactatcggacaaaacctttctgctgcagcgcttgtccattttcctcaaaattcttctctgcctacaaaagtcatttccgcaatgtccatagtgaagactttgaaaataggattctccttaattgcccctactgtaccttcaatgcagacaaaaagactttggaaacacacattaaaatatttcatgctccgaacgccagcgcaccaagtagcagcctcagcactttcaaagataaaaacaaaaatgatggccttaaacctaagcaggctgacagtgtagagcaagctgtttattactgtaagaagtgcacttaccgagatcctctttatgaaatagttaggaagcacatttacagggaacattttcagcatgtggcagcaccttacatagcaaaggcaggagaaaaatcactcaatggggcagtccccttaggctcgaatgcccgagaagagagtagtattcactgcaagcgatgccttttcatgccaaagtcctatgaagctttggtacagcatgtcatcgaagaccatgaacgtataggctatcaggtcactgccatgattgggcacacaaatgtagtggttccccgatccaaacccttgatgctaattgctcccaaacctcaagacaagaagagcatgggactcccaccaaggatcggttcccttgcttctggaaatgtccggtctttaccatcacagcagatggtgaatcgactctcaataccaaagcctaacttaaattctacaggagtcaacatgatgtccagtgttcatctgcagcagaacaactatggagtcaaatctgtaggccagggttacagtgttggtcagtcaatgagactgggtctaggtggcaacgcaccagtttccattcctcaacaatctcagtctgtaaagcagttacttccaagtggaaacggaaggtcttatgggcttgggtcagagcagaggtcccaggcaccagcaagatactccctgcagtctgctaatgcctcttctctctcatcgggccagttaaagtctccttccctctctcagtcacaggcatccagagtgttaggtcagtccagttccaaacctgctgcagctgccacaggccctcccccaggtaacacttcctcaactcaaaagtggaaaatatgtacaatctgtaatgagctttttcctgaaaatgtctatagtgtgcacttcgaaaaagaacataaagctgagaaagtcccagcagtagccaactacattatgaaaatacacaattttactagcaaatgcctctactgtaatcgctatttacccacagatactctgctcaaccatatgttaattcatggtctgtcttgtccatattgccgttcaactttcaatgatgtggaaaagatggccgcacacatgcggatggttcacattgatgaagagatgggacctaaaacagattctactttgagttttgatttgacattgcagcagggtagtcacactaacatccatctcctggtaactacatacaatctgagggatgccccagctgaatctgttgcttaccatgcccaaaataatcctccagttcctccaaagccacagccaaaggttcaggaaaaggcagatatccctgtaaaaagttcacctcaagctgcagtgccctataaaaaagatgttgggaaaaccctttgtcctctttgcttttcaatcctaaaaggacccatatctgatgcacttgcacatcacttacgagagaggcaccaagttattcagacggttcatccagttgagaaaaagctcacctacaaatgtatccattgccttggtgtgtataccagcaacatgaccgcctcaactatcactctgcatctagttcactgcaggggcgttggaaagacccaaaatggccaggataagacaaatgcaccctctcggcttaatcagtctccaagtctggcacctgtgaagcgcacttacgagcaaatggaatttcccttactgaaaaaacgaaagttagatgatgatagtgattcacccagcttctttgaagagaagcctgaagagcctgttgttttagctttagaccccaagggtcatgaagatgattcctatgaagccaggaaaagctttctaacaaagtatttcaacaaacagccctatcccaccaggagagaaattgagaagctagcagccagtttatggttatggaagagtgacatcgcttcccattttagtaacaaaaggaagaagtgtgtccgtgattgtgaaaagtacaagcctggcgtgttgctggggtttaacatgaaagaattaaataaagtcaagcatgagatggattttgatgctgagtggctatttgaaaatcatgatgagaaggattccagagtcaatgctagtaagactgctgacaaaaagctcaaccttgggaaggaagatgacagttcctcagacagttttgaaaatttggaagaagaatccaatgaaagtggtagcccttttgaccctgtttttgaagttgaacctaaaatctctaacgataacccagaggaacatgtactgaaggtaattcctgaggatgcttcagaatctgaggagaagctagaccaaaaagaggatggttcaaaatacgaaactattcatttgactgaggaaccaaccaaactaatgcacaatgcatctgatagtgaggttgaccaagacgatgttgttgagtggaaagacggtgcttctccatctgagagtgggcctggatcccaacaagtgtcagactttgaggacaatacctgcgaaatgaaaccaggaacctggtctgacgagtcttcccaaagcgaagatgcaaggagcagtaagccagctgccaaaaaaaaggctaccatgcaaggtgacagagagcagttgaaatggaagaatagttcctatggaaaagttgaagggttttggtctaaggaccagtcacagtggaagaatgcatctgagaatgatgagcgcttatctaacccccagattgagtggcagaatagcacaattgacagtgaggatggggaacagtttgacaacatgactgatggagtagctgagcccatgcatggcagcttagccggagttaaactgagcagccaacaggcctaagtgccaggttccctggcgttggtgacatgctgcagcctggaactctgatctccagtgtgactgcaaagctgtcttctcactggtactgccttgtgagtactggttggactgtggggcatgtggccgctgcagttccagtggttatttctaagtctatgacaggacaggctgttcttgcttcagaaccttctctgacagacacggtaactaaatgtgaaaaaccaataagctggtgactcatgaatacacacgaggaaaagcagaggtttattttatctgccttttcaacatttctttccctctgtgaaatgattggtcagatgtctttgagaagtgttaaactaattcacatggtagtgtagggccaacatacaagctaccagtctaatgtgtatagtagactttgggaaaagcgattttttttcatgtattcattctgaatagttgaaatgtatatttgtacagtcttttagacctattcaagtgatgctcatgatcctgttactgtgtgcccatcatagatttctttttttagtgttgcccttgctgtgtaataaacgctctatctagtttacctagcaaaagctcaaaactgcgctagtatggactttttggacagacttagtttttgcacataaccttgtacaatcttgcaacagaggccagccacgtaagatatatatctggactctcttgtattataggatttttcttgttctgaatatccttgacattacagctgtcaaaaacaaaaactggtatttcagatctgttttctgaaatcttttaagctaaaatcacatgcaagaattgactttgcagctactaattttgacaccttttagatctgtataaaagtgtgttgtgttgaagcagcaaaccaatgagtgctgcattttggatatttagttttatctttagttcaacaccatcatggtggattcatttataccatctaatatatgacacactgttgtagtatgtataattttgtgatctttattttccctttgtattcattttaagcatctaaataaattgctgtattgtgcttaatgtaaatatttgctttattacacatgacagtcctgtgtgtccattatatcttttgccatttaatgccataactctttcatcagagatggcagccacagtcacagaggaaacttgtggaaaacccaagatctgtcatctgcaaatagaatgctttctcttgaggcacctggtacaaaatctgtttttcttttttttttttttttttttttttttttttaactgaaaaacaaacacccttgagtttttcagttcaccttttgttaaggagcagagcctgcatatatatgtaaatgtctcaatgataaaaaaaaaaatgtaaacatggattggcattaatttgcaagcagaatcttaatagcctgatgggttttttgtttgttttttcttctagatgaagttaaacgttcgttttcaccttacgatgggaacaactgtagtgcaggcggctctgcctctatttgccactcttggccctcttgctattaagggaaaggctttgaagagcacagcactgacagggctgtaaagatggaaggagctggtatttttaccatgcgtagattcccaagagaacttgtactaaaaagcagaaagttacaaggaagcagaattaggccaacatttccagcaattaaaacaatgatgggaaactccaatccatgaggaggctggtcagtcacctcaaggatagtggcctaaagaagtctgaagtggctgatgtccataacttctgagtctgtttccaaaagaaagactcttgttaatgctgttaccagagagtagagatttgaccagcctctccctaaaatgtaagcttctcaacaacagtacaggaagaagtgcaagagtagactagaacctttaaggaatttggggctggaacggagctatgttgcatctgttgttatacaggtagattataagttctacatgcaccagccaaaacttaggacaggatgtccccaaattaagatactacagattaccaaatcagaaataaccagctggatttaggccagctcacatttatttggaaattaccctccctgattaacaggcttctgagttgtacgtggaggactaatgagacttgtacaagacaccacggggcttggggtccaggtcccagttggatatcggaacagacacagataagtgtgtttcctcattaaggtggtgagagtgtgccttttggcattcagaaaagggtttagccaccctaagagttggaaataaagattcccaactggaaatgttgcagaatccctacaagtgtctcaataaaagccattttaaaagaatattgttgctactgtttgcttttcaaataatctggagatcgttggctatggcaacgtgctgccacctaattagagaatgcctgtaaatgtaggctgaacacttctaacatgagaaaacctaagtatcctaaaaaaaaaaaaaaaaaa

SEQ ID NO: 4204 - DNA, 6158 bp, Homo sapiens
  source 1..6158: mol_type = genomic DNA
cggccgcggcgcgagccggagtccgccgagccggagcgcgacgaggccccgggcgcgccctccccgctgccgccaccgccgtgccgccgccatccgcccgccgccgccgccgctgtccggcccccgagcacgccggccccgcgcgcgcctcgaggccgagtcaaggtgtgagatgcacaatgcgaaacctaggccccagcttttacaccatgatgcgcagggttgtactttttgtactgaactgataggtggcctagtggttatgccctgtactaccattttgaggatctggactccgtttcctgccttgctctttggaccacattgtcaattcacaccgaaactatgttccaacttcctgtcaacaatcttggcagtttaagaaaagcccggaaaactgtgaaaaaaatacttagtgacattgggttggaatactgtaaagaacatatagaagattttaaacaatttgaacctaatgacttttatttgaaaaacactacatgggaggatgtaggactgtgggacccatcacttacgaaaaaccaggactatcggacaaaacctttctgctgcagcgcttgtccattttcctcaaaattcttctctgcctacaaaagtcatttccgcaatgtccatagtgaagactttgaaaataggattctccttaattgcccctactgtaccttcaatgcagacaaaaagactttggaaacacacattaaaatatttcatgctccgaacgccagcgcaccaagtagcagcctcagcactttcaaagataaaaacaaaaatgatggccttaaacctaagcaggctgacagtgtagagcaagctgtttattactgtaagaagtgcacttaccgagatcctctttatgaaatagttaggaagcacatttacagggaacattttcagcatgtggcagcaccttacatagcaaaggcaggagaaaaatcactcaatggggcagtccccttaggctcgaatgcccgagaagagagtagtattcactgcaagcgatgccttttcatgccaaagtcctatgaagctttggtacagcatgtcatcgaagaccatgaacgtataggctatcaggtcactgccatgattgggcacacaaatgtagtggttccccgatccaaacccttgatgctaattgctcccaaacctcaagacaagaagagcatgggactcccaccaaggatcggttcccttgcttctggaaatgtccggtctttaccatcacagcagatggtgaatcgactctcaataccaaagcctaacttaaattctacaggagtcaacatgatgtccagtgttcatctgcagcagaacaactatggagtcaaatctgtaggccagggttacagtgttggtcagtcaatgagactgggtctaggtggcaacgcaccagtttccattcctcaacaatctcagtctgtaaagcagttacttccaagtggaaacggaaggtcttatgggcttgggtcagagcagaggtcccaggcaccagcaagatactccctgcagtctgctaatgcctcttctctctcatcgggccagttaaagtctccttccctctctcagtcacaggcatccagagtgttaggtcagtccagttccaaacctgctgcagctgccacaggccctcccccaggtaacacttcctcaactcaaaagtggaaaatatgtacaatctgtaatgagctttttcctgaaaatgtctatagtgtgcacttcgaaaaagaacataaagctgagaaagtcccagcagtagccaactacattatgaaaatacacaattttactagcaaatgcctctactgtaatcgctatttacccacagatactctgctcaaccatatgttaattcatggtctgtcttgtccatattgccgttcaactttcaatgatgtggaaaagatggccgcacacatgcggatggttcacattgatgaagagatgggacctaaaacagattctactttgagttttgatttgacattgcagcagggtagtcacactaacatccatctcctggtaactacatacaatctgagggatgccccagctgaatctgttgcttaccatgcccaaaataatcctccagttcctccaaagccacagccaaaggttcaggaaaaggcagatatccctgtaaaaagttcacctcaagctgcagtgccctataaaaaagatgttgggaaaaccctttgtcctctttgcttttcaatcctaaaaggacccatatctgatgcacttgcacatcacttacgagagaggcaccaagttattcagacggttcatccagttgagaaaaagctcacctacaaatgtatccattgccttggtgtgtataccagcaacatgaccgcctcaactatcactctgcatctagttcactgcaggggcgttggaaagacccaaaatggccaggataagacaaatgcaccctctcggcttaatcagtctccaagtctggcacctgtgaagcgcacttacgagcaaatggaatttcccttactgaaaaaacgaaagttagatgatgatagtgattcacccagcttctttgaagagaagcctgaagagcctgttgttttagctttagaccccaagggtcatgaagatgattcctatgaagccaggaaaagctttctaacaaagtatttcaacaaacagccctatcccaccaggagagaaattgagaagctagcagccagtttatggttatggaagagtgacatcgcttcccattttagtaacaaaaggaagaagtgtgtccgtgattgtgaaaagtacaagcctggcgtgttgctggggtttaacatgaaagaattaaataaagtcaagcatgagatggattttgatgctgagtggctatttgaaaatcatgatgagaaggattccagagtcaatgctagtaagactgctgacaaaaagctcaaccttgggaaggaagatgacagttcctcagacagttttgaaaatttggaagaagaatccaatgaaagtggtagcccttttgaccctgtttttgaagttgaacctaaaatctctaacgataacccagaggaacatgtactgaaggtaattcctgaggatgcttcagaatctgaggagaagctagaccaaaaagaggatggttcaaaatacgaaactattcatttgactgaggaaccaaccaaactaatgcacaatgcatctgatagtgaggttgaccaagacgatgttgttgagtggaaagacggtgcttctccatctgagagtgggcctggatcccaacaagtgtcagactttgaggacaatacctgcgaaatgaaaccaggaacctggtctgacgagtcttcccaaagcgaagatgcaaggagcagtaagccagctgccaaaaaaaaggctaccatgcaaggtgacagagagcagttgaaatggaagaatagttcctatggaaaagttgaagggttttggtctaaggaccagtcacagtggaagaatgcatctgagaatgatgagcgcttatctaacccccagattgagtggcagaatagcacaattgacagtgaggatggggaacagtttgacaacatgactgatggagtagctgagcccatgcatggcagcttagccggagttaaactgagcagccaacaggcctaagtgccaggttccctggcgttggtgacatgctgcagcctggaactctgatctccagtgtgactgcaaagctgtcttctcactggtactgccttgtgagtactggttggactgtggggcatgtggccgctgcagttccagtggttatttctaagtctatgacaggacaggctgttcttgcttcagaaccttctctgacagacacggtaactaaatgtgaaaaaccaataagctggtgactcatgaatacacacgaggaaaagcagaggtttattttatctgccttttcaacatttctttccctctgtgaaatgattggtcagatgtctttgagaagtgttaaactaattcacatggtagtgtagggccaacatacaagctaccagtctaatgtgtatagtagactttgggaaaagcgattttttttcatgtattcattctgaatagttgaaatgtatatttgtacagtcttttagacctattcaagtgatgctcatgatcctgttactgtgtgcccatcatagatttctttttttagtgttgcccttgctgtgtaataaacgctctatctagtttacctagcaaaagctcaaaactgcgctagtatggactttttggacagacttagtttttgcacataaccttgtacaatcttgcaacagaggccagccacgtaagatatatatctggactctcttgtattataggatttttcttgttctgaatatccttgacattacagctgtcaaaaacaaaaactggtatttcagatctgttttctgaaatcttttaagctaaaatcacatgcaagaattgactttgcagctactaattttgacaccttttagatctgtataaaagtgtgttgtgttgaagcagcaaaccaatgagtgctgcattttggatatttagttttatctttagttcaacaccatcatggtggattcatttataccatctaatatatgacacactgttgtagtatgtataattttgtgatctttattttccctttgtattcattttaagcatctaaataaattgctgtattgtgcttaatgtaaatatttgctttattacacatgacagtcctgtgtgtccattatatcttttgccatttaatgccataactctttcatcagagatggcagccacagtcacagaggaaacttgtggaaaacccaagatctgtcatctgcaaatagaatgctttctcttgaggcacctggtacaaaatctgtttttcttttttttttttttttttttttttttttttaactgaaaaacaaacacccttgagtttttcagttcaccttttgttaaggagcagagcctgcatatatatgtaaatgtctcaatgataaaaaaaaaaatgtaaacatggattggcattaatttgcaagcagaatcttaatagcctgatgggttttttgtttgttttttcttctagatgaagttaaacgttcgttttcaccttacgatgggaacaactgtagtgcaggcggctctgcctctatttgccactcttggccctcttgctattaagggaaaggctttgaagagcacagcactgacagggctgtaaagatggaaggagctggtatttttaccatgcgtagattcccaagagaacttgtactaaaaagcagaaagttacaaggaagcagaattaggccaacatttccagcaattaaaacaatgatgggaaactccaatccatgaggaggctggtcagtcacctcaaggatagtggcctaaagaagtctgaagtggctgatgtccataacttctgagtctgtttccaaaagaaagactcttgttaatgctgttaccagagagtagagatttgaccagcctctccctaaaatgtaagcttctcaacaacagtacaggaagaagtgcaagagtagactagaacctttaaggaatttggggctggaacggagctatgttgcatctgttgttatacaggtagattataagttctacatgcaccagccaaaacttaggacaggatgtccccaaattaagatactacagattaccaaatcagaaataaccagctggatttaggccagctcacatttatttggaaattaccctccctgattaacaggcttctgagttgtacgtggaggactaatgagacttgtacaagacaccacggggcttggggtccaggtcccagttggatatcggaacagacacagataagtgtgtttcctcattaaggtggtgagagtgtgccttttggcattcagaaaagggtttagccaccctaagagttggaaataaagattcccaactggaaatgttgcagaatccctacaagtgtctcaataaaagccattttaaaagaatattgttgctactgtttgcttttcaaataatctggagatcgttggctatggcaacgtgctgccacctaattagagaatgcctgtaaatgtaggctgaacacttctaacatgagaaaacctaagtatcctaaaaaaaaaaaaaaaaaa

SEQ ID NO: 4205 - DNA, 4544 bp, Homo sapiens
  source 1..4544: mol_type = genomic DNA
agcacaggcacgtcccgggggctccagcttctgctcagagcgcggagagccgggccgggcgggcgcgcgcgcaggactcgggccgctcgaggggtccggccggacggtgtcgggagccggacccgtcggcagaggagcgggcgccgcgatggctgagggcagtgccgtgtctgaccctcagcacgccgcgcgtctgctgcgagcgctcagctctttccgcgaggagtctcgcttctgcgacgcgcacctggtcctcgacggggaggagatcccggtgcagaagaacatcctggcggcggccagcccgtacatcaggacaaagttaaactataatcctccaaaagatgatggatcaacttataagattgaacttgaagggatatcggtaatggttatgagagagatcctggattacatcttcagtgggcagatcaggctaaatgaagatacaatccaagatgttgttcaggcagctgacctgctgctactgacggaccttaaaaccctgtgctgtgagtttttggaaggctgcattgctgctgagaactgtattggtatccgtgactttgcactacattactgcctccatcacgttcattaccttgccacagaatacctggagactcatttccgagacgtcagcagcacggaagaattcttagagctgagtcctcaaaagcttaaagaagtgatttctcttgagaagttaaacgttggcaatgaaagatatgtctttgaagcagtaattcgatggatagcacatgatacagaaataagaaaggtccacatgaaggatgttatgtcagctctgtgggtttcagggttggactccagttatttacgggaacagatgctgaatgaaccattagtacgagaaattgtcaaagagtgtagcaatataccgctcagccagccgcagcaaggggaggcgatgctggccaacttcaaaccccggggctactctgagtgcatcgtgactgttggtggagaagagagagtttcacggaaacccacagcagcgatgcgatgcatgtgccctctctatgaccctaacaggcagctttggatcgaactggcccctttaagcatgccgagaattaaccatggagttctctcagcagaaggatttttgtttgtattcgggggccaagatgaaaataagcagactcttagctcaggagaaaagtatgatccagatgcaaatacatggacagcattgccacctatgaacgaggcaagacataacttcggaattgtggagatagatgggatgctgtacattttgggaggagaggatggtgaaaaggagctgatttccatggagtgttacgatatttattctaaaacctggacaaagcaacctgatttgaccatggtcagaaagatcggctgctatgcagctatgaaaaagaaaatctacgccatgggtggaggctcctacggaaagctttttgagtctgtagagtgttatgatcccaggacccagcagtggactgccatatgtccactaaaagagaggaggtttggagcggtggcctgtggagttgctatggagctgtatgtgtttgggggagtccgaagtcgtgaggacgcccagggtagcgagatggtaacttgcaagtccgagttctaccatgatgagtttaaaaggtggatctatcttaacgaccagaatttatgcatccccgccagttcctcttttgtttatggagctgtacctataggagccagtatttatgttattggagatcttgatacaggtaccaattacgactacgtgcgtgagtttaaaagaagcacaggaacctggcaccacactaaaccactccttccatccgaccttcgccgtacaggatgtgcagccttacgcattgcgaattgcaagcttttccgcctgcagcttcagcaaggcttattccgtattcgtgttcattccccttgaggaggaagcagagcagagtgcgagatcctgacccaagagcaccataacatagctccgaaagggagagcagagatggcagctgaaactcactctgtgctgggctttggtatggtaactctttggtggttttatgatgcttacaaacttgagctttagctcttgtttgggagaacacgtaactgttgaaaaactacctgggaggagtgagttcctccagttaaatgtggctgtagatgttggaggctagggaggctagtaaatatcaaaaggaaaagggagtgggaattgctatcatgtaaaatatcaaagttaaaatactaaggtgcattttccctgaagggaactcatgtctgactgctgtattcaaatacgtagctttggtaacaaacaaaatccgtatatgcaaatcaacatatccaaacatgccaagactgcttttccactgcacttggaaggatatattatgcctaaccctgcccaacaaattaaggtttgtgcctaaaatgttagattggactgtatgccagttagtctccatttattcctagtactctgtcctaagaatctttttaaaactatatcatgatgaattgaaatgaagataaaattgctcttttgtaactttatcttagtaatgtaaagattcagtaaattgatgagtcaggttgcagccctcatgtgaactgaaagaagttgctcgcttctgtgttgacttagatcaagacacgtcacgcatcctttctggggtagtacctgtggagccgggaagggtctcctgcagtgccattctgccttctcaatgagcaaaaccattttctaagtatgaggatattagtgagtaggagattttataaaagaaagacctgagtcagacaaataataaaggtctgctgtggctaaaaaagcaaaaacaaaaaagctatccagacaaaatacatagggatcagaaactttttcatataacctgtctgaaagcacacaaagtcttgtttactactgtttagggtttgaaaacttgtcttagaatgcgaatctgtgttaagaatctagtctttgtaatagaagtttcccagtggcattcactagtgagagttttagacaaattatgttacgagtaaagtttggctggtagaataaactacctcaacttaatttcattctgttcatagtagagcaaattaatcttttcctccttccctcctttcctatctctcattctcacctcaacccactttaccccacttctcattgggggaaaaatgtctttcgttcgtggaacgtatcttgtaagatattttgttttccacttgaattacaccaccctagtgtgaaatcggggacttcaaagtgcttgattccttcctaaattgaattttatgcaatgtcaaatttctaatcaatttaatatacagtacttcatttttaattgttttctaaaaaaaaggttttttttttccttttggaatatggctgtaagaagcagcattttgtcttattaacacatgtataaaggtatcctttggttttaagtcgagaacaggaatttcttctagaaacttcctgtatggaacgtttatatgcaattaacatgcatatgaaaaacatcacttacgttctcccacccatagacataaaaaagggtgacctgtgattttttttcttatacctgctggaagtcagtacaatgcgtcaaaagttgctgaaagatgctgtgcctatggggttctagagagtgttgagtgtggtacattaactctccattttagccagaagatacctgataagagaaggtgtaaggtttttatcttatatgccagaggcaccaggccagatgtgccgcacagtcatgtaattcaatcatgtttaatatgtcagtcaaaaccaaattcagaattgttttgtgtaccagtcagctgttgtctgcacattttcgtagtgacagtgtggagatctttttaatgaaagcaaactatgtggcctctgcaaagaaaggaagatttttctttttacaactagatattagttttagaggaaggaaatagctgaaaaactaaatttgctttggtgaaatgtcctgtacagaacagtaccttggcattcagcagctgtaattggggaacattaaaacagtaactgacatccagttaaagccacgatcgtcagcaattctccttttttaatttctgatatttaaagttttttttccagtctacaccaggcctctccaaggagacagttcattatttaggagtgaatgtgttcctcttgcaatattatcagtacctgcatgacttggtaaattcattttataaaaatagtgttttttttttttaatttcagttcattgactctataactgcagaaattagataatgttttataaaataaatttgccacataatatgggatgcaataaccaacaaagctgctaagtgccaaactgttattttactatatataaatattaaaatattgtgttgaagtatagggatgtatttaattttactatgctccaacattaatcatgactcttttgtaaattacagttatttcagtattgtaaaataaatgttgactcatttcatgcaggtttgtgttttaa

SEQ ID NO: 4206 - DNA, 830 bp, Homo sapiens
  source 1..830: mol_type = genomic DNA
ccggtgacgcgactccgggcggctcccgggtgcgccgcatatatagcagcggcggcggtggcggcggccacaccgggcggcggacacgtggagggacccggcccgcgccttctgcccctgctgccggccgcgccatgcggtgagcgccccaggccgccagagcccacccgacccggcccgacgcccggacctgccgcccagacccgccaccgcacccggaccccgacgctccgaacccgggcgcagccgcagctcaagatggcccgaggcagcgccctcctgctcgcctccctcctcctcgccgcggccctttctgcctctgcggggctctggtcgccggccaaggaaaaacgaggctggaccctgaacagcgcgggctacctgctgggcccacatgccgttggcaaccacaggtcattcagcgacaagaatggcctcaccagcaagcgggagctgcggcccgaagatgacatgaaaccaggaagctttgacaggtccatacctgaaaacaatatcatgcgcacaatcattgagtttctgtctttcttgcatctcaaagaggccggtgccctcgaccgcctcctggatctccccgccgcagcctcctcagaagacatcgagcggtcctgagagcctcctgggcatgtttgtctgtgtgctgtaacctgaagtcaaaccttaagataatggataatcttcggccaatttatgcagagtcagccattcctgttctctttgccttgatgttgtgttgttatcatttaagattttttttttttggtaattattttgagtggcaaaataaagaatagcaattaaaaaaaaaaaaa

SEQ ID NO: 4207 - DNA, 1545 bp, Homo sapiens
  source 1..1545: mol_type = genomic DNA
ccacaaatgtgggagggcgataaccactcgtagaaagcgtgagaagttactacaagcggtcctcccggccaccgtactgttccgctcccagaagccccgggcggcggaagtcgtcactcttaagaagggacggggccccacgctgcgcacccgcgggtttgctatggcgatgagcagcggcggcagtggtggcggcgtcccggagcaggaggattccgtgctgttccggcgcggcacaggccagagcgatgattctgacatttgggatgatacagcactgataaaagcatatgataaagctgtggcttcatttaagcatgctctaaagaatggtgacatttgtgaaacttcgggtaaaccaaaaaccacacctaaaagaaaacctgctaagaagaataaaagccaaaagaagaatactgcagcttccttacaacagtggaaagttggggacaaatgttctgccatttggtcagaagacggttgcatttacccagctaccattgcttcaattgattttaagagagaaacctgtgttgtggtttacactggatatggaaatagagaggagcaaaatctgtccgatctactttccccaatctgtgaagtagctaataatatagaacaaaatgctcaagagaatgaaaatgaaagccaagtttcaacagatgaaagtgagaactccaggtctcctggaaataaatcagataacatcaagcccaaatctgctccatggaactcttttctccctccaccaccccccatgccagggccaagactgggaccaggaaagataattcccccaccacctcccatatgtccagattctcttgatgatgctgatgctttgggaagtatgttaatttcatggtacatgagtggctatcatactggctattatatgggtttcagacaaaatcaaaaagaaggaaggtgctcacattccttaaattaaggagaaatgctggcatagagcagcactaaatgacaccactaaagaaacgatcagacagatctggaatgtgaagcgttatagaagataactggcctcatttcttcaaaatatcaagtgttgggaaagaaaaaaggaagtggaatgggtaactcttcttgattaaaagttatgtaataaccaaatgcaatgtgaaatattttactggactctattttgaaaaaccatctgtaaaagactggggtgggggtgggaggccagcacggtggtgaggcagttgagaaaatttgaatgtggattagattttgaatgatattggataattattggtaattttatgagctgtgagaagggtgttgtagtttataaaagactgtcttaatttgcatacttaagcatttaggaatgaagtgttagagtgtcttaaaatgtttcaaatggtttaacaaaatgtatgtgaggcgtatgtggcaaaatgttacagaatctaactggtggacatggctgttcattgtactgtttttttctatcttctatatgtttaaaagtatataataaaaatatttaatttttttttaaaaaaaaaaaaaaaaaaa

SEQ ID NO: 4208 - DNA, 1634 bp, Homo sapiens
  source 1..1634: mol_type = genomic DNA
ccacaaatgtgggagggcgataaccactcgtagaaagcgtgagaagttactacaagcggtcctcccggccaccgtactgttccgctcccagaagccccgggcggcggaagtcgtcactcttaagaagggacggggccccacgctgcgcacccgcgggtttgctatggcgatgagcagcggcggcagtggtggcggcgtcccggagcaggaggattccgtgctgttccggcgcggcacaggccagagcgatgattctgacatttgggatgatacagcactgataaaagcatatgataaagctgtggcttcatttaagcatgctctaaagaatggtgacatttgtgaaacttcgggtaaaccaaaaaccacacctaaaagaaaacctgctaagaagaataaaagccaaaagaagaatactgcagcttccttacaacagtggaaagttggggacaaatgttctgccatttggtcagaagacggttgcatttacccagctaccattgcttcaattgattttaagagagaaacctgtgttgtggtttacactggatatggaaatagagaggagcaaaatctgtccgatctactttccccaatctgtgaagtagctaataatatagaacaaaatgctcaagagaatgaaaatgaaagccaagtttcaacagatgaaagtgagaactccaggtctcctggaaataaatcagataacatcaagcccaaatctgctccatggaactcttttctccctccaccaccccccatgccagggccaagactgggaccaggaaagccaggtctaaaattcaatggcccaccaccgccaccgccaccaccaccaccccacttactatcatgctggctgcctccatttccttctggaccaccaataattcccccaccacctcccatatgtccagattctcttgatgatgctgatgctttgggaagtatgttaatttcatggtacatgagtggctatcatactggctattatatgggttttagacaaaatcaaaaagaaggaaggtgctcacattccttaaattaaggagaaatgctggcatagagcagcactaaatgacaccactaaagaaacgatcagacagatctggaatgtgaagcgttatagaagataactggcctcatttcttcaaaatatcaagtgttgggaaagaaaaaaggaagtggaatgggtaactcttcttgattaaaagttatgtaataaccaaatgcaatgtgaaatattttactggactctattttgaaaaaccatctgtaaaagactgaggtgggggtgggaggccagcacggtggtgaggcagttgagaaaatttgaatgtggattagattttgaatgatattggataattattggtaattttatgagctgtgagaagggtgttgtagtttataaaagactgtcttaatttgcatacttaagcatttaggaatgaagtgttagagtgtcttaaaatgtttcaaatggtttaacaaaatgtatgtgaggcgtatgtggcaaaatgttacagaatctaactggtggacatggctgttcattgtactgtttttttctatcttctatatgtttaaaagtatataataaaaatatttaatttttttttaaattaaaaaaa

SEQ ID NO: 4209 - DNA, 1641 bp, Homo sapiens
  source 1..1641: mol_type = genomic DNA
ccacaaatgtgggagggcgataaccactcgtagaaagcgtgagaagttactacaagcggtcctcccggccaccgtactgttccgctcccagaagccccgggcggcggaagtcgtcactcttaagaagggacggggccccacgctgcgcacccgcgggtttgctatggcgatgagcagcggcggcagtggtggcggcgtcccggagcaggaggattccgtgctgttccggcgcggcacaggccagagcgatgattctgacatttgggatgatacagcactgataaaagcatatgataaagctgtggcttcatttaagcatgctctaaagaatggtgacatttgtgaaacttcgggtaaaccaaaaaccacacctaaaagaaaacctgctaagaagaataaaagccaaaagaagaatactgcagcttccttacaacagtggaaagttggggacaaatgttctgccatttggtcagaagacggttgcatttacccagctaccattgcttcaattgattttaagagagaaacctgtgttgtggtttacactggatatggaaatagagaggagcaaaatctgtccgatctactttccccaatctgtgaagtagctaataatatagaacaaaatgctcaagagaatgaaaatgaaagccaagtttcaacagatgaaagtgagaactccaggtctcctggaaataaatcagataacatcaagcccaaatctgctccatggaactcttttctccctccaccaccccccatgccagggccaagactgggaccaggaaagccaggtctaaaattcaatggcccaccaccgccaccgccaccaccaccaccccacttactatcatgctggctgcctccatttccttctggaccaccaataattcccccaccacctcccatatgtccagattctcttgatgatgctgatgctttgggaagtatgttaatttcatggtacatgagtggctatcatactggctattatatgggtttcagacaaaatcaaaaagaaggaaggtgctcacattccttaaattaaggagaaatgctggcatagagcagcactaaatgacaccactaaagaaacgatcagacagatctggaatgtgaagcgttatagaagataactggcctcatttcttcaaaatatcaagtgttgggaaagaaaaaaggaagtggaatgggtaactcttcttgattaaaagttatgtaataaccaaatgcaatgtgaaatattttactggactctattttgaaaaaccatctgtaaaagactggggtgggggtgggaggccagcacggtggtgaggcagttgagaaaatttgaatgtggattagattttgaatgatattggataattattggtaattttatgagctgtgagaagggtgttgtagtttataaaagactgtcttaatttgcatacttaagcatttaggaatgaagtgttagagtgtcttaaaatgtttcaaatggtttaacaaaatgtatgtgaggcgtatgtggcaaaatgttacagaatctaactggtggacatggctgttcattgtactgtttttttctatcttctatatgtttaaaagtatataataaaaatatttaatttttttttaaaaaaaaaaaaaaaaaaa

SEQ ID NO: 4210 - DNA, 1538 bp, Homo sapiens
  source 1..1538: mol_type = genomic DNA
ccacaaatgtgggagggcgataaccactcgtagaaagcgtgagaagttactacaagcggtcctcccggccaccgtactgttccgctcccagaagccccgggcggcggaagtcgtcactcttaagaagggacggggccccacgctgcgcacccgcgggtttgctatggcgatgagcagcggcggcagtggtggcggcgtcccggagcaggaggattccgtgctgttccggcgcggcacaggccagagcgatgattctgacatttgggatgatacagcactgataaaagcatatgataaagctgtggcttcatttaagcatgctctaaagaatggtgacatttgtgaaacttcgggtaaaccaaaaaccacacctaaaagaaaacctgctaagaagaataaaagccaaaagaagaatactgcagcttccttacaacagtggaaagttggggacaaatgttctgccatttggtcagaagacggttgcatttacccagctaccattgcttcaattgattttaagagagaaacctgtgttgtggtttacactggatatggaaatagagaggagcaaaatctgtccgatctactttccccaatctgtgaagtagctaataatatagaacaaaatgctcaagagaatgaaaatgaaagccaagtttcaacagatgaaagtgagaactccaggtctcctggaaataaatcagataacatcaagcccaaatctgctccatggaactcttttctccctccaccaccccccatgccagggccaagactgggaccaggaaagataattcccccaccacctcccatatgtccagattctcttgatgatgctgatgctttgggaagtatgttaatttcatggtacatgagtggctatcatactggctattatatgggttttagacaaaatcaaaaagaaggaaggtgctcacattccttaaattaaggagaaatgctggcatagagcagcactaaatgacaccactaaagaaacgatcagacagatctggaatgtgaagcgttatagaagataactggcctcatttcttcaaaatatcaagtgttgggaaagaaaaaaggaagtggaatgggtaactcttcttgattaaaagttatgtaataaccaaatgcaatgtgaaatattttactggactctattttgaaaaaccatctgtaaaagactgaggtgggggtgggaggccagcacggtggtgaggcagttgagaaaatttgaatgtggattagattttgaatgatattggataattattggtaattttatgagctgtgagaagggtgttgtagtttataaaagactgtcttaatttgcatacttaagcatttaggaatgaagtgttagagtgtcttaaaatgtttcaaatggtttaacaaaatgtatgtgaggcgtatgtggcaaaatgttacagaatctaactggtggacatggctgttcattgtactgtttttttctatcttctatatgtttaaaagtatataataaaaatatttaatttttttttaaattaaaaaaa

SEQ ID NO: 4211 - DNA, 1580 bp, Homo sapiens
  source 1..1580: mol_type = genomic DNA
ccacaaatgtgggagggcgataaccactcgtagaaagcgtgagaagttactacaagcggtcctcccggccaccgtactgttccgctcccagaagccccgggcggcggaagtcgtcactcttaagaagggacggggccccacgctgcgcacccgcgggtttgctatggcgatgagcagcggcggcagtggtggcggcgtcccggagcaggaggattccgtgctgttccggcgcggcacaggccagagcgatgattctgacatttgggatgatacagcactgataaaagcatatgataaagctgtggcttcatttaagcatgctctaaagaatggtgacatttgtgaaacttcgggtaaaccaaaaaccacacctaaaagaaaacctgctaagaagaataaaagccaaaagaagaatactgcagcttccttacaacagtggaaagttggggacaaatgttctgccatttggtcagaagacggttgcatttacccagctaccattgcttcaattgattttaagagagaaacctgtgttgtggtttacactggatatggaaatagagaggagcaaaatctgtccgatctactttccccaatctgtgaagtagctaataatatagaacaaaatgctcaagagaatgaaaatgaaagccaagtttcaacagatgaaagtgagaactccaggtctcctggaaataaatcagataacatcaagcccaaatctgctccatggaactcttttctccctccaccaccccccatgccagggccaagactgggaccaggaaagccaggtctaaaattcaatggcccaccaccgccaccgccaccaccaccaccccacttactatcatgctggctgcctccatttccttctggaccaccaataattcccccaccacctcccatatgtccagattctcttgatgatgctgatgctttgggaagtatgttaatttcatggtacatgagtggctatcatactggctattatatggaaatgctggcatagagcagcactaaatgacaccactaaagaaacgatcagacagatctggaatgtgaagcgttatagaagataactggcctcatttcttcaaaatatcaagtgttgggaaagaaaaaaggaagtggaatgggtaactcttcttgattaaaagttatgtaataaccaaatgcaatgtgaaatattttactggactctattttgaaaaaccatctgtaaaagactgaggtgggggtgggaggccagcacggtggtgaggcagttgagaaaatttgaatgtggattagattttgaatgatattggataattattggtaattttatgagctgtgagaagggtgttgtagtttataaaagactgtcttaatttgcatacttaagcatttaggaatgaagtgttagagtgtcttaaaatgtttcaaatggtttaacaaaatgtatgtgaggcgtatgtggcaaaatgttacagaatctaactggtggacatggctgttcattgtactgtttttttctatcttctatatgtttaaaagtatataataaaaatatttaatttttttttaaattaaaaaaa

SEQ ID NO: 4212 - DNA, 1484 bp, Homo sapiens
  source 1..1484: mol_type = genomic DNA
ccacaaatgtgggagggcgataaccactcgtagaaagcgtgagaagttactacaagcggtcctcccggccaccgtactgttccgctcccagaagccccgggcggcggaagtcgtcactcttaagaagggacggggccccacgctgcgcacccgcgggtttgctatggcgatgagcagcggcggcagtggtggcggcgtcccggagcaggaggattccgtgctgttccggcgcggcacaggccagagcgatgattctgacatttgggatgatacagcactgataaaagcatatgataaagctgtggcttcatttaagcatgctctaaagaatggtgacatttgtgaaacttcgggtaaaccaaaaaccacacctaaaagaaaacctgctaagaagaataaaagccaaaagaagaatactgcagcttccttacaacagtggaaagttggggacaaatgttctgccatttggtcagaagacggttgcatttacccagctaccattgcttcaattgattttaagagagaaacctgtgttgtggtttacactggatatggaaatagagaggagcaaaatctgtccgatctactttccccaatctgtgaagtagctaataatatagaacaaaatgctcaagagaatgaaaatgaaagccaagtttcaacagatgaaagtgagaactccaggtctcctggaaataaatcagataacatcaagcccaaatctgctccatggaactcttttctccctccaccaccccccatgccagggccaagactgggaccaggaaagataattcccccaccacctcccatatgtccagattctcttgatgatgctgatgctttgggaagtatgttaatttcatggtacatgagtggctatcatactggctattatatggaaatgctggcatagagcagcactaaatgacaccactaaagaaacgatcagacagatctggaatgtgaagcgttatagaagataactggcctcatttcttcaaaatatcaagtgttgggaaagaaaaaaggaagtggaatgggtaactcttcttgattaaaagttatgtaataaccaaatgcaatgtgaaatattttactggactctattttgaaaaaccatctgtaaaagactgaggtgggggtgggaggccagcacggtggtgaggcagttgagaaaatttgaatgtggattagattttgaatgatattggataattattggtaattttatgagctgtgagaagggtgttgtagtttataaaagactgtcttaatttgcatacttaagcatttaggaatgaagtgttagagtgtcttaaaatgtttcaaatggtttaacaaaatgtatgtgaggcgtatgtggcaaaatgttacagaatctaactggtggacatggctgttcattgtactgtttttttctatcttctatatgtttaaaagtatataataaaaatatttaatttttttttaaattaaaaaaa

SEQ ID NO: 4213 - DNA, 1790 bp, Homo sapiens
  source 1..1790: mol_type = genomic DNA
atggattaactcgaactccaggctgtcatggcggcaggacggcgaacttgcagtatctccacgacccgcccctacaggtgccagtgcctccagaatgtggcagctcacaagcctcctgctgttcgtggccacctggggaatttccggcacaccagctcctcttgactcagtgttctccagcagcgagcgtgcccaccaggtgctgcggatccgcaaacgtgccaactccttcctggaggagctccgtcacagcagcctggagcgggagtgcatagaggagatctgtgacttcgaggaggccaaggaaattttccaaaatgtggatgacacactggccttctggtccaagcacgtcgacggtgaccagtgcttggtcttgcccttggagcacccgtgcgccagcctgtgctgcgggcacggcacgtgcatcgacggcatcggcagcttcagctgcgactgccgcagcggctgggagggccgcttctgccagcgcgaggtgagcttcctcaattgctcgctggacaacggcggctgcacgcattactgcctagaggaggtgggctggcggcgctgtagctgtgcgcctggctacaagctgggggacgacctcctgcagtgtcaccccgcagtgaagttcccttgtgggaggccctggaagcggatggagaagaagcgcagtcacctgaaacgagacacagaagaccaagaagaccaagtagatccgcggctcattgatgggaagatgaccaggcggggagacagcccctggcaggtggtcctgctggactcaaagaagaagctggcctgcggggcagtgctcatccacccctcctgggtgctgacagcggcccactgcatggatgagtccaagaagctccttgtcaggcttggagagtatgacctgcggcgctgggagaagtgggagctggacctggacatcaaggaggtcttcgtccaccccaactacagcaagagcaccaccgacaatgacatcgcactgctgcacctggcccagcccgccaccctctcgcagaccatagtgcccatctgcctcccggacagcggccttgcagagcgcgagctcaatcaggccggccaggagaccctcgtgacgggctggggctaccacagcagccgagagaaggaggccaagagaaaccgcaccttcgtcctcaacttcatcaagattcccgtggtcccgcacaatgagtgcagcgaggtcatgagcaacatggtgtctgagaacatgctgtgtgcgggcatcctcggggaccggcaggatgcctgcgagggcgacagtggggggcccatggtcgcctccttccacggcacctggttcctggtgggcctggtgagctggggtgagggctgtgggctccttcacaactacggcgtttacaccaaagtcagccgctacctcgactggatccatgggcacatcagagacaaggaagccccccagaagagctgggcaccttagcgaccctccctgcagggctgggcttttgcatggcaatggatgggacattaaagggacatgtaacaagcacaccggcctgctgttctgtccttccatccctcttttgggctcttctggagggaagtaacatttactgagcacctgttgtatgtcacatgccttatgaatagaatcttaactcctagagcaactctgtggggtggggaggagcagatccaagttttgcggggtctaaagctgtgtgtgttgagggggatactctgtttatgaaaaagaataaaaaacacaaccacgaagccaaaaaaaaaaa

SEQ ID NO: 4214 - DNA, 2310 bp, Homo sapiens
  source 1..2310: mol_type = genomic DNA
gaggaagccccgccccgcgcagccccgtcccgccccttcccatcgtgtacggtcccgcgtggctgcgcgcggcgctctgggagtacgacatggcgcgcgagctgcgggcgctgctgctgtggggccgccgcctgcggcctttgctgcgggcgccggcgctggcggccgtgccgggaggaaaaccaattctgtgtcctcggaggaccacagcccagttgggccccaggcgaaacccagcctggagcttgcaggcaggacgactgttcagcacgcagaccgccgaggacaaggaggaacccctgcactcgattatcagcagcacagagagcgtgcagggttccacttccaaacatgagttccaggccgagacaaagaagcttttggacattgttgcccggtccctgtactcagaaaaagaggtgtttatacgggagctgatctccaatgccagcgatgccttggaaaaactgcgtcacaaactggtgtctgacggccaagcactgccagaaatggagattcacttgcagaccaatgccgagaaaggcaccatcaccatccaggatactggtatcgggatgacacaggaagagctggtgtccaacctggggacgattgccagatcggggtcaaaggccttcctggatgctctgcagaaccaggctgaggccagcagcaagatcatcggccagtttggagtgggtttctactcagctttcatggtggctgacagagtggaggtctattcccgctcggcagccccggggagcctgggttaccagtggctttcagatggttctggagtgtttgaaatcgccgaagcttcgggagttagaaccgggacaaaaatcatcatccacctgaaatccgactgcaaggagttttccagcgaggcccgggtgcgagatgtggtaacgaagtacagcaacttcgtcagcttccccttgtacttgaatggaaggcggatgaacaccttgcaggccatctggatgatggaccccaaggatgtccgtgagtggcaacatgaggagttctaccgctacgtcgcgcaggctcacgacaagccccgctacaccctgcactataagacggacgcaccgctcaacatccgcagcatcttctacgtgcccgacatgaaaccgtccatgtttgatgtgagccgggagctgggctccagcgttgcactgtacagccgcaaagtcctcatccagaccaaggccacggacatcctgcccaagtggctgcgcttcatccgaggtgtggtggacagtgaggacattcccctgaacctcagccgggagctgctgcaggagagcgcactcatcaggaaactccgggacgttttacagcagaggctgatcaaattcttcattgaccagagtaaaaaagatgctgagaagtatgcaaagttttttgaagattacggcctgttcatgcgggagggcattgtgaccgccaccgagcaggaggtcaaggaggacatagcaaagctgctgcgctacgagtcctcggcgctgccctccgggcagctaaccagcctctcagaatacgccagccgcatgcgggccggcacccgcaacatctactacctgtgcgcccccaaccgtcacctggcagagcactcaccctactatgaggccatgaagaagaaagacacagaggttctcttctgctttgagcagtttgatgagctcaccctgctgcaccttcgtgagtttgacaagaagaagctgatctctgtggagacggacatagtcgtggatcactacaaggaggagaagtttgaggacaggtccccagccgccgagtgcctatcagagaaggagacggaggagctcatggcctggatgagaaatgtgctggggtcgcgtgtcaccaacgtgaaggtgaccctccgactggacacccaccctgccatggtcaccgtgctggagatgggggctgcccgccacttcctgcgcatgcagcagctggccaagacccaggaggagcgcgcacagctcctgcagcccacgctggagatcaaccccaggcacgcgctcatcaagaagctgaatcagctgcgcgcaagcgagcctggcctggctcagctgctggtggatcagatatacgagaacgccatgattgctgctggacttgttgacgaccctagggccatggtgggccgcttgaatgagctgcttgtcaaggccctggagcgacactgacagccagggggccagaaggactgacaccacagatgacagccccacctccttgagctttatttacctaaatttaaaggtatttcttaacccgaaaaaaaaaaaaaaa

SEQ ID NO: 4215 - DNA, 2189 bp, Homo sapiens
  source 1..2189: mol_type = genomic DNA
gccagaggggctaggatgagagacagagggtgtgatggtgggtgctgggagatgtagccgaccttggggctggtggctgggggagtgggtagcctgggaaaggccaggatgtggacggactggtatggcattgagcctgaagtggtccaacttggggttccccagtgcctaggaaagttgtccccttgaatgtcagtgtgaaggtgaaggaggaagcagatgcctgttcatatggaaacaaagacctggctgtgaagaggggaggcggacaccaaagtcctgacacttgggcgggacagaattgatctgtgagagactcatctagttcataccctaggtgaccctgggggtggcatgggggtagattagagatcccagtctggtatcctctggagagtaggagtcccaggagctgaaggtttctggccactgaactttggctaaagcagaggtgtcacagctgctcaagattccctggttaaaaagtgaaagtgaaatagagggtcggggcagtgctttcccagaaggattgctcggcatcctgcccttcccagaagcagctctggtgctgaagagagcactgcctccctgtgtgactgggtgagtccatattctctctttgggtctcaattttgccttccctaatgaaggggtaagattggactaggtaagcatcttacaaccatttgtggtcatgagagctggggtggggaaggattgtcacttgacccccccagctctgtttctaagtgctgaaagagctccaggctatgctacgggaggagaagccagctactgaggaaaagccagctactgagaaaaagcgggagtggtttaccattctcctcccccacctttcaccagagaagaggacgttgtcacagataaagagccaggctcaccagctcctgacgcatgcatcatgaccatgagacacaactggacaccagacctcagccctttgtgggtcctgctcctgtgtgcccacgtcgtcactctcctggtcagagccacacctgtctcgcagaccaccacagctgccactgcctcagttagaagcacaaaggacccctgcccctcccagcccccagtgttcccagcagctaagcagtgtccagcattggaagtgacctggccagaggtggaagtgccactgaatggaacgctgagcttatcctgtgtggcctgcagccgcttccccaacttcagcatcctctactggctgggcaatggttccttcattgagcacctcccaggccgactgtgggaggggagcaccagccgggaacgtgggagcacaggtacgcagctgtgcaaggccttggtgctggagcagctgacccctgccctgcacagcaccaacttctcctgtgtgctcgtggaccctgaacaggttgtccagcgtcacgtcgtcctggcccagctctgggctgggctgagggcaaccttgccccccacccaagaagccctgccctccagccacagcagtccacagcagcagggttaagactcagcacagggccagcagcagcacaaccttgaccagagcttgggtcctacctgtctacctggagtgaacagtccctgactgcctgtaggctgcgtggatgcgcaacacaccccctccttctctgctttgggtcccttctctcaccaaattcaaactccattcccacctacctagaaaatcacagcctccttataatgcctcctcctcctgccattctctctccacctatccattagccttcctaacgtcctactcctcacactgctctactgctcagaaaccaccaagactgttgatgccttagccttgcactccagggccctacctgcatttcccacatgactttctggaagcctcccaactattcttgcttttcccagacagctcccactcccatgtctctgctcatttagtcccgtcttcctcaccgccccagcaggggaacgctcaagcctggttgaaatgctgcctcttcagtgaagtcatcctctttcagctctggccgcattctgcagacttcctatcttcgtgctgtatgttttttttttcccccttcactctaatggactgttccagggaagggatgggggcagcagctgcttcggatccacactgtatctgtgtcatccccacatgggtcctcataaaggattattcaatggagaaaaaaaaaaaaaaa

SEQ ID NO: 4216 - DNA, 1371 bp, Homo sapiens
  source 1..1371: mol_type = genomic DNA
aagcagctctggtgctgaagagagcactgcctccctgtgtgactggagaagaggacgttgtcacagataaagagccaggctcaccagctcctgacgcatgcatcatgaccatgagacacaactggacaccagacctcagccctttgtgggtcctgctcctgtgtgcccacgtcgtcactctcctggtcagagccacacctgtctcgcagaccaccacagctgccactgcctcagttagaagcacaaaggacccctgcccctcccagcccccagtgttcccagcagctaagcagtgtccagcattggaagtgacctggccagaggtggaagtgccactgaatggaacgctgagcttatcctgtgtggcctgcagccgcttccccaacttcagcatcctctactggctgggcaatggttccttcattgagcacctcccaggccgactgtgggaggggagcaccagccgggaacgtgggagcacaggtacgcagctgtgcaaggccttggtgctggagcagctgacccctgccctgcacagcaccaacttctcctgtgtgctcgtggaccctgaacaggttgtccagcgtcacgtcgtcctggcccagctctgggctgggctgagggcaaccttgccccccacccaagaagccctgccctccagccacagcagtccacagcagcagggttaagactcagcacagggccagcagcagcacaaccttgaccagagcttgggtcctacctgtctacctggagtgaacagtccctgactgcctgtaggctgcgtggatgcgcaacacaccccctccttctctgctttgggtcccttctctcaccaaattcaaactccattcccacctacctagaaaatcacagcctccttataatgcctcctcctcctgccattctctctccacctatccattagccttcctaacgtcctactcctcacactgctctactgctcagaaaccaccaagactgttgatgccttagccttgcactccagggccctacctgcatttcccacatgactttctggaagcctcccaactattcttgcttttcccagacagctcccactcccatgtctctgctcatttagtcccgtcttcctcaccgccccagcaggggaacgctcaagcctggttgaaatgctgcctcttcagtgaagtcatcctctttcagctctggccgcattctgcagacttcctatcttcgtgctgtatgttttttttttcccccttcactctaatggactgttccagggaagggatgggggcagcagctgcttcggatccacactgtatctgtgtcatccccacatgggtcctcataaaggattattcaatggagaaaaaaaaaaaaaaa

SEQ ID NO: 4217 - DNA, 1053 bp, Homo sapiens
  source 1..1053: mol_type = genomic DNA
agaagaggacgttgtcacagataaagagccaggctcaccagctcctgacgcatgcatcatgaccatgagacacaactggacaccagacctcagccctttgtgggtcctgctcctgtgtgcccacgtcgtcactctcctggtcagagccacacctgtctcgcagaccaccacagctgccactgcctcagttagaagcacaaaggacccctgcccctcccagcccccagtgttcccagcagctaagcagtgtccagcattggaagtgacctggccagaggtggaagtgccactgagctgggctgagggcaaccttgccccccacccaagaagccctgccctccagccacagcagtccacagcagcagggttaagactcagcacagggccagcagcagcacaaccttgaccagagcttgggtcctacctgtctacctggagtgaacagtccctgactgcctgtaggctgcgtggatgcgcaacacaccccctccttctctgctttgggtcccttctctcaccaaattcaaactccattcccacctacctagaaaatcacagcctccttataatgcctcctcctcctgccattctctctccacctatccattagccttcctaacgtcctactcctcacactgctctactgctcagaaaccaccaagactgttgatgccttagccttgcactccagggccctacctgcatttcccacatgactttctggaagcctcccaactattcttgcttttcccagacagctcccactcccatgtctctgctcatttagtcccgtcttcctcaccgccccagcaggggaacgctcaagcctggttgaaatgctgcctcttcagtgaagtcatcctctttcagctctggccgcattctgcagacttcctatcttcgtgctgtatgttttttttttcccccttcactctaatggactgttccagggaagggatgggggcagcagctgcttcggatccacactgtatctgtgtcatccccacatgggtcctcataaaggattattcaatggagaaaaaaaaaaaaaaa

SEQ ID NO: 4218 - DNA, 1433 bp, Homo sapiens
  source 1..1433: mol_type = genomic DNA
tttcctgtggtgggttcacacgcagctagacacagctaacttgagtcttggagctcctagagggaagcttctggaaaggaaggctcttcaggacctcttaggagccagagaagaggacgttgtcacagataaagagccaggctcaccagctcctgacgcatgcatcatgaccatgagacacaactggacaccagacctcagccctttgtgggtcctgctcctgtgtgcccacgtcgtcactctcctggtcagagccacacctgtctcgcagaccaccacagctgccactgcctcagttagaagcacaaaggacccctgcccctcccagcccccagtgttcccagcagctaagcagtgtccagcattggaagtgacctggccagaggtggaagtgccactgaatggaacgctgagcttatcctgtgtggcctgcagccgcttccccaacttcagcatcctctactggctgggcaatggttccttcattgagcacctcccaggccgactgtgggaggggagcaccagccgggaacgtgggagcacaggtacgcagctgtgcaaggccttggtgctggagcagctgacccctgccctgcacagcaccaacttctcctgtgtgctcgtggaccctgaacaggttgtccagcgtcacgtcgtcctggcccagctctgggctgggctgagggcaaccttgccccccacccaagaagccctgccctccagccacagcagtccacagcagcagggttaagactcagcacagggccagcagcagcacaaccttgaccagagcttgggtcctacctgtctacctggagtgaacagtccctgactgcctgtaggctgcgtggatgcgcaacacaccccctccttctctgctttgggtcccttctctcaccaaattcaaactccattcccacctacctagaaaatcacagcctccttataatgcctcctcctcctgccattctctctccacctatccattagccttcctaacgtcctactcctcacactgctctactgctcagaaaccaccaagactgttgatgccttagccttgcactccagggccctacctgcatttcccacatgactttctggaagcctcccaactattcttgcttttcccagacagctcccactcccatgtctctgctcatttagtcccgtcttcctcaccgccccagcaggggaacgctcaagcctggttgaaatgctgcctcttcagtgaagtcatcctctttcagctctggccgcattctgcagacttcctatcttcgtgctgtatgttttttttttcccccttcactctaatggactgttccagggaagggatgggggcagcagctgcttcggatccacactgtatctgtgtcatccccacatgggtcctcataaaggattattcaatggagaaaaaaaaaaaaaaa

SEQ ID NO: 4219 - DNA, 1545 bp, Homo sapiens
  source 1..1545: mol_type = genomic DNA
tttcctgtggtgggttcacacgcagctagacacagctaacttgagtcttggagctcctagagggaagcttctggaaaggaaggctcttcaggacctcttaggagccagtgtgaaggtgaaggaggaagcagatgcctgttcatatggaaacaaagacctggctgtgaagaggggaggcggacaccaaagtcctgacacttgggcgggacagaattgatctagaagaggacgttgtcacagataaagagccaggctcaccagctcctgacgcatgcatcatgaccatgagacacaactggacaccagacctcagccctttgtgggtcctgctcctgtgtgcccacgtcgtcactctcctggtcagagccacacctgtctcgcagaccaccacagctgccactgcctcagttagaagcacaaaggacccctgcccctcccagcccccagtgttcccagcagctaagcagtgtccagcattggaagtgacctggccagaggtggaagtgccactgaatggaacgctgagcttatcctgtgtggcctgcagccgcttccccaacttcagcatcctctactggctgggcaatggttccttcattgagcacctcccaggccgactgtgggaggggagcaccagccgggaacgtgggagcacaggtacgcagctgtgcaaggccttggtgctggagcagctgacccctgccctgcacagcaccaacttctcctgtgtgctcgtggaccctgaacaggttgtccagcgtcacgtcgtcctggcccagctctgggctgggctgagggcaaccttgccccccacccaagaagccctgccctccagccacagcagtccacagcagcagggttaagactcagcacagggccagcagcagcacaaccttgaccagagcttgggtcctacctgtctacctggagtgaacagtccctgactgcctgtaggctgcgtggatgcgcaacacaccccctccttctctgctttgggtcccttctctcaccaaattcaaactccattcccacctacctagaaaatcacagcctccttataatgcctcctcctcctgccattctctctccacctatccattagccttcctaacgtcctactcctcacactgctctactgctcagaaaccaccaagactgttgatgccttagccttgcactccagggccctacctgcatttcccacatgactttctggaagcctcccaactattcttgcttttcccagacagctcccactcccatgtctctgctcatttagtcccgtcttcctcaccgccccagcaggggaacgctcaagcctggttgaaatgctgcctcttcagtgaagtcatcctctttcagctctggccgcattctgcagacttcctatcttcgtgctgtatgttttttttttcccccttcactctaatggactgttccagggaagggatgggggcagcagctgcttcggatccacactgtatctgtgtcatccccacatgggtcctcataaaggattattcaatggagaaaaaaaaaaaaaaa

SEQ ID NO: 4220 - DNA, 1715 bp, Homo sapiens
  source 1..1715: mol_type = genomic DNA
gaaccaaccggttgcttgctgtcccagcggcgccccctcatcaccgtcgccatgcccggaggtctgcttctcggggacgtggctcccaactttgaggccaataccaccgtcggccgcatccgtttccacgactttctgggagactcatggggcattctcttctcccaccctcgggactttaccccagtgtgcaccacagagcttggcagagctgcaaagctggcaccagaatttgccaagaggaatgttaagttgattgccctttcaatagacagtgttgaggaccatcttgcctggagcaaggatatcaatgcttacaattgtgaagagcccacagaaaagttaccttttcccatcatcgatgataggaatcgggagcttgccatcctgttgggcatgctggatccagcagagaaggatgaaaagggcatgcctgtgacagctcgtgtggtgtttgtttttggtcctgataagaagctgaagctgtctatcctctacccagctaccactggcaggaactttgatgagattctcagggtagtcatctctctccagctgacagcagaaaaaagggttgccaccccagttgattggaaggatggggatagtgtgatggtccttccaaccatccctgaagaagaagccaaaaaacttttcccgaaaggagtcttcaccaaagagctcccatctggcaagaaatacctccgctacacaccccagccttaagtctcttggagaagctggtgctgtgagccagaggatgtcagctgccaattgtgttttcctgcagcaattccataaacacatcctggtgtcatcacagccaaggtttttaggttgctataccaatggcttattaaatgaaaatggcactaaaagtttcttgagattctttatactctctgccttcagcaatcaattccattcatacatcagcactctgctggttctgtttgaaatatgttctgtatttaaaactcaaatcttgttggatctctgcagggcttgtgaccaatgaagtcatatttgttgatggttgacaaagcttgcttcactccatcagagaatgactatcaatttttttttaactgtcctatcacgtcctctcctgtcacccattttgaagagtggcagaacttgaagttcaacttcctctgtaaatatccaagtataaagcccaggaacttctagaataacccagatgcgctttaattttttttaatatgttttgatcacagaacttctagaataacccagatgctctttcatattcttttaatacatcttgatcacagctgggggaaaaaaagctttttaattctataccttcctagtagataagtgaagagcagggaaagagacctttaaatattttgctataaaaaaatttgtgataagtttctatcaaaatggggagattgcagaaaaggcttcccttggctcccaaggaggtgtagcaggtgtgagcaatattagtgccatgtgcctttcacacagggtttgcatttatcagtctgttttccgatgatgtgtacatgaaagagtacaccatgtgaagagaagagagaatgattgaaaatgttttagtatagaactcttcttgcagtgggttgctattttctagattttactttttagggaacaaaataaaatcctttgttaaaactgggaaaaaaaaaaaaaaaaaaaaaaaaaaaaaaaaaaaaaaaaaaaaa

SEQ ID NO: 4221 - DNA, 886 bp, Homo sapiens
  source 1..886: mol_type = genomic DNA
ctcgcaggctccaggggcggggcgtggccggggcgcagcgacgggcgcggaggtccggccgggcgcgcgcgcccccgccacacgcacgccgggcgtgccagtttataaagggagagagcaagcagcgagtcttgaagctctgtttggtgctttggatccatttccatcggtccttacagccgctcgtcagactccagcagccaagatggtgaagcagatcgagagcaagactgcttttcaggaagccttggacgctgcaggtgataaacttgtagtagttgacttctcagccacgtggtgtgggccttgcaaaatgatcaagcctttctttcattccctctctgaaaagtattccaacgtgatattccttgaagtagatgtggatgactgtcaggatgttgcttcagagtgtgaagtcaaatgcatgccaacattccagttttttaagaagggacaaaaggtgggtgaattttctggagccaataaggaaaagcttgaagccaccattaatgaattagtctaatcatgttttctgaaaatataaccagccattggctatttaaaacttgtaatttttttaatttacaaaaatataaaatatgaagacataaacccagttgccatctgcgtgacaataaaacattaatgctaacactttttaaaaccgtctcatgtctgaatagctttcaaaataaatgtgaaatggtcatttaatgtattttcctatattctcaatcactttttagtaaccttgtaggccactgattattttaagattttaaaaattattattgctaccttaatgtattgctacaaaaatctcttgttgggggcaatgcaggtaataaagtagtatgttgttatttgtaaaaaaaaaaaaaaaaaa

SEQ ID NO: 4222 - DNA, 3837 bp, Homo sapiens
  source 1..3837: mol_type = genomic DNA
gccccgcgacgagctcccgccggtcacgtgacccgcctctgcgcgcccccgggcacgaccccggagtctccgcgggcggccagggcgcgcgtgcgcggaggtgagccgggccggggctgcggggcttccctgagcgcgggccgggtcggtggggcggtcggctgcccgcgcggcctctcagttgggaaagctgaggttgtcgccggggccgcgggtggaggtcggggatgaggcagcaggtaggacagtgacctcggtgacgcgaaggaccccggccacctctaggttctcctcgtccgcccgttgttcagcgagggaggctctgcgcgtgccgcagctgacggggaaactgaggcacggagcgggcctgtaggagctgtccaggccatctccaaccatgggagtgaggcacccgccctgctcccaccggctcctggccgtctgcgccctcgtgtccttggcaaccgctgcactcctggggcacatcctactccatgatttcctgctggttccccgagagctgagtggctcctccccagtcctggaggagactcacccagctcaccagcagggagccagcagaccagggccccgggatgcccaggcacaccccggccgtcccagagcagtgcccacacagtgcgacgtcccccccaacagccgcttcgattgcgcccctgacaaggccatcacccaggaacagtgcgaggcccgcggctgttgctacatccctgcaaagcaggggctgcagggagcccagatggggcagccctggtgcttcttcccacccagctaccccagctacaagctggagaacctgagctcctctgaaatgggctacacggccaccctgacccgtaccacccccaccttcttccccaaggacatcctgaccctgcggctggacgtgatgatggagactgagaaccgcctccacttcacgatcaaagatccagctaacaggcgctacgaggtgcccttggagaccccgcatgtccacagccgggcaccgtccccactctacagcgtggagttctccgaggagcccttcggggtgatcgtgcgccggcagctggacggccgcgtgctgctgaacacgacggtggcgcccctgttctttgcggaccagttccttcagctgtccacctcgctgccctcgcagtatatcacaggcctcgccgagcacctcagtcccctgatgctcagcaccagctggaccaggatcaccctgtggaaccgggaccttgcgcccacgcccggtgcgaacctctacgggtctcaccctttctacctggcgctggaggacggcgggtcggcacacggggtgttcctgctaaacagcaatgccatggatgtggtcctgcagccgagccctgcccttagctggaggtcgacaggtgggatcctggatgtctacatcttcctgggcccagagcccaagagcgtggtgcagcagtacctggacgttgtgggatacccgttcatgccgccatactggggcctgggcttccacctgtgccgctggggctactcctccaccgctatcacccgccaggtggtggagaacatgaccagggcccacttccccctggacgtccagtggaacgacctggactacatggactcccggagggacttcacgttcaacaaggatggcttccgggacttcccggccatggtgcaggagctgcaccagggcggccggcgctacatgatgatcgtggatcctgccatcagcagctcgggccctgccgggagctacaggccctacgacgagggtctgcggaggggggttttcatcaccaacgagaccggccagccgctgattgggaaggtatggcccgggtccactgccttccccgacttcaccaaccccacagccctggcctggtgggaggacatggtggctgagttccatgaccaggtgcccttcgacggcatgtggattgacatgaacgagccttccaacttcatcaggggctctgaggacggctgccccaacaatgagctggagaacccaccctacgtgcctggggtggttggggggaccctccaggcggccaccatctgtgcctccagccaccagtttctctccacacactacaacctgcacaacctctacggcctgaccgaagccatcgcctcccacagggcgctggtgaaggctcgggggacacgcccatttgtgatctcccgctcgacctttgctggccacggccgatacgccggccactggacgggggacgtgtggagctcctgggagcagctcgcctcctccgtgccagaaatcctgcagtttaacctgctgggggtgcctctggtcggggccgacgtctgcggcttcctgggcaacacctcagaggagctgtgtgtgcgctggacccagctgggggccttctaccccttcatgcggaaccacaacagcctgctcagtctgccccaggagccgtacagcttcagcgagccggcccagcaggccatgaggaaggccctcaccctgcgctacgcactcctcccccacctctacacactgttccaccaggcccacgtcgcgggggagaccgtggcccggcccctcttcctggagttccccaaggactctagcacctggactgtggaccaccagctcctgtggggggaggccctgctcatcaccccagtgctccaggccgggaaggccgaagtgactggctacttccccttgggcacatggtacgacctgcagacggtgccagtagaggcccttggcagcctcccacccccacctgcagctccccgtgagccagccatccacagcgaggggcagtgggtgacgctgccggcccccctggacaccatcaacgtccacctccgggctgggtacatcatccccctgcagggccctggcctcacaaccacagagtcccgccagcagcccatggccctggctgtggccctgaccaagggtggggaggcccgaggggagctgttctgggacgatggagagagcctggaagtgctggagcgaggggcctacacacaggtcatcttcctggccaggaataacacgatcgtgaatgagctggtacgtgtgaccagtgagggagctggcctgcagctgcagaaggtgactgtcctgggcgtggccacggcgccccagcaggtcctctccaacggtgtccctgtctccaacttcacctacagccccgacaccaaggtcctggacatctgtgtctcgctgttgatgggagagcagtttctcgtcagctggtgttagccgggcggagtgtgttagtctctccagagggaggctggttccccagggaagcagagcctgtgtgcgggcagcagctgtgtgcgggcctgggggttgcatgtgtcacctggagctgggcactaaccattccaagccgccgcatcgcttgtttccacctcctgggccggggctctggcccccaacgtgtctaggagagctttctccctagatcgcactgtgggccggggccctggagggctgctctgtgttaataagattgtaaggtttgccctcctcacctgttgccggcatgcgggtagtattagccacccccctccatctgttcccagcaccggagaagggggtgctcaggtggaggtgtggggtatgcacctgagctcctgcttcgcgcctgctgctctgccccaacgcgaccgctgcccggctgcccagagggctggatgcctgccggtccccgagcaagcctgggaactcaggaaaattcacaggacttgggagattctaaatcttaagtgcaattatttttaataaaaggggcatttggaatcagcaaaaaaaaaaaaaaaaaaaaaaaaaaaaaa

SEQ ID NO: 4223 - DNA, 3652 bp, Homo sapiens
  source 1..3652: mol_type = genomic DNA
gccccgcgacgagctcccgccggtcacgtgacccgcctctgcgcgcccccgggcacgaccccggagtctccgcgggcggccagggcgcgcgtgcgcggaggttctcctcgtccgcccgttgttcagcgagggaggctctgcgcgtgccgcagctgacggggaaactgaggcacggagcgggcctgtaggagctgtccaggccatctccaaccatgggagtgaggcacccgccctgctcccaccggctcctggccgtctgcgccctcgtgtccttggcaaccgctgcactcctggggcacatcctactccatgatttcctgctggttccccgagagctgagtggctcctccccagtcctggaggagactcacccagctcaccagcagggagccagcagaccagggccccgggatgcccaggcacaccccggccgtcccagagcagtgcccacacagtgcgacgtcccccccaacagccgcttcgattgcgcccctgacaaggccatcacccaggaacagtgcgaggcccgcggctgttgctacatccctgcaaagcaggggctgcagggagcccagatggggcagccctggtgcttcttcccacccagctaccccagctacaagctggagaacctgagctcctctgaaatgggctacacggccaccctgacccgtaccacccccaccttcttccccaaggacatcctgaccctgcggctggacgtgatgatggagactgagaaccgcctccacttcacgatcaaagatccagctaacaggcgctacgaggtgcccttggagaccccgcatgtccacagccgggcaccgtccccactctacagcgtggagttctccgaggagcccttcggggtgatcgtgcgccggcagctggacggccgcgtgctgctgaacacgacggtggcgcccctgttctttgcggaccagttccttcagctgtccacctcgctgccctcgcagtatatcacaggcctcgccgagcacctcagtcccctgatgctcagcaccagctggaccaggatcaccctgtggaaccgggaccttgcgcccacgcccggtgcgaacctctacgggtctcaccctttctacctggcgctggaggacggcgggtcggcacacggggtgttcctgctaaacagcaatgccatggatgtggtcctgcagccgagccctgcccttagctggaggtcgacaggtgggatcctggatgtctacatcttcctgggcccagagcccaagagcgtggtgcagcagtacctggacgttgtgggatacccgttcatgccgccatactggggcctgggcttccacctgtgccgctggggctactcctccaccgctatcacccgccaggtggtggagaacatgaccagggcccacttccccctggacgtccagtggaacgacctggactacatggactcccggagggacttcacgttcaacaaggatggcttccgggacttcccggccatggtgcaggagctgcaccagggcggccggcgctacatgatgatcgtggatcctgccatcagcagctcgggccctgccgggagctacaggccctacgacgagggtctgcggaggggggttttcatcaccaacgagaccggccagccgctgattgggaaggtatggcccgggtccactgccttccccgacttcaccaaccccacagccctggcctggtgggaggacatggtggctgagttccatgaccaggtgcccttcgacggcatgtggattgacatgaacgagccttccaacttcatcaggggctctgaggacggctgccccaacaatgagctggagaacccaccctacgtgcctggggtggttggggggaccctccaggcggccaccatctgtgcctccagccaccagtttctctccacacactacaacctgcacaacctctacggcctgaccgaagccatcgcctcccacagggcgctggtgaaggctcgggggacacgcccatttgtgatctcccgctcgacctttgctggccacggccgatacgccggccactggacgggggacgtgtggagctcctgggagcagctcgcctcctccgtgccagaaatcctgcagtttaacctgctgggggtgcctctggtcggggccgacgtctgcggcttcctgggcaacacctcagaggagctgtgtgtgcgctggacccagctgggggccttctaccccttcatgcggaaccacaacagcctgctcagtctgccccaggagccgtacagcttcagcgagccggcccagcaggccatgaggaaggccctcaccctgcgctacgcactcctcccccacctctacacactgttccaccaggcccacgtcgcgggggagaccgtggcccggcccctcttcctggagttccccaaggactctagcacctggactgtggaccaccagctcctgtggggggaggccctgctcatcaccccagtgctccaggccgggaaggccgaagtgactggctacttccccttgggcacatggtacgacctgcagacggtgccagtagaggcccttggcagcctcccacccccacctgcagctccccgtgagccagccatccacagcgaggggcagtgggtgacgctgccggcccccctggacaccatcaacgtccacctccgggctgggtacatcatccccctgcagggccctggcctcacaaccacagagtcccgccagcagcccatggccctggctgtggccctgaccaagggtggggaggcccgaggggagctgttctgggacgatggagagagcctggaagtgctggagcgaggggcctacacacaggtcatcttcctggccaggaataacacgatcgtgaatgagctggtacgtgtgaccagtgagggagctggcctgcagctgcagaaggtgactgtcctgggcgtggccacggcgccccagcaggtcctctccaacggtgtccctgtctccaacttcacctacagccccgacaccaaggtcctggacatctgtgtctcgctgttgatgggagagcagtttctcgtcagctggtgttagccgggcggagtgtgttagtctctccagagggaggctggttccccagggaagcagagcctgtgtgcgggcagcagctgtgtgcgggcctgggggttgcatgtgtcacctggagctgggcactaaccattccaagccgccgcatcgcttgtttccacctcctgggccggggctctggcccccaacgtgtctaggagagctttctccctagatcgcactgtgggccggggccctggagggctgctctgtgttaataagattgtaaggtttgccctcctcacctgttgccggcatgcgggtagtattagccacccccctccatctgttcccagcaccggagaagggggtgctcaggtggaggtgtggggtatgcacctgagctcctgcttcgcgcctgctgctctgccccaacgcgaccgctgcccggctgcccagagggctggatgcctgccggtccccgagcaagcctgggaactcaggaaaattcacaggacttgggagattctaaatcttaagtgcaattatttttaataaaaggggcatttggaatcagcaaaaaaaaaaaaaaaaaaaaaaaaaaaaaa

SEQ ID NO: 4224 - DNA, 3572 bp, Homo sapiens
  source 1..3572: mol_type = genomic DNA
gccccgcgacgagctcccgccggtcacgtgacccgcctctgcgcgcccccgggcacgaccccggagtctccgcgggcggccagggcgcgcgtgcgcggaggcctgtaggagctgtccaggccatctccaaccatgggagtgaggcacccgccctgctcccaccggctcctggccgtctgcgccctcgtgtccttggcaaccgctgcactcctggggcacatcctactccatgatttcctgctggttccccgagagctgagtggctcctccccagtcctggaggagactcacccagctcaccagcagggagccagcagaccagggccccgggatgcccaggcacaccccggccgtcccagagcagtgcccacacagtgcgacgtcccccccaacagccgcttcgattgcgcccctgacaaggccatcacccaggaacagtgcgaggcccgcggctgttgctacatccctgcaaagcaggggctgcagggagcccagatggggcagccctggtgcttcttcccacccagctaccccagctacaagctggagaacctgagctcctctgaaatgggctacacggccaccctgacccgtaccacccccaccttcttccccaaggacatcctgaccctgcggctggacgtgatgatggagactgagaaccgcctccacttcacgatcaaagatccagctaacaggcgctacgaggtgcccttggagaccccgcatgtccacagccgggcaccgtccccactctacagcgtggagttctccgaggagcccttcggggtgatcgtgcgccggcagctggacggccgcgtgctgctgaacacgacggtggcgcccctgttctttgcggaccagttccttcagctgtccacctcgctgccctcgcagtatatcacaggcctcgccgagcacctcagtcccctgatgctcagcaccagctggaccaggatcaccctgtggaaccgggaccttgcgcccacgcccggtgcgaacctctacgggtctcaccctttctacctggcgctggaggacggcgggtcggcacacggggtgttcctgctaaacagcaatgccatggatgtggtcctgcagccgagccctgcccttagctggaggtcgacaggtgggatcctggatgtctacatcttcctgggcccagagcccaagagcgtggtgcagcagtacctggacgttgtgggatacccgttcatgccgccatactggggcctgggcttccacctgtgccgctggggctactcctccaccgctatcacccgccaggtggtggagaacatgaccagggcccacttccccctggacgtccagtggaacgacctggactacatggactcccggagggacttcacgttcaacaaggatggcttccgggacttcccggccatggtgcaggagctgcaccagggcggccggcgctacatgatgatcgtggatcctgccatcagcagctcgggccctgccgggagctacaggccctacgacgagggtctgcggaggggggttttcatcaccaacgagaccggccagccgctgattgggaaggtatggcccgggtccactgccttccccgacttcaccaaccccacagccctggcctggtgggaggacatggtggctgagttccatgaccaggtgcccttcgacggcatgtggattgacatgaacgagccttccaacttcatcaggggctctgaggacggctgccccaacaatgagctggagaacccaccctacgtgcctggggtggttggggggaccctccaggcggccaccatctgtgcctccagccaccagtttctctccacacactacaacctgcacaacctctacggcctgaccgaagccatcgcctcccacagggcgctggtgaaggctcgggggacacgcccatttgtgatctcccgctcgacctttgctggccacggccgatacgccggccactggacgggggacgtgtggagctcctgggagcagctcgcctcctccgtgccagaaatcctgcagtttaacctgctgggggtgcctctggtcggggccgacgtctgcggcttcctgggcaacacctcagaggagctgtgtgtgcgctggacccagctgggggccttctaccccttcatgcggaaccacaacagcctgctcagtctgccccaggagccgtacagcttcagcgagccggcccagcaggccatgaggaaggccctcaccctgcgctacgcactcctcccccacctctacacactgttccaccaggcccacgtcgcgggggagaccgtggcccggcccctcttcctggagttccccaaggactctagcacctggactgtggaccaccagctcctgtggggggaggccctgctcatcaccccagtgctccaggccgggaaggccgaagtgactggctacttccccttgggcacatggtacgacctgcagacggtgccagtagaggcccttggcagcctcccacccccacctgcagctccccgtgagccagccatccacagcgaggggcagtgggtgacgctgccggcccccctggacaccatcaacgtccacctccgggctgggtacatcatccccctgcagggccctggcctcacaaccacagagtcccgccagcagcccatggccctggctgtggccctgaccaagggtggggaggcccgaggggagctgttctgggacgatggagagagcctggaagtgctggagcgaggggcctacacacaggtcatcttcctggccaggaataacacgatcgtgaatgagctggtacgtgtgaccagtgagggagctggcctgcagctgcagaaggtgactgtcctgggcgtggccacggcgccccagcaggtcctctccaacggtgtccctgtctccaacttcacctacagccccgacaccaaggtcctggacatctgtgtctcgctgttgatgggagagcagtttctcgtcagctggtgttagccgggcggagtgtgttagtctctccagagggaggctggttccccagggaagcagagcctgtgtgcgggcagcagctgtgtgcgggcctgggggttgcatgtgtcacctggagctgggcactaaccattccaagccgccgcatcgcttgtttccacctcctgggccggggctctggcccccaacgtgtctaggagagctttctccctagatcgcactgtgggccggggccctggagggctgctctgtgttaataagattgtaaggtttgccctcctcacctgttgccggcatgcgggtagtattagccacccccctccatctgttcccagcaccggagaagggggtgctcaggtggaggtgtggggtatgcacctgagctcctgcttcgcgcctgctgctctgccccaacgcgaccgctgcccggctgcccagagggctggatgcctgccggtccccgagcaagcctgggaactcaggaaaattcacaggacttgggagattctaaatcttaagtgcaattatttttaataaaaggggcatttggaatcagcaaaaaaaaaaaaaaaaaaaaaaaaaaaaaa

SEQ ID NO: 4225 - DNA, 498 bp, Homo sapiens
  source 1..498: mol_type = genomic DNA
agttccccaaagataacacagctttgcacagtggatgtttacttgctggtggtcttatctaagatcaacattggcagctgtgcccggagaggcctccagggtccagagaaaggagtcgaagaagccaccagccaagctgcagccccgagctctagcaggctggctccgcccggaagatggaggtcaagcagaaggggcagaggatgaactggaagtccggttcaacgccccctttgatgttggaatcaagctgtcaggggttcagtaccagcagcacagccaggccctggggaagtttcttcaggacatcctctgggaagaggccaaagaggccccagccgacaagtgatcgcccacaagccttactcacctctctctaagtttagaagcgctcatctggcttttcgcttgcttctgcagcaactcccacgactgttgtacaagctcaggaggcgaataaatgttcaaactgtaaaaaaaaaaaaaaaaaaaaaaaaa

SEQ ID NO: 4226 - DNA, 501 bp, Homo sapiens
  source 1..501: mol_type = genomic DNA
agttccccaaagataacacagctttgcacagtggatgtttacttgctggtggtcttatctaagatcaacattggcagctgtgcccggagaggcctccagggtccagcagagaaaggagtcgaagaagccaccagccaagctgcagccccgagctctagcaggctggctccgcccggaagatggaggtcaagcagaaggggcagaggatgaactggaagtccggttcaacgccccctttgatgttggaatcaagctgtcaggggttcagtaccagcagcacagccaggccctggggaagtttcttcaggacatcctctgggaagaggccaaagaggccccagccgacaagtgatcgcccacaagccttactcacctctctctaagtttagaagcgctcatctggcttttcgcttgcttctgcagcaactcccacgactgttgtacaagctcaggaggcgaataaatgttcaaactgtaaaaaaaaaaaaaaaaaaaaaaaaa

SEQ ID NO: 4227 - DNA, 384 bp, Homo sapiens
  source 1..384: mol_type = genomic DNA
agttccccaaagataacacagctttgcacagtggatgtttacttgctggtggtcttatctaagatcaacattggcagctgtgcccggagaggcctccagggtccagttcaacgccccctttgatgttggaatcaagctgtcaggggttcagtaccagcagcacagccaggccctggggaagtttcttcaggacatcctctgggaagaggccaaagaggccccagccgacaagtgatcgcccacaagccttactcacctctctctaagtttagaagcgctcatctggcttttcgcttgcttctgcagcaactcccacgactgttgtacaagctcaggaggcgaataaatgttcaaactgtaaaaaaaaaaaaaaaaaaaaaaaaa

SEQ ID NO: 4228 - DNA, 1374 bp, Homo sapiens
  source 1..1374: mol_type = genomic DNA
agttccccaaagataacacagctttgcacagtggatgtttacttgctggtggtcttatctaagatcaacattggcagctgtgcccggagaggcctccagggtccaggtccaatgcacttccctctcagaagaggcatccgctaaaatagggaccaaagctgctggagggaggcaaggcaagctgctatgtgaaaaaacgccaggccaggcagtcatgtcacacctggcagaaatgactgaagcatagccactggctgaagttatccccacacccactctctggagaggatgatcaggagcagtctgctcaaccgggaggtgggactcctcctcgggaaggtgtagaatcaccagcctggctccctgcggactcccggggctcacagaggccagagcagcaacagcacatgggaaacaacggggcgctggactggggaggtctcagagctctcctagtgatgacagcctcattttacccagggagaaagggcgagtaagctaaggtcacacagcaacaaagctgcacccagaccccagagccactctcctccctccctcctccaccagggccatgcccacttggggcaccccgccaccgtgttccagggacagctggagcacatgcttcttccctcgccaacccagcaattccgcagggcatctgacctccactgttgacttctacccagaggacaagaacatttttagttcccaaggaatgtacatcagccccacggaagctaggccacctctgggatggggttgctggtttagaacaaacgccagtcatcctatataaggacctgacagccaccaggcaccacctccgccaggaactgcaggcccacctgtctgcaacccagctgaggccatgccctccccagggaccgtctgcagcctcctgctcctcggcatgctctggctggacttggccatggcaggctccagcttcctgagccctgaacaccagagagtccagcagagaaaggagtcgaagaagccaccagccaagctgcagccccgagctctagcaggctggctccgcccggaagatggaggtcaagcagaaggggcagaggatgaactggaagtccggttcaacgccccctttgatgttggaatcaagctgtcaggggttcagtaccagcagcacagccaggccctggggaagtttcttcaggacatcctctgggaagaggccaaagaggccccagccgacaagtgatcgcccacaagccttactcacctctctctaagtttagaagcgctcatctggcttttcgcttgcttctgcagcaactcccacgactgttgtacaagctcaggaggcgaataaatgttcaaactgtaaaaaaaaaaaaaaaaaaaaaaaaa

SEQ ID NO: 4229 - DNA, 1371 bp, Homo sapiens
  source 1..1371: mol_type = genomic DNA
agttccccaaagataacacagctttgcacagtggatgtttacttgctggtggtcttatctaagatcaacattggcagctgtgcccggagaggcctccagggtccaggtccaatgcacttccctctcagaagaggcatccgctaaaatagggaccaaagctgctggagggaggcaaggcaagctgctatgtgaaaaaacgccaggccaggcagtcatgtcacacctggcagaaatgactgaagcatagccactggctgaagttatccccacacccactctctggagaggatgatcaggagcagtctgctcaaccgggaggtgggactcctcctcgggaaggtgtagaatcaccagcctggctccctgcggactcccggggctcacagaggccagagcagcaacagcacatgggaaacaacggggcgctggactggggaggtctcagagctctcctagtgatgacagcctcattttacccagggagaaagggcgagtaagctaaggtcacacagcaacaaagctgcacccagaccccagagccactctcctccctccctcctccaccagggccatgcccacttggggcaccccgccaccgtgttccagggacagctggagcacatgcttcttccctcgccaacccagcaattccgcagggcatctgacctccactgttgacttctacccagaggacaagaacatttttagttcccaaggaatgtacatcagccccacggaagctaggccacctctgggatggggttgctggtttagaacaaacgccagtcatcctatataaggacctgacagccaccaggcaccacctccgccaggaactgcaggcccacctgtctgcaacccagctgaggccatgccctccccagggaccgtctgcagcctcctgctcctcggcatgctctggctggacttggccatggcaggctccagcttcctgagccctgaacaccagagagtccagagaaaggagtcgaagaagccaccagccaagctgcagccccgagctctagcaggctggctccgcccggaagatggaggtcaagcagaaggggcagaggatgaactggaagtccggttcaacgccccctttgatgttggaatcaagctgtcaggggttcagtaccagcagcacagccaggccctggggaagtttcttcaggacatcctctgggaagaggccaaagaggccccagccgacaagtgatcgcccacaagccttactcacctctctctaagtttagaagcgctcatctggcttttcgcttgcttctgcagcaactcccacgactgttgtacaagctcaggaggcgaataaatgttcaaactgtaaaaaaaaaaaaaaaaaaaaaaaaa

SEQ ID NO: 4230 - DNA, 1602 bp, Homo sapiens
  source 1..1602: mol_type = genomic DNA
agtcgtggccccaggtaatttcctcccaggcctccatggggttatgtataaaggcccccctagagctgggccccaaaacagcccggagcctgcagcccagccccacccagacccatggctggacctgccacccagagccccatgaagctgatggccctgcagctgctgctgtggcacagtgcactctggacagtgcaggaagccacccccctgggccctgccagctccctgccccagagcttcctgctcaagtgcttagagcaagtgaggaagatccagggcgatggcgcagcgctccaggagaagctggtgagtgagtgtgccacctacaagctgtgccaccccgaggagctggtgctgctcggacactctctgggcatcccctgggctcccctgagcagctgccccagccaggccctgcagctggcaggctgcttgagccaactccatagcggccttttcctctaccaggggctcctgcaggccctggaagggatctcccccgagttgggtcccaccttggacacactgcagctggacgtcgccgactttgccaccaccatctggcagcagatggaagaactgggaatggcccctgccctgcagcccacccagggtgccatgccggccttcgcctctgctttccagcgccgggcaggaggggtcctggttgcctcccatctgcagagcttcctggaggtgtcgtaccgcgttctacgccaccttgcccagccctgagccaagccctccccatcccatgtatttatctctatttaatatttatgtctatttaagcctcatatttaaagacagggaagagcagaacggagccccaggcctctgtgtccttccctgcatttctgagtttcattctcctgcctgtagcagtgagaaaaagctcctgtcctcccatcccctggactgggaggtagataggtaaataccaagtatttattactatgactgctccccagccctggctctgcaatgggcactgggatgagccgctgtgagcccctggtcctgagggtccccacctgggacccttgagagtatcaggtctcccacgtgggagacaagaaatccctgtttaatatttaaacagcagtgttccccatctgggtccttgcacccctcactctggcctcagccgactgcacagcggcccctgcatccccttggctgtgaggcccctggacaagcagaggtggccagagctgggaggcatggccctggggtcccacgaatttgctggggaatctcgtttttcttcttaagacttttgggacatggtttgactcccgaacatcaccgacgcgtctcctgtttttctgggtggcctcgggacacctgccctgcccccacgagggtcaggactgtgactctttttagggccaggcaggtgcctggacatttgccttgctggacggggactggggatgtgggagggagcagacaggaggaatcatgtcaggcctgtgtgtgaaaggaagctccactgtcaccctccacctcttcaccccccactcaccagtgtcccctccactgtcacattgtaactgaacttcaggataataaagtgtttgcctccaaaaaaaaaaa

SEQ ID NO: 4231 - DNA, 1494 bp, Homo sapiens
  source 1..1494: mol_type = genomic DNA
agtcgtggccccaggtaatttcctcccaggcctccatggggttatgtataaaggcccccctagagctgggccccaaaacagcccggagcctgcagcccagccccacccagacccatggctggacctgccacccagagccccatgaagctgatggccctgcagctgctgctgtggcacagtgcactctggacagtgcaggaagccacccccctgggccctgccagctccctgccccagagcttcctgctcaagtgcttagagcaagtgaggaagatccagggcgatggcgcagcgctccaggagaagctggtgagtgaggcaggctgcttgagccaactccatagcggccttttcctctaccaggggctcctgcaggccctggaagggatctcccccgagttgggtcccaccttggacacactgcagctggacgtcgccgactttgccaccaccatctggcagcagatggaagaactgggaatggcccctgccctgcagcccacccagggtgccatgccggccttcgcctctgctttccagcgccgggcaggaggggtcctggttgcctcccatctgcagagcttcctggaggtgtcgtaccgcgttctacgccaccttgcccagccctgagccaagccctccccatcccatgtatttatctctatttaatatttatgtctatttaagcctcatatttaaagacagggaagagcagaacggagccccaggcctctgtgtccttccctgcatttctgagtttcattctcctgcctgtagcagtgagaaaaagctcctgtcctcccatcccctggactgggaggtagataggtaaataccaagtatttattactatgactgctccccagccctggctctgcaatgggcactgggatgagccgctgtgagcccctggtcctgagggtccccacctgggacccttgagagtatcaggtctcccacgtgggagacaagaaatccctgtttaatatttaaacagcagtgttccccatctgggtccttgcacccctcactctggcctcagccgactgcacagcggcccctgcatccccttggctgtgaggcccctggacaagcagaggtggccagagctgggaggcatggccctggggtcccacgaatttgctggggaatctcgtttttcttcttaagacttttgggacatggtttgactcccgaacatcaccgacgcgtctcctgtttttctgggtggcctcgggacacctgccctgcccccacgagggtcaggactgtgactctttttagggccaggcaggtgcctggacatttgccttgctggacggggactggggatgtgggagggagcagacaggaggaatcatgtcaggcctgtgtgtgaaaggaagctccactgtcaccctccacctcttcaccccccactcaccagtgtcccctccactgtcacattgtaactgaacttcaggataataaagtgtttgcctccaaaaaaaaaaa

SEQ ID NO: 4232 - DNA, 1593 bp, Homo sapiens
  source 1..1593: mol_type = genomic DNA
agtcgtggccccaggtaatttcctcccaggcctccatggggttatgtataaaggcccccctagagctgggccccaaaacagcccggagcctgcagcccagccccacccagacccatggctggacctgccacccagagccccatgaagctgatggccctgcagctgctgctgtggcacagtgcactctggacagtgcaggaagccacccccctgggccctgccagctccctgccccagagcttcctgctcaagtgcttagagcaagtgaggaagatccagggcgatggcgcagcgctccaggagaagctgtgtgccacctacaagctgtgccaccccgaggagctggtgctgctcggacactctctgggcatcccctgggctcccctgagcagctgccccagccaggccctgcagctggcaggctgcttgagccaactccatagcggccttttcctctaccaggggctcctgcaggccctggaagggatctcccccgagttgggtcccaccttggacacactgcagctggacgtcgccgactttgccaccaccatctggcagcagatggaagaactgggaatggcccctgccctgcagcccacccagggtgccatgccggccttcgcctctgctttccagcgccgggcaggaggggtcctggttgcctcccatctgcagagcttcctggaggtgtcgtaccgcgttctacgccaccttgcccagccctgagccaagccctccccatcccatgtatttatctctatttaatatttatgtctatttaagcctcatatttaaagacagggaagagcagaacggagccccaggcctctgtgtccttccctgcatttctgagtttcattctcctgcctgtagcagtgagaaaaagctcctgtcctcccatcccctggactgggaggtagataggtaaataccaagtatttattactatgactgctccccagccctggctctgcaatgggcactgggatgagccgctgtgagcccctggtcctgagggtccccacctgggacccttgagagtatcaggtctcccacgtgggagacaagaaatccctgtttaatatttaaacagcagtgttccccatctgggtccttgcacccctcactctggcctcagccgactgcacagcggcccctgcatccccttggctgtgaggcccctggacaagcagaggtggccagagctgggaggcatggccctggggtcccacgaatttgctggggaatctcgtttttcttcttaagacttttgggacatggtttgactcccgaacatcaccgacgcgtctcctgtttttctgggtggcctcgggacacctgccctgcccccacgagggtcaggactgtgactctttttagggccaggcaggtgcctggacatttgccttgctggacggggactggggatgtgggagggagcagacaggaggaatcatgtcaggcctgtgtgtgaaaggaagctccactgtcaccctccacctcttcaccccccactcaccagtgtcccctccactgtcacattgtaactgaacttcaggataataaagtgtttgcctccaaaaaaaaaaa

SEQ ID NO: 4233 - DNA, 4491 bp, Homo sapiens
  source 1..4491: mol_type = genomic DNA
acagatcaggagaacctcagtctgacgacattgaagctagccgaatgaagcgagcagctgcaaagcatctaatagaacgctactaccaccagttaactgagggctgtggaaatgaagcctgcacgaatgagttttgtgcttcctgtccaacttttcttcgtatggataataatgcagcagctattaaagccctcgagctttataagattaatgcaaaactctgtgatcctcatccctccaagaaaggagcaagctcagcttaccttgagaactcgaaaggtgcccccaacaactcctgctctgagataaaaatgaacaagaaaggcgctagaattgattttaaagatgtgacttacttaacagaagagaaggtatatgaaattcttgaattatgtagagaaagagaggattattcccctttaatccgtgttattggaagagttttttctagtgctgaggcattggtacagagcttccggaaagttaaacaacacaccaaggaagaactgaaatctcttcaagcaaaagatgaagacaaagatgaagatgaaaaggaaaaagctgcatgttctgctgctgctatggaagaagactcagaagcatcttcctcaaggataggtgatagctcacagggagacaacaatttgcaaaaattaggccctgatgatgtgtctgtggatattgatgccattagaagggtctacaccagattgctctctaatgaaaaaattgaaactgcctttctcaatgcacttgtatatttgtcacctaacgtggaatgtgacttgacgtatcacaatgtatactctcgagatcctaattatctgaatttgttcattatcgtaatggagaatagaaatctccacagtcctgaatatctggaaatggctttgccattattttgcaaagcgatgagcaagctaccccttgcagcccaaggaaaactgatcagactgtggtctaaatacaatgcagaccagattcggagaatgatggagacatttcagcaacttattacttataaagtcataagcaatgaatttaacagtcgaaatctagtgaatgatgatgatgccattgttgctgcttcgaagtgcttgaaaatggtttactatgcaaatgtagtgggaggggaagtggacacaaatcacaatgaagaagatgatgaagagcccatccctgagtccagcgagctgacacttcaggaacttttgggagaagaaagaagaaacaagaaaggtcctcgagtggaccccctggaaactgaacttggtgttaaaaccctggattgtcgaaaaccacttatcccttttgaagagtttattaatgaaccactgaatgaggttctagaaatggataaagattatacttttttcaaagtagaaacagagaacaaattctcttttatgacatgtccctttatattgaatgctgtcacaaagaatttgggattatattatgacaatagaattcgcatgtacagtgaacgaagaatcactgttctctacagcttagttcaaggacagcagttgaatccatatttgagactcaaagttagacgtgaccatatcatagatgatgcacttgtccggctagagatgatcgctatggaaaatcctgcagacttgaagaagcagttgtatgtggaatttgaaggagaacaaggagttgatgagggaggtgtttccaaagaattttttcagctggttgtggaggaaatcttcaatccagatattggtatgttcacatacgatgaatctacaaaattgttttggtttaatccatcttcttttgaaactgagggtcagtttactctgattggcatagtactgggtctggctatttacaataactgtatactggatgtacattttcccatggttgtctacaggaagctaatggggaaaaaaggaacttttcgtgacttgggagactctcacccagttctatatcagagtttaaaagatttattggagtatgaagggaatgtggaagatgacatgatgatcactttccagatatcacagacagatctttttggtaacccaatgatgtatgatctaaaggaaaatggtgataaaattccaattacaaatgaaaacaggaaggaatttgtcaatctttattctgactacattctcaataaatcagtagaaaaacagttcaaggcttttcggagaggttttcatatggtgaccaatgaatctcccttaaagtacttattcagaccagaagaaattgaattgcttatatgtggaagccggaatctagatttccaagcactagaagaaactacagaatatgacggtggctataccagggactctgttctgattagggagttctgggaaatcgttcattcatttacagatgaacagaaaagactcttcttgcagtttacaacgggcacagacagagcacctgtgggaggactaggaaaattaaagatgattatagccaaaaatggcccagacacagaaaggttacctacatctcatacttgctttaatgtgcttttacttccggaatactcaagcaaagaaaaacttaaagagagattgttgaaggccatcacgtatgccaaaggatttggcatgctgtaaaacaaaacaaaacaaaataaaacaaaaaaaaggaaggaaaaaaaaagaaaaaatttaaaaaattttaaaaatataacgagggataaatttttggtggtgatagtgtcccagtacaaaaaggctgtaagatagtcaaccacagtagtcacctatgtctgtgcctcccttctttattggggacatgtgggctggaacagcagatttcagctacatatatgaacaaatcctttattattattataattatttttttgcgtgaaagtgttacatattctttcacttgtatgtacagagaggtttttctgaatatttattttaagggttaaatcacttttgcttgtgtttattactgcttgaggttgagccttttgagtatttaaaaaatatataccaacagaactactctcccaaggaaaatattgccaccatttgtagaccacgtaaccttcaagtatgtgctacttttttgtccctgtatctaactcaaatcaggaactgtattttttttaatgatttgcttttgaaacttgaagtcttgaaaacagtgtgatgcaattactgctgttctagcccccaaagagttttctgtgcaaaatcttgagaatcaatcaataaagaaagatggaaggaagggagaaattggaatgttttaactgcagccctcagaactttagtaacagcacaacaaattaaaaacaaaaacaactcatgccacagtatgtcgtcttcatgtgtcttgcaatgaactgtttcagtagccaatcctctttcttagtatatgaaaggacagggatttttgttcttgttgttctcgttgttgttttaagtttactggggaaagtgcatttggccaaatgaaatggtagtcaagcctattgcaacaaagttaggaagtttgttgtttgtttattataaacaaaaagcatgtgaaagtgcacttaagatagagtttttattaattacttacttattacctagattttaaatagacaatccaaagtctccccttcgtgttgccatcatcttgttgaatcagccattttatcgaggcacgtgatcagtgttgcaacataatgaaaaagatggctactgtgccttgtgttacttaatcatacagtaagctgacctggaaatgaatgaaactattactcctaagaattacattgtatagccccacagattaaatttaattaattaattcaaaacatgttaaacgttactttcatgtactatggaaaagtacaagtaggtttacattactgatttccagaagtaagtagtttcccctttcctagtcttctgtgtatgtgatgttgttaatttcttttattgcattataaaataaaaggattatgtatttttaactaaggtgagacattgatatatccttttgctacaagctatagctaatgtgctgagcttgtgccttggtgattgattgattgattgactgattgttttaactgattactgtagatcaacctgatgatttgtttgtttgaaattggcaggaaaaatgcagctttcaaatcattggggggagaaaaaggatgtctttcaggattattttaattaatttttttcataattgagacagaactgtttgttatgtaccataatgctaaataaaactgtggcacttttcaccataatttaatttagtggaaaaagaagacaatgctttccatattgtgataaggtaacatggggtttttctgggccagcctttagaacactgttagggtacatacgctaccttgatgaaagggaccttcgtgcaactgtagtcatcttaaaggcttctcatccactgtgcttcttaatgtgtaattaaagtgaggagaaattaaatactctgagggcgttttatataataaattcgtgaaga

SEQ ID NO: 4234 - DNA, 5211 bp, Homo sapiens
  source 1..5211: mol_type = genomic DNA
agccagtcctcccgtcttgcgccgcggccgcgagatccgtgtgtctcccaagatggtggcgctgggctcggggtgactacaggagacgacggggccttttcccttcgccaggacccgacacaccaggcttcgctcgctcgcgcacccctccgccgcgtagccatccgccagcgcgggcgcccgccatccgccgcctacttacgcttcacctctgccgacccggcgcgctcggctgcgggcggcggcgcctccttcggctcctcctcggaatagctcgcggcctgtagcccctggcaggagggcccctcagccccccggtgtggacaggcagcggcggctggcgacgaacgccgggatttcggcggccccggcgctccctttcccggcctcgttttccggataaggaagcgcgggtcccgcatgagccccggcggtggcggcagcgaaagagaacgaggcggtggcgggcggaggcggcgggcgagggcgactacgaccagtgaggcggccgccgcagcccaggcgcgggggcgacgacaggttaaaaatctgtaagagcctgattttagaattcaccagctcctcagaagtttggcgaaatatgagttattaagcctacgctcagatcaaggtagcagctagactggtgtgacaacctgtttttaatcagtgactcaaagctgtgatcaccctgatgtcaccgaatggccacagcttgtaaaagatcaggagaacctcagtctgacgacattgaagctagccgaatgaagcgagcagctgcaaagcatctaatagaacgctactaccaccagttaactgagggctgtggaaatgaagcctgcacgaatgagttttgtgcttcctgtccaacttttcttcgtatggataataatgcagcagctattaaagccctcgagctttataagattaatgcaaaactctgtgatcctcatccctccaagaaaggagcaagctcagcttaccttgagaactcgaaaggtgcccccaacaactcctgctctgagataaaaatgaacaagaaaggcgctagaattgattttaaagatgtgacttacttaacagaagagaaggtatatgaaattcttgaattatgtagagaaagagaggattattcccctttaatccgtgttattggaagagttttttctagtgctgaggcattggtacagagcttccggaaagttaaacaacacaccaaggaagaactgaaatctcttcaagcaaaagatgaagacaaagatgaagatgaaaaggaaaaagctgcatgttctgctgctgctatggaagaagactcagaagcatcttcctcaaggataggtgatagctcacagggagacaacaatttgcaaaaattaggccctgatgatgtgtctgtggatattgatgccattagaagggtctacaccagattgctctctaatgaaaaaattgaaactgcctttctcaatgcacttgtatatttgtcacctaacgtggaatgtgacttgacgtatcacaatgtatactctcgagatcctaattatctgaatttgttcattatcgtaatggagaatagaaatctccacagtcctgaatatctggaaatggctttgccattattttgcaaagcgatgagcaagctaccccttgcagcccaaggaaaactgatcagactgtggtctaaatacaatgcagaccagattcggagaatgatggagacatttcagcaacttattacttataaagtcataagcaatgaatttaacagtcgaaatctagtgaatgatgatgatgccattgttgctgcttcgaagtgcttgaaaatggtttactatgcaaatgtagtgggaggggaagtggacacaaatcacaatgaagaagatgatgaagagcccatccctgagtccagcgagctgacacttcaggaacttttgggagaagaaagaagaaacaagaaaggtcctcgagtggaccccctggaaactgaacttggtgttaaaaccctggattgtcgaaaaccacttatcccttttgaagagtttattaatgaaccactgaatgaggttctagaaatggataaagattatacttttttcaaagtagaaacagagaacaaattctcttttatgacatgtccctttatattgaatgctgtcacaaagaatttgggattatattatgacaatagaattcgcatgtacagtgaacgaagaatcactgttctctacagcttagttcaaggacagcagttgaatccatatttgagactcaaagttagacgtgaccatatcatagatgatgcacttgtccggctagagatgatcgctatggaaaatcctgcagacttgaagaagcagttgtatgtggaatttgaaggagaacaaggagttgatgagggaggtgtttccaaagaattttttcagctggttgtggaggaaatcttcaatccagatattggtatgttcacatacgatgaatctacaaaattgttttggtttaatccatcttcttttgaaactgagggtcagtttactctgattggcatagtactgggtctggctatttacaataactgtatactggatgtacattttcccatggttgtctacaggaagctaatggggaaaaaaggaacttttcgtgacttgggagactctcacccagttctatatcagagtttaaaagatttattggagtatgaagggaatgtggaagatgacatgatgatcactttccagatatcacagacagatctttttggtaacccaatgatgtatgatctaaaggaaaatggtgataaaattccaattacaaatgaaaacaggaaggaatttgtcaatctttattctgactacattctcaataaatcagtagaaaaacagttcaaggcttttcggagaggttttcatatggtgaccaatgaatctcccttaaagtacttattcagaccagaagaaattgaattgcttatatgtggaagccggaatctagatttccaagcactagaagaaactacagaatatgacggtggctataccagggactctgttctgattagggagttctgggaaatcgttcattcatttacagatgaacagaaaagactcttcttgcagtttacaacgggcacagacagagcacctgtgggaggactaggaaaattaaagatgattatagccaaaaatggcccagacacagaaaggttacctacatctcatacttgctttaatgtgcttttacttccggaatactcaagcaaagaaaaacttaaagagagattgttgaaggccatcacgtatgccaaaggatttggcatgctgtaaaacaaaacaaaacaaaataaaacaaaaaaaaggaaggaaaaaaaaagaaaaaatttaaaaaattttaaaaatataacgagggataaatttttggtggtgatagtgtcccagtacaaaaaggctgtaagatagtcaaccacagtagtcacctatgtctgtgcctcccttctttattggggacatgtgggctggaacagcagatttcagctacatatatgaacaaatcctttattattattataattatttttttgcgtgaaagtgttacatattctttcacttgtatgtacagagaggtttttctgaatatttattttaagggttaaatcacttttgcttgtgtttattactgcttgaggttgagccttttgagtatttaaaaaatatataccaacagaactactctcccaaggaaaatattgccaccatttgtagaccacgtaaccttcaagtatgtgctacttttttgtccctgtatctaactcaaatcaggaactgtattttttttaatgatttgcttttgaaacttgaagtcttgaaaacagtgtgatgcaattactgctgttctagcccccaaagagttttctgtgcaaaatcttgagaatcaatcaataaagaaagatggaaggaagggagaaattggaatgttttaactgcagccctcagaactttagtaacagcacaacaaattaaaaacaaaaacaactcatgccacagtatgtcgtcttcatgtgtcttgcaatgaactgtttcagtagccaatcctctttcttagtatatgaaaggacagggatttttgttcttgttgttctcgttgttgttttaagtttactggggaaagtgcatttggccaaatgaaatggtagtcaagcctattgcaacaaagttaggaagtttgttgtttgtttattataaacaaaaagcatgtgaaagtgcacttaagatagagtttttattaattacttacttattacctagattttaaatagacaatccaaagtctccccttcgtgttgccatcatcttgttgaatcagccattttatcgaggcacgtgatcagtgttgcaacataatgaaaaagatggctactgtgccttgtgttacttaatcatacagtaagctgacctggaaatgaatgaaactattactcctaagaattacattgtatagccccacagattaaatttaattaattaattcaaaacatgttaaacgttactttcatgtactatggaaaagtacaagtaggtttacattactgatttccagaagtaagtagtttcccctttcctagtcttctgtgtatgtgatgttgttaatttcttttattgcattataaaataaaaggattatgtatttttaactaaggtgagacattgatatatccttttgctacaagctatagctaatgtgctgagcttgtgccttggtgattgattgattgattgactgattgttttaactgattactgtagatcaacctgatgatttgtttgtttgaaattggcaggaaaaatgcagctttcaaatcattggggggagaaaaaggatgtctttcaggattattttaattaatttttttcataattgagacagaactgtttgttatgtaccataatgctaaataaaactgtggcacttttcaccataatttaatttagtggaaaaagaagacaatgctttccatattgtgataaggtaacatggggtttttctgggccagcctttagaacactgttagggtacatacgctaccttgatgaaagggaccttcgtgcaactgtagtcatcttaaaggcttctcatccactgtgcttcttaatgtgtaattaaagtgaggagaaattaaatactctgagggcgttttatataataaattcgtgaaga

SEQ ID NO: 4235 - DNA, 5276 bp, Homo sapiens
  source 1..5276: mol_type = genomic DNA
agccagtcctcccgtcttgcgccgcggccgcgagatccgtgtgtctcccaagatggtggcgctgggctcggggtgactacaggagacgacggggccttttcccttcgccaggacccgacacaccaggcttcgctcgctcgcgcacccctccgccgcgtagccatccgccagcgcgggcgcccgccatccgccgcctacttacgcttcacctctgccgacccggcgcgctcggctgcgggcggcggcgcctccttcggctcctcctcggaatagctcgcggcctgtagcccctggcaggagggcccctcagccccccggtgtggacaggcagcggcggctggcgacgaacgccgggatttcggcggccccggcgctccctttcccggcctcgttttccggataaggaagcgcgggtcccgcatgagccccggcggtggcggcagcgaaagagaacgaggcggtggcgggcggaggcggcgggcgagggcgactacgaccagtgaggcggccgccgcagcccaggcgcgggggcgacgacaggttaaaaatctgtaagagcctgattttagaattcaccagctcctcagaagtttggcgaaatatgagttattaagcctacgctcagatcaaggtagcagctagactggtgtgacaacctgtttttaatcagtgactcaaagctgtgatcaccctgatgtcaccgaatggccacagcttgtaaaagagagttacagtggaggtaaaaggagtggcttgcaggatggagaagctgcaccagtgttattggaaatcaggagaacctcagtctgacgacattgaagctagccgaatgaagcgagcagctgcaaagcatctaatagaacgctactaccaccagttaactgagggctgtggaaatgaagcctgcacgaatgagttttgtgcttcctgtccaacttttcttcgtatggataataatgcagcagctattaaagccctcgagctttataagattaatgcaaaactctgtgatcctcatccctccaagaaaggagcaagctcagcttaccttgagaactcgaaaggtgcccccaacaactcctgctctgagataaaaatgaacaagaaaggcgctagaattgattttaaagatgtgacttacttaacagaagagaaggtatatgaaattcttgaattatgtagagaaagagaggattattcccctttaatccgtgttattggaagagttttttctagtgctgaggcattggtacagagcttccggaaagttaaacaacacaccaaggaagaactgaaatctcttcaagcaaaagatgaagacaaagatgaagatgaaaaggaaaaagctgcatgttctgctgctgctatggaagaagactcagaagcatcttcctcaaggataggtgatagctcacagggagacaacaatttgcaaaaattaggccctgatgatgtgtctgtggatattgatgccattagaagggtctacaccagattgctctctaatgaaaaaattgaaactgcctttctcaatgcacttgtatatttgtcacctaacgtggaatgtgacttgacgtatcacaatgtatactctcgagatcctaattatctgaatttgttcattatcgtaatggagaatagaaatctccacagtcctgaatatctggaaatggctttgccattattttgcaaagcgatgagcaagctaccccttgcagcccaaggaaaactgatcagactgtggtctaaatacaatgcagaccagattcggagaatgatggagacatttcagcaacttattacttataaagtcataagcaatgaatttaacagtcgaaatctagtgaatgatgatgatgccattgttgctgcttcgaagtgcttgaaaatggtttactatgcaaatgtagtgggaggggaagtggacacaaatcacaatgaagaagatgatgaagagcccatccctgagtccagcgagctgacacttcaggaacttttgggagaagaaagaagaaacaagaaaggtcctcgagtggaccccctggaaactgaacttggtgttaaaaccctggattgtcgaaaaccacttatcccttttgaagagtttattaatgaaccactgaatgaggttctagaaatggataaagattatacttttttcaaagtagaaacagagaacaaattctcttttatgacatgtccctttatattgaatgctgtcacaaagaatttgggattatattatgacaatagaattcgcatgtacagtgaacgaagaatcactgttctctacagcttagttcaaggacagcagttgaatccatatttgagactcaaagttagacgtgaccatatcatagatgatgcacttgtccggctagagatgatcgctatggaaaatcctgcagacttgaagaagcagttgtatgtggaatttgaaggagaacaaggagttgatgagggaggtgtttccaaagaattttttcagctggttgtggaggaaatcttcaatccagatattggtatgttcacatacgatgaatctacaaaattgttttggtttaatccatcttcttttgaaactgagggtcagtttactctgattggcatagtactgggtctggctatttacaataactgtatactggatgtacattttcccatggttgtctacaggaagctaatggggaaaaaaggaacttttcgtgacttgggagactctcacccagttctatatcagagtttaaaagatttattggagtatgaagggaatgtggaagatgacatgatgatcactttccagatatcacagacagatctttttggtaacccaatgatgtatgatctaaaggaaaatggtgataaaattccaattacaaatgaaaacaggaaggaatttgtcaatctttattctgactacattctcaataaatcagtagaaaaacagttcaaggcttttcggagaggttttcatatggtgaccaatgaatctcccttaaagtacttattcagaccagaagaaattgaattgcttatatgtggaagccggaatctagatttccaagcactagaagaaactacagaatatgacggtggctataccagggactctgttctgattagggagttctgggaaatcgttcattcatttacagatgaacagaaaagactcttcttgcagtttacaacgggcacagacagagcacctgtgggaggactaggaaaattaaagatgattatagccaaaaatggcccagacacagaaaggttacctacatctcatacttgctttaatgtgcttttacttccggaatactcaagcaaagaaaaacttaaagagagattgttgaaggccatcacgtatgccaaaggatttggcatgctgtaaaacaaaacaaaacaaaataaaacaaaaaaaaggaaggaaaaaaaaagaaaaaatttaaaaaattttaaaaatataacgagggataaatttttggtggtgatagtgtcccagtacaaaaaggctgtaagatagtcaaccacagtagtcacctatgtctgtgcctcccttctttattggggacatgtgggctggaacagcagatttcagctacatatatgaacaaatcctttattattattataattatttttttgcgtgaaagtgttacatattctttcacttgtatgtacagagaggtttttctgaatatttattttaagggttaaatcacttttgcttgtgtttattactgcttgaggttgagccttttgagtatttaaaaaatatataccaacagaactactctcccaaggaaaatattgccaccatttgtagaccacgtaaccttcaagtatgtgctacttttttgtccctgtatctaactcaaatcaggaactgtattttttttaatgatttgcttttgaaacttgaagtcttgaaaacagtgtgatgcaattactgctgttctagcccccaaagagttttctgtgcaaaatcttgagaatcaatcaataaagaaagatggaaggaagggagaaattggaatgttttaactgcagccctcagaactttagtaacagcacaacaaattaaaaacaaaaacaactcatgccacagtatgtcgtcttcatgtgtcttgcaatgaactgtttcagtagccaatcctctttcttagtatatgaaaggacagggatttttgttcttgttgttctcgttgttgttttaagtttactggggaaagtgcatttggccaaatgaaatggtagtcaagcctattgcaacaaagttaggaagtttgttgtttgtttattataaacaaaaagcatgtgaaagtgcacttaagatagagtttttattaattacttacttattacctagattttaaatagacaatccaaagtctccccttcgtgttgccatcatcttgttgaatcagccattttatcgaggcacgtgatcagtgttgcaacataatgaaaaagatggctactgtgccttgtgttacttaatcatacagtaagctgacctggaaatgaatgaaactattactcctaagaattacattgtatagccccacagattaaatttaattaattaattcaaaacatgttaaacgttactttcatgtactatggaaaagtacaagtaggtttacattactgatttccagaagtaagtagtttcccctttcctagtcttctgtgtatgtgatgttgttaatttcttttattgcattataaaataaaaggattatgtatttttaactaaggtgagacattgatatatccttttgctacaagctatagctaatgtgctgagcttgtgccttggtgattgattgattgattgactgattgttttaactgattactgtagatcaacctgatgatttgtttgtttgaaattggcaggaaaaatgcagctttcaaatcattggggggagaaaaaggatgtctttcaggattattttaattaatttttttcataattgagacagaactgtttgttatgtaccataatgctaaataaaactgtggcacttttcaccataatttaatttagtggaaaaagaagacaatgctttccatattgtgataaggtaacatggggtttttctgggccagcctttagaacactgttagggtacatacgctaccttgatgaaagggaccttcgtgcaactgtagtcatcttaaaggcttctcatccactgtgcttcttaatgtgtaattaaagtgaggagaaattaaatactctgagggcgttttatataataaattcgtgaaga

SEQ ID NO: 4236 - DNA, 3697 bp, Homo sapiens
  source 1..3697: mol_type = genomic DNA
gccaggctgcggagcggacggacgcgcctggtgccccggggaggggcgccaccgggggaggaggaggaggagaaggtggagaggaagagacgccccctctgcccgagacctctcaaggccctgacctcaggggccagggcactgacaggacaggagagccaagttcctccacttgggctgcccgaagaggccgcgaccctggagggccctgagcccaccgcaccaggggccccagcaccaccccgggggcctaaagcgacagtctcaggggccatcgcaaggtttccagttgcctagacaacaggcccagggtcagagcaacaatccttccagccacctgcctcaactgctgccccaggcaccagccccagtccctacgcggcagccagcccaggtgacatgccggtgctctccaggccccggccctggcgggggaacacgctgaagcgcacggccgtgctcctggccctcgcggcctatggagcccacaaagtctaccccttggtgcgccagtgcctggccccggccaggggtcttcaggcgcccgccggggagcccacgcaggaggcctccggggtcgcggcggccaaagctggcatgaaccgggtattcctgcagcggctcctgtggctcctgcggctgctgttcccccgggtcctgtgccgggagacggggctgctggccctgcactcggccgccttggtgagccgcaccttcctgtcggtgtatgtggcccgcctggacggaaggctggcccgctgcatcgtccgcaaggacccgcgggcttttggctggcagctgctgcagtggctcctcatcgccctccctgctaccttcgtcaacagtgccatccgttacctggagggccaactggccctgtcgttccgcagccgtctggtggcccacgcctaccgcctctacttctcccagcagacctactaccgggtcagcaacatggacgggcggcttcgcaaccctgaccagtctctgacggaggacgtggtggcctttgcggcctctgtggcccacctctactccaacctgaccaagccactcctggacgtggctgtgacttcctacaccctgcttcgggcggcccgctcccgtggagccggcacagcctggccctcggccatcgccggcctcgtggtgttcctcacggccaacgtgctgcgggccttctcgcccaagttcggggagctggtggcagaggaggcgcggcggaagggggagctgcgctacatgcactcgcgtgtggtggccaactcggaggagatcgccttctatgggggccatgaggtggagctggccctgctacagcgctcctaccaggacctggcctcgcagatcaacctcatccttctggaacgcctgtggtatgttatgctggagcagttcctcatgaagtatgtgtggagcgcctcgggcctgctcatggtggctgtccccatcatcactgccactggctactcagagtcagatgcagaggccgtgaagaaggcagccttggaaaagaaggaggaggagctggtgagcgagcgcacagaagccttcactattgcccgcaacctcctgacagcggctgcagatgccattgagcggatcatgtcgtcgtacaaggaggtgacggagctggctggctacacagcccgggtgcacgagatgttccaggtatttgaagatgttcagcgctgtcacttcaagaggcccagggagctagaggacgctcaggcggggtctgggaccataggccggtctggtgtccgtgtggagggccccctgaagatccgaggccaggtggtggatgtggaacaggggatcatctgcgagaacatccccatcgtcacgccctcaggagaggtggtggtggccagcctcaacatcagggtggaggaaggcatgcatctgctcatcacaggccccaatggctgcggcaagagctccctgttccggatcctgggtgggctctggcccacgtacggtggtgtgctctacaagcccccaccccagcgcatgttctacatcccgcagaggccctacatgtctgtgggctccctgcgtgaccaggtgatctacccggactcagtggaggacatgcaaaggaagggctactcggagcaggacctggaagccatcctggacgtcgtgcacctgcaccacatcctgcagcgggagggaggttgggaggctatgtgtgactggaaggacgtcctgtcgggtggcgagaagcagagaatcggcatggcccgcatgttctaccacaggcccaagtacgccctcctggatgaatgcaccagcgccgtgagcatcgacgtggaaggcaagatcttccaggcggccaaggacgcgggcattgccctgctctccatcacccaccggccctccctgtggaaataccacacacacttgctacagttcgatggggagggcggctggaagttcgagaagctggactcagctgcccgcctgagcctgacggaggagaagcagcggctggagcagcagctggcgggcattcccaagatgcagcggcgcctccaggagctctgccagatcctgggcgaggccgtggccccagcgcatgtgccggcacctagcccgcaaggccctggtggcctccagggtgcctccacctgacacaaccgtccccggcccctgccccgcccccaagctcggatcacatgaaggagacagcagcacccacccatgcacgcaccccgcccctgcatgcctggcccctcctcctagaaaacccttcccgccctcgggaaagtagatgtggagggtggcgccctgcgtaaccctcgccctgtccctcccactccctgggggcgctgttccacagtgactgggccctgtccagggcagtgagtcctctactttgctccgtggaggaagctggggtacaaggggcccagtgctggccacacagcagcgcagccgagccccaggagcccgtcaggccacagcccctggcactgcaggtggcctccctccagagactcgagtccccatgattccctcctcgtcagtctctcaaagaccccatggtccatcccctgagggtggtcagccaaggctcccgttccgtgggatgccataaaagccgcccagtgggacccacagtcacacagagcgcctcacctgcatcctctcccccacaagagccccaaagatcccacgggagaggggagagggacgcacagcactgcctgccaagcgagaatgcaggccccgccccctcggcccctcaccacctctttctacagcctaatttattggattccctattcgtagccatctccgtggccaatgtgactaccgtgccagcagcgggggcggcccagcctctgagtcccgtggggccccggctcccaccggtgccaaacccagcccctgcggccgtcaccccgccagcctacactgccagccgccaccggggcacacgggcctctgcttgccagccaggagtgcggacaccatgttcccagctcagtgccaaagaggggtcaccagggggagctgtctgcggagccagcgcctgcccgagagagaccccaccgccaccgtgtgcctttcccgggccctcagccctcgggccgggcaccacccccagtccccccagtaaaagcctccactggcaaatgcagtccttcctccctgcaaaaaaaaaaaaaaaaaaaaaaaaaaaaaaaaa

SEQ ID NO: 4237 - DNA, 2058 bp, Homo sapiens
  source 1..2058: mol_type = genomic DNA
aagatgctccgtggaagggagccgagcggtgggcagaggctgagtccccgataacgagcgcctcacatttccgtggcattcccatttgctagtgcgctgctgcggccgcacgcctgattgatatatgactgcaatggcacttttccatttgacattctctctctctctctccctctctctctctccctctctctctccctctctctctctccctgtgtcgcttaaacaacagtcctaacttttgtgtgttgcaaatataaaaggcaagccatgtgacagagggacagaagaacaaaagcatttggaagtaacaggacctctttctagctctcagaaaagtctgagaagaaaggagccctgcgttcccctaagctgtgcagcagatactgtgatgatggattgcaagtgcaaagagtaagacaaaactccagcacataaaggacaatgacaaccagaaagcttcagcccgatcctgccctttccttgaacgggactggatcctaggaggtgaagccatttccaattttttgtcctctgcctccctctgctgttcttctagagaagtttttccttacaacaatgagaaaacatgtactagctgcatccttttctatgctctccctgctggtgataatgggagatacagacagtaaaacggacagctcattcataatggactcggaccctcgacgctgcatgaggcaccactatgtggattctatcagtcacccattgtacaagtgtagctcaaagatggtgctcctggccaggtgcgaggggcactgcagccaggcgtcacgctccgagcctttggtgtcgttcagcactgtcctcaagcaacccttccgttcctcctgtcactgctgccggccccagacttccaagctgaaggcactgcggctgcgatgctcagggggcatgcgactcactgccacctaccggtacatcctctcctgtcactgcgaggaatgcaattcctgaggcccgctgctgtgtgtggcttctggatgggacaactgtagaggcagttcgaccagccagggaaagactggcaagaaaagagttaaggcaaaaaaggatgcaacaattctcccgggactctgcatattctagtaataaagactctacatgcttgttgacagagagagatactctgggaacttctttgcagttcccatctcctttctctggtacaatttcttttggttcattttcagattcaggcattttcccccttggctctcaatgctgtttgggtttccaacaattcagcattagtgggaaaaagtgggccctcatacacaagcgtgtcaggctgtcagtgtttggtgcacgctggggaagaatttactttggaaagtagaaaagcccagcttttcctgggacatcttctgttattgttgatgtttttttttaccttgtcattttggtctaaggttgccattgctgctaaaggttaccgatttcaaagtccagataccaagcatgtggatatgtttagctacgtttactcacagccagcgaactgacattaaaataactaacaaacagattcttttatgtgatgctggaactcttgacagctataattattattcagaaatgactttttgaaagtaaaagcagcataaagaatttgtcacaggaaggctgtctcagataaattatggtaaaattttgtaagggagcagacttttaaagacttgcacaaatacggatcctgcactgactctggaaaaggcatatatgtactagtggcatggagaatgcaccatactcatgcatgcaaattagacaaccaagtatgaatctatttgtgggtgtgctatagctttagccgtgtcacgggcatcattctctaatatccacttgtccatgtgaaacatgttgccaaaatggtggcctggcttgtcttctgaacgtttggttcaaatgtgttttggtcctggaggctcaaattttgagttattcccacgttttgaaataaaaagagtatattcaaaaaaaaaaaaaaaaaaaaaaaaaaaaaaaaaaaaaaaaaaaaaaaaaaaaaaaaaa

SEQ ID NO: 4238 - DNA, 1910 bp, Homo sapiens
  source 1..1910: mol_type = genomic DNA
cggacctccacactgagccatgcccacccccgacgccaccacgccacaggccaagggcttccgcagggccgtgtctgagctggacgccaagcaggcagaggccatcatggtaagagggcagggcgccccggggcccagcctcacaggctctccgtggcctggaactgcagccccagctgcatcctacacccccaccccaaggtccccgcggttcattgggcgcaggcagagcctcatcgaggacgcccgcaaggagcgggaggcggcggtggcagcagcggccgctgcagtcccctcggagcccggggaccccctggaggctgtggcctttgaggagaaggaggggaaggccgtgctaaacctgctcttctccccgagggccaccaagccctcggcgctgtcccgagctgtgaaggtgtttgagacgtttgaagccaaaatccaccatctagagacccggcccgcccagaggccgcgagctgggggcccccacctggagtacttcgtgcgcctcgaggtgcgccgaggggacctggccgccctgctcagtggtgtgcgccaggtgtcagaggacgtgcgcagccccgcggggcccaaggtcccctggttcccaagaaaagtgtcagagctggacaagtgtcatcacctggtcaccaagttcgaccctgacctggacttggaccacccgggcttctcggaccaggtgtaccgccagcgcaggaagctgattgctgagatcgccttccagtacaggcacggcgacccgattccccgtgtggagtacaccgccgaggagattgccacctggaaggaggtctacaccacgctgaagggcctctacgccacgcacgcctgcggggagcacctggaggcctttgctttgctggagcgcttcagcggctaccgggaagacaatatcccccagctggaggacgtctcccgcttcctgaaggagcgcacgggcttccagctgcggcctgtggccggcctgctgtccgcccgggacttcctggccagcctggccttccgcgtgttccagtgcacccagtatatccgccacgcgtcctcgcccatgcactcccctgagccggactgctgccacgagctgctggggcacgtgcccatgctggccgaccgcaccttcgcgcagttctcgcaggacattggcctggcgtccctgggggcctcggatgaggaaattgagaagctgtccacgctgtactggttcacggtggagttcgggctgtgtaagcagaacggggaggtgaaggcctatggtgccgggctgctgtcctcctacggggagctcctgcactgcctgtctgaggagcctgagattcgggccttcgaccctgaggctgcggccgtgcagccctaccaagaccagacgtaccagtcagtctacttcgtgtctgagagcttcagtgacgccaaggacaagctcaggagctatgcctcacgcatccagcgccccttctccgtgaagttcgacccgtacacgctggccatcgacgtgctggacagcccccaggccgtgcggcgctccctggagggtgtccaggatgagctggacacccttgcccatgcgctgagtgccattggctaggtgcacggcgtccctgagggcccttcccaacctcccctggtcctgcactgtcccggagctcaggccctggtgaggggctgggtcccgggtgccccccatgccctccctgctgccaggctcccactgcccctgcacctgcttctcagcgcaacagctgtgtgtgcccgtggtgaggttgtgctgcctgtggtgaggtcctgtcctggctcccagggtcctgggggctgctgcactgccctccgcccttccctgacactgtctgctgccccaatcaccgtcacaataaaagaaactgtggtctcta

SEQ ID NO: 4239 - DNA, 1898 bp, Homo sapiens
  source 1..1898: mol_type = genomic DNA
cggacctccacactgagccatgcccacccccgacgccaccacgccacaggccaagggcttccgcagggccgtgtctgagctggacgccaagcaggcagaggccatcatgggcgccccggggcccagcctcacaggctctccgtggcctggaactgcagccccagctgcatcctacacccccaccccaaggtccccgcggttcattgggcgcaggcagagcctcatcgaggacgcccgcaaggagcgggaggcggcggtggcagcagcggccgctgcagtcccctcggagcccggggaccccctggaggctgtggcctttgaggagaaggaggggaaggccgtgctaaacctgctcttctccccgagggccaccaagccctcggcgctgtcccgagctgtgaaggtgtttgagacgtttgaagccaaaatccaccatctagagacccggcccgcccagaggccgcgagctgggggcccccacctggagtacttcgtgcgcctcgaggtgcgccgaggggacctggccgccctgctcagtggtgtgcgccaggtgtcagaggacgtgcgcagccccgcggggcccaaggtcccctggttcccaagaaaagtgtcagagctggacaagtgtcatcacctggtcaccaagttcgaccctgacctggacttggaccacccgggcttctcggaccaggtgtaccgccagcgcaggaagctgattgctgagatcgccttccagtacaggcacggcgacccgattccccgtgtggagtacaccgccgaggagattgccacctggaaggaggtctacaccacgctgaagggcctctacgccacgcacgcctgcggggagcacctggaggcctttgctttgctggagcgcttcagcggctaccgggaagacaatatcccccagctggaggacgtctcccgcttcctgaaggagcgcacgggcttccagctgcggcctgtggccggcctgctgtccgcccgggacttcctggccagcctggccttccgcgtgttccagtgcacccagtatatccgccacgcgtcctcgcccatgcactcccctgagccggactgctgccacgagctgctggggcacgtgcccatgctggccgaccgcaccttcgcgcagttctcgcaggacattggcctggcgtccctgggggcctcggatgaggaaattgagaagctgtccacgctgtactggttcacggtggagttcgggctgtgtaagcagaacggggaggtgaaggcctatggtgccgggctgctgtcctcctacggggagctcctgcactgcctgtctgaggagcctgagattcgggccttcgaccctgaggctgcggccgtgcagccctaccaagaccagacgtaccagtcagtctacttcgtgtctgagagcttcagtgacgccaaggacaagctcaggagctatgcctcacgcatccagcgccccttctccgtgaagttcgacccgtacacgctggccatcgacgtgctggacagcccccaggccgtgcggcgctccctggagggtgtccaggatgagctggacacccttgcccatgcgctgagtgccattggctaggtgcacggcgtccctgagggcccttcccaacctcccctggtcctgcactgtcccggagctcaggccctggtgaggggctgggtcccgggtgccccccatgccctccctgctgccaggctcccactgcccctgcacctgcttctcagcgcaacagctgtgtgtgcccgtggtgaggttgtgctgcctgtggtgaggtcctgtcctggctcccagggtcctgggggctgctgcactgccctccgcccttccctgacactgtctgctgccccaatcaccgtcacaataaaagaaactgtggtctcta

SEQ ID NO: 4240 - DNA, 1817 bp, Homo sapiens
  source 1..1817: mol_type = genomic DNA
cggacctccacactgagccatgcccacccccgacgccaccacgccacaggccaagggcttccgcagggccgtgtctgagctggacgccaagcaggcagaggccatcatgtccccgcggttcattgggcgcaggcagagcctcatcgaggacgcccgcaaggagcgggaggcggcggtggcagcagcggccgctgcagtcccctcggagcccggggaccccctggaggctgtggcctttgaggagaaggaggggaaggccgtgctaaacctgctcttctccccgagggccaccaagccctcggcgctgtcccgagctgtgaaggtgtttgagacgtttgaagccaaaatccaccatctagagacccggcccgcccagaggccgcgagctgggggcccccacctggagtacttcgtgcgcctcgaggtgcgccgaggggacctggccgccctgctcagtggtgtgcgccaggtgtcagaggacgtgcgcagccccgcggggcccaaggtcccctggttcccaagaaaagtgtcagagctggacaagtgtcatcacctggtcaccaagttcgaccctgacctggacttggaccacccgggcttctcggaccaggtgtaccgccagcgcaggaagctgattgctgagatcgccttccagtacaggcacggcgacccgattccccgtgtggagtacaccgccgaggagattgccacctggaaggaggtctacaccacgctgaagggcctctacgccacgcacgcctgcggggagcacctggaggcctttgctttgctggagcgcttcagcggctaccgggaagacaatatcccccagctggaggacgtctcccgcttcctgaaggagcgcacgggcttccagctgcggcctgtggccggcctgctgtccgcccgggacttcctggccagcctggccttccgcgtgttccagtgcacccagtatatccgccacgcgtcctcgcccatgcactcccctgagccggactgctgccacgagctgctggggcacgtgcccatgctggccgaccgcaccttcgcgcagttctcgcaggacattggcctggcgtccctgggggcctcggatgaggaaattgagaagctgtccacgctgtactggttcacggtggagttcgggctgtgtaagcagaacggggaggtgaaggcctatggtgccgggctgctgtcctcctacggggagctcctgcactgcctgtctgaggagcctgagattcgggccttcgaccctgaggctgcggccgtgcagccctaccaagaccagacgtaccagtcagtctacttcgtgtctgagagcttcagtgacgccaaggacaagctcaggagctatgcctcacgcatccagcgccccttctccgtgaagttcgacccgtacacgctggccatcgacgtgctggacagcccccaggccgtgcggcgctccctggagggtgtccaggatgagctggacacccttgcccatgcgctgagtgccattggctaggtgcacggcgtccctgagggcccttcccaacctcccctggtcctgcactgtcccggagctcaggccctggtgaggggctgggtcccgggtgccccccatgccctccctgctgccaggctcccactgcccctgcacctgcttctcagcgcaacagctgtgtgtgcccgtggtgaggttgtgctgcctgtggtgaggtcctgtcctggctcccagggtcctgggggctgctgcactgccctccgcccttccctgacactgtctgctgccccaatcaccgtcacaataaaagaaactgtggtctcta

SEQ ID NO: 4241 - DNA, 2941 bp, Homo sapiens
  source 1..2941: mol_type = genomic DNA
cctgtggccgctcccggctcggagtgtgatctaagcaggttgcgtaccttcctcaggtgactccggccacagcccattgtccgcggccaccggcggagtttagccgcagacctcgaagcgccccggggtccttcccgaacggcagcggctgcggcgggtccatggagaagggccctgtgcgggcaccggcggagaagccgcggggcgccaggtgcagcaatgggttccccgagcgggatccgccgcggcccgggcccagcaggccggcggagaagcccccgcggcccgaggccaagagcgcgcagcccgcggacggctggaagggcgagcggccccgcagcgaggaggataacgagctgaacctccctaacctggcagccgcctactcgtccatcctgagctcgctgggcgagaacccccagcggcaagggctgctcaagacgccctggagggcggcctcggccatgcagttcttcaccaagggctaccaggagaccatctcagatgtcctaaacgatgctatatttgatgaagatcatgatgagatggtgattgtgaaggacatagacatgttttccatgtgtgagcatcacttggttccatttgttggaaaggtccatattggttatcttcctaacaagcaagtccttggcctcagcaaacttgcgaggattgtagaaatctatagtagaagactacaagttcaggagcgccttacaaaacaaattgctgtagcaatcacggaagccttgcggcctgctggagtcggggtagtggttgaagcaacacacatgtgtatggtaatgcgaggtgtacagaaaatgaacagcaaaactgtgaccagcacaatgttgggtgtgttccgggaggatccaaagactcgggaagagttcctgactctcattaggagctgagcttcattcagtgtgtgtgcgttggttgccgatcgtactgccagtagcattgtctgtctgtccggtcttgtttgtacattccattttcaattgttacagatgtgaactttattccttgtcactaattatatttaaaattatttctaggaagtcaaataaatataataaagggttgagccctctactttcttcttgccacctttttgtggcaatattaaagtgaactgctaatagtgtaagtacgtgcacaaaaccactgccagataaccagaggggcctgggaagggagaagaattagtgtatttttttcaaatagtacagtaatttgcctcataagcataggagcattgggaatgagagggaactgtgcccagtatactgttttttttcttcctccaataaaagtggtgtagtgccgaaagtgctaaaatatttagtgcggtattgctctgtgaattcaagttcaacagacttcactttggtcatgtttattaaaccaccagtgacatttaaaaatatatttttagcagtcgtaatgttagtcaccaagggaaggtggtggaatgtctatgtttttgattttactgtgagttaaaaaggcacatttctaccttctattgtttttaaattcaagaatagggaattagttcctggtgttgtttacgagtgtattctcgtgtcaacatacagggatttagacatttaactctctgtgccttgataagaatatcatttagagtgtagatacttttgcctttttaaaaaagccattattttatgagacttagtactcacactgcaaataactagtcagctcagttttaactttataggtttattgagtttcctttgtgtgatccatgtagatgcctcaaaatgtttcttcttcttcttttttttaatcttataagatatttttctaagtatttccagaaacatttgagagtgcccatcattttcaggtctgcagaaccatagcttccacgcacctgaacgagcacagaatgaactgacggtggaagacattatgagctgtgtccaacgttttaaccaaagcgtatcgtaccaacgatctgtgaaaatgcactggaagcttctggtcccggtttcctttgtggtctatgtgggtcttgtcctcattgtaactccgtatagatggtataggtattttaatcctggaagctgttgccttattaatgattatcttaaaatttcctccattggggcagcgtgggccaaattaaaacaaacaaaaccgcaactcctccacagaaacacaaacacagttattccatgaagtttagtatttggttgacatagtgctcttcaaattcatcccattaccctaaaagtaataactttgatgcttgctttaactttagtcccatctctgccactttgatgctatttgggttatgatggggcaagatggcagaggtattgggtttttttgtttttttccattcctctctacttctgtttcctagctttttctttctggagtttaagtacagtgatggttggcttgagtacctttttaaatctagcccagtataaacattagcctgcttaatatttagacatttataggtagaattctgagcactcaactcatgtttggcattttaaagtaaaaacaagtgtgacttcgaggaccaaagaaattgtcagctatacatttatctttatgaactcatttatattcctttttaatgactcgttgttctaacatttcctagaagtgttcttataaaggtctaatgtatccacaggctgttgtcttattagtaaatgcaaagtaatgactttgtctgttttactctagtctttagtacttcaaaattaccttttcatatccatgatcttgagtccatttgggggatttttaagaatttgatgtatttcaatacactgttcaaaattaaattgtttaattttatgtatgagtatgtatgttcctgaagttggtcctatttaaattattaaactattgtaactttgttcttgtgaaaaaaaaaaaaaaaaaa

SEQ ID NO: 4242 - DNA, 1940 bp, Homo sapiens
  source 1..1940: mol_type = genomic DNA
cctgtggccgctcccggctcggagtgtgatctaagcaggttgcgtaccttcctcaggtgactccggccacagcccattgtccgcggccaccggcggagtttagccgcagacctcgaagcgccccggggtccttcccgaacggcagcggctgcggcgggtccatggagaagggccctgtgcgggcaccggcggagaagccgcggggcgccaggtgcagcaatgggttccccgagcgggatccgccgcggcccgggcccagcaggccggcggagaagcccccgcggcccgaggccaagagcgcgcagcccgcggacggctggaagggcgagcggccccgcagcgaggaggataacgagctgaacctccctaacctggcagccgcctactcgtccatcctgagctcgctgggcgagaacccccagcggcaagggctgctcaagacgccctggagggcggcctcggccatgcagttcttcaccaagggctaccaggagaccatctcagatgtcctaaacgatgctatatttgatgaagatcatgatgagatggtgattgtgaaggacatagacatgttttccatgtgtgagcatcacttggttccatttgttggaaaggtccatattggttatcttcctaacaagcaagtccttggcctcagcaaacttgcgaggattgtagaaatctatagtagaagactacaagttcaggagcgccttacaaaacaaattgctgtagcaatcacggaagccttgcggcctgctggagtcggggtagtggttgaagcaacgaagtcaaataaatataataaagggttgagccctctactttcttcttgccacctttttgtggcaatattaaagtgaactgctaatagtgtctgcagaaccatagcttccacgcacctgaacgagcacagaatgaactgacggtggaagacattatgagctgtgtccaacgttttaaccaaagcgtatcgtaccaacgatctgtgaaaatgcactggaagcttctggtcccggtttcctttgtggtctatgtgggtcttgtcctcattgtaactccgtatagatggtataggtattttaatcctggaagctgttgccttattaatgattatcttaaaatttcctccattggggcagcgtgggccaaattaaaacaaacaaaaccgcaactcctccacagaaacacaaacacagttattccatgaagtttagtatttggttgacatagtgctcttcaaattcatcccattaccctaaaagtaataactttgatgcttgctttaactttagtcccatctctgccactttgatgctatttgggttatgatggggcaagatggcagaggtattgggtttttttgtttttttccattcctctctacttctgtttcctagctttttctttctggagtttaagtacagtgatggttggcttgagtacctttttaaatctagcccagtataaacattagcctgcttaatatttagacatttataggtagaattctgagcactcaactcatgtttggcattttaaagtaaaaacaagtgtgacttcgaggaccaaagaaattgtcagctatacatttatctttatgaactcatttatattcctttttaatgactcgttgttctaacatttcctagaagtgttcttataaaggtctaatgtatccacaggctgttgtcttattagtaaatgcaaagtaatgactttgtctgttttactctagtctttagtacttcaaaattaccttttcatatccatgatcttgagtccatttgggggatttttaagaatttgatgtatttcaatacactgttcaaaattaaattgtttaattttatgtatgagtatgtatgttcctgaagttggtcctatttaaattattaaactattgtaactttgttcttgtgaaaaaaaaaaaaaaaaaa

SEQ ID NO: 4243 - DNA, 1852 bp, Homo sapiens
  source 1..1852: mol_type = genomic DNA
cctgtggccgctcccggctcggagtgtgatctaagcaggttgcgtaccttcctcaggtgactccggccacagcccattgtccgcggccaccggcggagtttagccgcagacctcgaagcgccccggggtccttcccgaacggcagcggctgcggcgggtccatggagaagggccctgtgcgggcaccggcggagaagccgcggggcgccaggtgcagcaatgggttccccgagcgggatccgccgcggcccgggcccagcaggccggcggagaagcccccgcggcccgaggccaagagcgcgcagcccgcggacggctggaagggcgagcggccccgcagcgaggaggataacgagctgaacctccctaacctggcagccgcctactcgtccatcctgagctcgctgggcgagaacccccagcggcaagggctgctcaagacgccctggagggcggcctcggccatgcagttcttcaccaagggctaccaggagaccatctcagatgtcctaaacgatgctatatttgatgaagatcatgatgagatggtgattgtgaaggacatagacatgttttccatgtgtgagcatcacttggttccatttgttggaaaggtccatattggttatcttcctaacaagcaagtccttggcctcagcaaacttgcgaggattgtagaaatctatagtagaagactacaagttcaggagcgccttacaaaacaaattgctgtagcaatcacggaagccttgcggcctgctggagtcggggtagtggttgaagcaacgtctgcagaaccatagcttccacgcacctgaacgagcacagaatgaactgacggtggaagacattatgagctgtgtccaacgttttaaccaaagcgtatcgtaccaacgatctgtgaaaatgcactggaagcttctggtcccggtttcctttgtggtctatgtgggtcttgtcctcattgtaactccgtatagatggtataggtattttaatcctggaagctgttgccttattaatgattatcttaaaatttcctccattggggcagcgtgggccaaattaaaacaaacaaaaccgcaactcctccacagaaacacaaacacagttattccatgaagtttagtatttggttgacatagtgctcttcaaattcatcccattaccctaaaagtaataactttgatgcttgctttaactttagtcccatctctgccactttgatgctatttgggttatgatggggcaagatggcagaggtattgggtttttttgtttttttccattcctctctacttctgtttcctagctttttctttctggagtttaagtacagtgatggttggcttgagtacctttttaaatctagcccagtataaacattagcctgcttaatatttagacatttataggtagaattctgagcactcaactcatgtttggcattttaaagtaaaaacaagtgtgacttcgaggaccaaagaaattgtcagctatacatttatctttatgaactcatttatattcctttttaatgactcgttgttctaacatttcctagaagtgttcttataaaggtctaatgtatccacaggctgttgtcttattagtaaatgcaaagtaatgactttgtctgttttactctagtctttagtacttcaaaattaccttttcatatccatgatcttgagtccatttgggggatttttaagaatttgatgtatttcaatacactgttcaaaattaaattgtttaattttatgtatgagtatgtatgttcctgaagttggtcctatttaaattattaaactattgtaactttgttcttgtgaaaaaaaaaaaaaaaaaa

SEQ ID NO: 4244 - DNA, 1995 bp, Homo sapiens
  source 1..1995: mol_type = genomic DNA
cctgtggccgctcccggctcggagtgtgatctaagcaggttgcgtaccttcctcaggtgactccggccacagcccattgtccgcggccaccggcggagtttagccgcagacctcgaagcgccccggggtccttcccgaacggcagcggctgcggcgggtccatggagaagggccctgtgcgggcaccggcggagaagccgcggggcgccaggtgcagcaatgggttccccgagcgggatccgccgcggcccgggcccagcaggccggcggagaagcccccgcggcccgaggccaagagcgcgcagcccgcggacggctggaagggcgagcggccccgcagcgaggaggataacgagctgaacctccctaacctggcagccgcctactcgtccatcctgagctcgctgggcgagaacccccagcggcaagggctgctcaagacgccctggagggcggcctcggccatgcagttcttcaccaagggctaccaggagaccatctcagatgtcctaaacgatgctatatttgatgaagatcatgatgagatggtgattgtgaaggacatagacatgttttccatgtgtgagcatcacttggttccatttgttggaaaggtccatattggttatcttcctaacaagcaagtccttggcctcagcaaacttgcgaggattgtagaaatctatagtagaagactacaagttcaggagcgccttacaaaacaaattgctgtagcaatcacggaagccttgcggcctgctggagtcggggtagtggttgaagcaacacacatgtgtatggtaatgcgaggtgtacagaaaatgaacagcaaaactgtgaccagcacaatgttgggtgtgttccgggaggatccaaagactcgggaagagttcctgactctcattaggagctgagcttcattcagtgtgtgtctgcagaaccatagcttccacgcacctgaacgagcacagaatgaactgacggtggaagacattatgagctgtgtccaacgttttaaccaaagcgtatcgtaccaacgatctgtgaaaatgcactggaagcttctggtcccggtttcctttgtggtctatgtgggtcttgtcctcattgtaactccgtatagatggtataggtattttaatcctggaagctgttgccttattaatgattatcttaaaatttcctccattggggcagcgtgggccaaattaaaacaaacaaaaccgcaactcctccacagaaacacaaacacagttattccatgaagtttagtatttggttgacatagtgctcttcaaattcatcccattaccctaaaagtaataactttgatgcttgctttaactttagtcccatctctgccactttgatgctatttgggttatgatggggcaagatggcagaggtattgggtttttttgtttttttccattcctctctacttctgtttcctagctttttctttctggagtttaagtacagtgatggttggcttgagtacctttttaaatctagcccagtataaacattagcctgcttaatatttagacatttataggtagaattctgagcactcaactcatgtttggcattttaaagtaaaaacaagtgtgacttcgaggaccaaagaaattgtcagctatacatttatctttatgaactcatttatattcctttttaatgactcgttgttctaacatttcctagaagtgttcttataaaggtctaatgtatccacaggctgttgtcttattagtaaatgcaaagtaatgactttgtctgttttactctagtctttagtacttcaaaattaccttttcatatccatgatcttgagtccatttgggggatttttaagaatttgatgtatttcaatacactgttcaaaattaaattgtttaattttatgtatgagtatgtatgttcctgaagttggtcctatttaaattattaaactattgtaactttgttcttgtgaaaaaaaaaaaaaaaaaa

SEQ ID NO: 4245 - DNA, 6492 bp, Homo sapiens
  source 1..6492: mol_type = genomic DNA
tttctgtgaagcagaagtctgggaatcgatctggaaatcctcctaatttttactccctctccccgcgactcctgattcattgggaagtttcaaatcagctataactggagagtgctgaagattgatgggatcgttgccttatgcatttgttttggttttacaaaaaggaaacttgacagaggatcatgctgtacttaaaaaatacaacatcacagaggaagtagactgatattaacaatacttactaataataacgtgcctcatgaaataaagatccgaaaggaattggaataaaaatttcctgcatctcatgccaagggggaaacaccagaatcaagtgttccgcgtgattgaagacaccccctcgtccaagaatgcaaagcacatccaataaaatagctggattataactcctcttctttctctgggggccgtggggtgggagctggggcgagaggtgccgttggcccccgttgcttttcctctgggaaggatggcgcacgctgggagaacagggtacgataaccgggagatagtgatgaagtacatccattataagctgtcgcagaggggctacgagtgggatgcgggagatgtgggcgccgcgcccccgggggccgcccccgcaccgggcatcttctcctcccagcccgggcacacgccccatccagccgcatcccgggacccggtcgccaggacctcgccgctgcagaccccggctgcccccggcgccgccgcggggcctgcgctcagcccggtgccacctgtggtccacctgaccctccgccaggccggcgacgacttctcccgccgctaccgccgcgacttcgccgagatgtccagccagctgcacctgacgcccttcaccgcgcggggacgctttgccacggtggtggaggagctcttcagggacggggtgaactgggggaggattgtggccttctttgagttcggtggggtcatgtgtgtggagagcgtcaaccgggagatgtcgcccctggtggacaacatcgccctgtggatgactgagtacctgaaccggcacctgcacacctggatccaggataacggaggctgggatgcctttgtggaactgtacggccccagcatgcggcctctgtttgatttctcctggctgtctctgaagactctgctcagtttggccctggtgggagcttgcatcaccctgggtgcctatctgggccacaagtgaagtcaacatgcctgccccaaacaaatatgcaaaaggttcactaaagcagtagaaataatatgcattgtcagtgatgtaccatgaaacaaagctgcaggctgtttaagaaaaaataacacacatataaacatcacacacacagacagacacacacacacacaacaattaacagtcttcaggcaaaacgtcgaatcagctatttactgccaaagggaaatatcatttattttttacattattaagaaaaaaagatttatttatttaagacagtcccatcaaaactcctgtctttggaaatccgaccactaattgccaagcaccgcttcgtgtggctccacctggatgttctgtgcctgtaaacatagattcgctttccatgttgttggccggatcaccatctgaagagcagacggatggaaaaaggacctgatcattggggaagctggctttctggctgctggaggctggggagaaggtgttcattcacttgcatttctttgccctgggggctgtgatattaacagagggagggttcctgtggggggaagtccatgcctccctggcctgaagaagagactctttgcatatgactcacatgatgcatacctggtgggaggaaaagagttgggaacttcagatggacctagtacccactgagatttccacgccgaaggacagcgatgggaaaaatgcccttaaatcataggaaagtatttttttaagctaccaattgtgccgagaaaagcattttagcaatttatacaatatcatccagtaccttaagccctgattgtgtatattcatatattttggatacgcaccccccaactcccaatactggctctgtctgagtaagaaacagaatcctctggaacttgaggaagtgaacatttcggtgacttccgcatcaggaaggctagagttacccagagcatcaggccgccacaagtgcctgcttttaggagaccgaagtccgcagaacctgcctgtgtcccagcttggaggcctggtcctggaactgagccggggccctcactggcctcctccagggatgatcaacagggcagtgtggtctccgaatgtctggaagctgatggagctcagaattccactgtcaagaaagagcagtagaggggtgtggctgggcctgtcaccctggggccctccaggtaggcccgttttcacgtggagcatgggagccacgacccttcttaagacatgtatcactgtagagggaaggaacagaggccctgggcccttcctatcagaaggacatggtgaaggctgggaacgtgaggagaggcaatggccacggcccattttggctgtagcacatggcacgttggctgtgtggccttggcccacctgtgagtttaaagcaaggctttaaatgactttggagagggtcacaaatcctaaaagaagcattgaagtgaggtgtcatggattaattgacccctgtctatggaattacatgtaaaacattatcttgtcactgtagtttggttttatttgaaaacctgacaaaaaaaaagttccaggtgtggaatatgggggttatctgtacatcctggggcattaaaaaaaaaatcaatggtggggaactataaagaagtaacaaaagaagtgacatcttcagcaaataaactaggaaatttttttttcttccagtttagaatcagccttgaaacattgatggaataactctgtggcattattgcattatataccatttatctgtattaactttggaatgtactctgttcaatgtttaatgctgtggttgatatttcgaaagctgctttaaaaaaatacatgcatctcagcgtttttttgtttttaattgtatttagttatggcctatacactatttgtgagcaaaggtgatcgttttctgtttgagatttttatctcttgattcttcaaaagcattctgagaaggtgagataagccctgagtctcagctacctaagaaaaacctggatgtcactggccactgaggagctttgtttcaaccaagtcatgtgcatttccacgtcaacagaattgtttattgtgacagttatatctgttgtccctttgaccttgtttcttgaaggtttcctcgtccctgggcaattccgcatttaattcatggtattcaggattacatgcatgtttggttaaacccatgagattcattcagttaaaaatccagatggcaaatgaccagcagattcaaatctatggtggtttgacctttagagagttgctttacgtggcctgtttcaacacagacccacccagagccctcctgccctccttccgcgggggctttctcatggctgtccttcagggtcttcctgaaatgcagtggtgcttacgctccaccaagaaagcaggaaacctgtggtatgaagccagacctccccggcgggcctcagggaacagaatgatcagacctttgaatgattctaatttttaagcaaaatattattttatgaaaggtttacattgtcaaagtgatgaatatggaatatccaatcctgtgctgctatcctgccaaaatcattttaatggagtcagtttgcagtatgctccacgtggtaagatcctccaagctgctttagaagtaacaatgaagaacgtggacgtttttaatataaagcctgttttgtcttttgttgttgttcaaacgggattcacagagtatttgaaaaatgtatatatattaagaggtcacgggggctaattgctggctggctgccttttgctgtggggttttgttacctggttttaataacagtaaatgtgcccagcctcttggccccagaactgtacagtattgtggctgcacttgctctaagagtagttgatgttgcattttccttattgttaaaaacatgttagaagcaatgaatgtatataaaagcctcaactagtcatttttttctcctcttcttttttttcattatatctaattattttgcagttgggcaacagagaaccatccctattttgtattgaagagggattcacatctgcatcttaactgctctttatgaatgaaaaaacagtcctctgtatgtactcctctttacactggccagggtcagagttaaatagagtatatgcactttccaaattggggacaagggctctaaaaaaagccccaaaaggagaagaacatctgagaacctcctcggccctcccagtccctcgctgcacaaatactccgcaagagaggccagaatgacagctgacagggtctatggccatcgggtcgtctccgaagatttggcaggggcagaaaactctggcaggcttaagatttggaataaagtcacagaattaaggaagcacctcaatttagttcaaacaagacgccaacattctctccacagctcacttacctctctgtgttcagatgtggccttccatttatatgtgatctttgttttattagtaaatgcttatcatctaaagatgtagctctggcccagtgggaaaaattaggaagtgattataaatcgagaggagttataataatcaagattaaatgtaaataatcagggcaatcccaacacatgtctagctttcacctccaggatctattgagtgaacagaattgcaaatagtctctatttgtaattgaacttatcctaaaacaaatagtttataaatgtgaacttaaactctaattaattccaactgtacttttaaggcagtggctgtttttagactttcttatcacttatagttagtaatgtacacctactctatcagagaaaaacaggaaaggctcgaaatacaagccattctaaggaaattagggagtcagttgaaattctattctgatcttattctgtggtgtcttttgcagcccagacaaatgtggttacacactttttaagaaatacaattctacattgtcaagcttatgaaggttccaatcagatctttattgttattcaatttggatctttcagggattttttttttaaattattatgggacaaaggacatttgttggaggggtgggagggaggaagaatttttaaatgtaaaacattcccaagtttggatcagggagttggaagttttcagaataaccagaactaagggtatgaaggacctgtattggggtcgatgtgatgcctctgcgaagaaccttgtgtgacaaatgagaaacattttgaagtttgtggtacgacctttagattccagagacatcagcatggctcaaagtgcagctccgtttggcagtgcaatggtataaatttcaagctggatatgtctaatgggtatttaaacaataaatgtgcagttttaactaacaggatatttaatgacaaccttctggttggtagggacatctgtttctaaatgtttattatgtacaatacagaaaaaaattttataaaattaagcaatgtgaaactgaattggagagtgataatacaagtcctttagtcttacccagtgaatcattctgttccatgtctttggacaaccatgaccttggacaatcatgaaatatgcatctcactggatgcaaagaaaatcagatggagcatgaatggtactgtaccggttcatctggactgccccagaaaaataacttcaagcaaacatcctatcaacaacaaggttgttctgcataccaagctgagcacagaagatgggaacactggtggaggatggaaaggctcgctcaatcaagaaaattctgagactattaataaataagactgtagtgtagatactgagtaaatccatgcacctaaaccttttggaaaatctgccgtgggccctccagatagctcatttcattaagtttttccctccaaggtagaatttgcaagagtgacagtggattgcatttcttttggggaagctttcttttggtggttttgtttattataccttcttaagttttcaaccaaggtttgcttttgttttgagttactggggttatttttgttttaaataaaaataagtgtacaataagtgtttttgtattgaaagcttttgttatcaagattttcatacttttaccttccatggctctttttaagattgatacttttaagaggtggctgatattctgcaacactgtacacataaaaaatacggtaaggatactttacatggttaaggtaaagtaagtctccagttggccaccattagctataatggcactttgtttgtgttgttggaaaaagtcacattgccattaaactttccttgtctgtctagttaatattgtgaagaaaaataaagtacagtgtgagatactg

SEQ ID NO: 4246 - DNA, 1207 bp, Homo sapiens
  source 1..1207: mol_type = genomic DNA
tttctgtgaagcagaagtctgggaatcgatctggaaatcctcctaatttttactccctctccccgcgactcctgattcattgggaagtttcaaatcagctataactggagagtgctgaagattgatgggatcgttgccttatgcatttgttttggttttacaaaaaggaaacttgacagaggatcatgctgtacttaaaaaatacaacatcacagaggaagtagactgatattaacaatacttactaataataacgtgcctcatgaaataaagatccgaaaggaattggaataaaaatttcctgcatctcatgccaagggggaaacaccagaatcaagtgttccgcgtgattgaagacaccccctcgtccaagaatgcaaagcacatccaataaaatagctggattataactcctcttctttctctgggggccgtggggtgggagctggggcgagaggtgccgttggcccccgttgcttttcctctgggaaggatggcgcacgctgggagaacagggtacgataaccgggagatagtgatgaagtacatccattataagctgtcgcagaggggctacgagtgggatgcgggagatgtgggcgccgcgcccccgggggccgcccccgcaccgggcatcttctcctcccagcccgggcacacgccccatccagccgcatcccgggacccggtcgccaggacctcgccgctgcagaccccggctgcccccggcgccgccgcggggcctgcgctcagcccggtgccacctgtggtccacctgaccctccgccaggccggcgacgacttctcccgccgctaccgccgcgacttcgccgagatgtccagccagctgcacctgacgcccttcaccgcgcggggacgctttgccacggtggtggaggagctcttcagggacggggtgaactgggggaggattgtggccttctttgagttcggtggggtcatgtgtgtggagagcgtcaaccgggagatgtcgcccctggtggacaacatcgccctgtggatgactgagtacctgaaccggcacctgcacacctggatccaggataacggaggctgggtaggtgcacttggtgatgtgagtctgggctgaggccacaggtccgagatgcgggggttggagtgcgggtgggctcctggggcaatgggaggctgtggagccggcgaaataaaatcagagttgttgcta

SEQ ID NO: 4247 - DNA, 2423 bp, Homo sapiens
  source 1..2423: mol_type = genomic DNA
acccgcgctcgtacgtgcgcctccgccggcagctcctgactcatcgggggctccgggtcacatgcgcccgcgcggccctataggcgcctcctccgcccgccgcccgggagccgcagccgccgccgccactgccactcccgctctctcagcgccgccgtcgccaccgccaccgccaccgccactaccaccgtctgagtctgcagtcccgagatcccagccatcatgtccatagagaagatctgggcccgggagatcctggactcccgcgggaaccccacagtggaggtggatctctatactgccaaaggtcttttccgggctgcagtgcccagtggagcctctacgggcatctatgaggccctggagctgagggatggagacaaacagcgttacttaggcaaaggtgtcctgaaggcagtggaccacatcaactccaccatcgcgccagccctcatcagctcaggtctctctgtggtggagcaagagaaactggacaacctgatgctggagttggatgggactgagaacaaatccaagtttggggccaatgccatcctgggtgtgtctctggccgtgtgtaaggcaggggcagctgagcgggaactgcccctgtatcgccacattgctcagctggccgggaactcagacctcatcctgcctgtgccggccttcaacgtgatcaatggtggctctcatgctggcaacaagctggccatgcaggagttcatgatcctcccagtgggagctgagagctttcgggatgccatgcgactaggtgcagaggtctaccatacactcaagggagtcatcaaggacaaatacggcaaggatgccaccaatgtgggggatgaaggtggctttgcccccaatatcctggagaacagtgaagccttggagctggtgaaggaagccatcgacaaggctggctacacggaaaagatcgttattggcatggatgttgctgcctcagagttttatcgtgatggcaaatatgacttggacttcaagtctcccactgatccttcccgatacatcactggggaccagctgggggcactctaccaggactttgtcagggactatcctgtggtctccattgaggacccatttgaccaggatgattgggctgcctggtccaagttcacagccaatgtagggatccagattgtgggtgatgacctgacagtgaccaacccaaaacgtattgagcgggcagtggaagaaaaggcctgcaactgtctgctgctcaaggtcaaccagatcggctcggtcactgaagccatccaagcgtgcaagctggcccaggagaatggctggggggtcatggtgagtcatcgctcaggagagactgaggacacattcattgctgacctggtggtggggctgtgcacaggccagatcaagactggtgccccgtgccgttctgaacgtctggctaaatacaaccagctcatgagaattgaggaagagctgggggatgaagctcgctttgccggacataacttccgtaatcccagtgtgctgtgattcctctgcttgcctggagacgtggaacctctgtctcatcctcctggaaccttgctgtcctgatctgtgatagttcaccccctgagatcccctgagccccagggtgcccagaacttccctgattgacctgctccgctgctccttggcttacctgacctcttgctgtctctgctcgccctcctttctgtgccctactcattggggttccgcactttccacttcttcctttctctttctctcttccctcagaaactagaaatgtgaatgaggattattataaaagggggtccgtggaagaatgatcagcatctgtgatgggagcgtcagggttggtgtgctgaggtgttagagagggaccatgtgtcacttgtgctttgctcttgtcccacgtgtcttccactttgcatatgagccgtgaactgtgcatagtgctgggatggaggggagtgttgggcatgtgatcacgcctggctaataaggctttagtgtatttatttatttatttattttatttgtttttcattcatcccattaatcatttccccataactcaatggcctaaaactggcctgacttgggggaacgatgtgtctgtatttcatgtggctgtagatcccaagatgactggggtgggaggtcttgctagaatgggaagggtcatagaaagggccttgacatcagttcctttgtgtgtactcactgaagcctgcgttggtccagagcggaggctgtgtgcctgggggagttttcctctatacatctctccccaaccctaggttccctgttcttcctccagctgcaccagagcaacctctcactccccatgccacgttccacagttgccaccacctctgtggcattgaaatgagcacctccattaaagtctgaatcagtgc

SEQ ID NO: 4248 - DNA, 1340 bp, Homo sapiens
  source 1..1340: mol_type = genomic DNA
cccggagccggaccggggccaccgcgcccgctctgctccgacaccgcgccccctggacagccgccctctcctccaggcccgtggggctggccctgcaccgccgagcttcccgggatgagggcccccggtgtggtcacccggcgcgccccaggtcgctgagggaccccggccaggcgcggagatgggggtgcacgaatgtcctgcctggctgtggcttctcctgtccctgctgtcgctccctctgggcctcccagtcctgggcgccccaccacgcctcatctgtgacagccgagtcctggagaggtacctcttggaggccaaggaggccgagaatatcacgacgggctgtgctgaacactgcagcttgaatgagaatatcactgtcccagacaccaaagttaatttctatgcctggaagaggatggaggtcgggcagcaggccgtagaagtctggcagggcctggccctgctgtcggaagctgtcctgcggggccaggccctgttggtcaactcttcccagccgtgggagcccctgcagctgcatgtggataaagccgtcagtggccttcgcagcctcaccactctgcttcgggctctgggagcccagaaggaagccatctcccctccagatgcggcctcagctgctccactccgaacaatcactgctgacactttccgcaaactcttccgagtctactccaatttcctccggggaaagctgaagctgtacacaggggaggcctgcaggacaggggacagatgaccaggtgtgtccacctgggcatatccaccacctccctcaccaacattgcttgtgccacaccctcccccgccactcctgaaccccgtcgaggggctctcagctcagcgccagcctgtcccatggacactccagtgccagcaatgacatctcaggggccagaggaactgtccagagagcaactctgagatctaaggatgtcacagggccaacttgagggcccagagcaggaagcattcagagagcagctttaaactcagggacagagccatgctgggaagacgcctgagctcactcggcaccctgcaaaatttgatgccaggacacgctttggaggcgatttacctgttttcgcacctaccatcagggacaggatgacctggagaacttaggtggcaagctgtgacttctccaggtctcacgggcatgggcactcccttggtggcaagagcccccttgacaccggggtggtgggaaccatgaagacaggatgggggctggcctctggctctcatggggtccaagttttgtgtattcttcaacctcattgacaagaactgaaaccaccaaaaaaaaaaaa

SEQ ID NO: 4249 - DNA, 2564 bp, Homo sapiens
  source 1..2564: mol_type = genomic DNA
ctctctctctctcgctcgctctctcgctctctcgctctctctcgctcgctctctcgctctcgctctctctctctctccggctcgccagcgacacttgttcgttcaacttgaccaatgagacttgaggaagggctctgagtcccgcctctgcatgagtgaccgtctcttttccaatccaggtcccgccccgactccccagggctgcttttctcgcggctgcgggtggtcgggctgcatcctgccttcagagtcttactgcgcggggccccagtctccagtcccgcccaggcgcctttgcaggctgcggtgggatttcgttttgcctccggttggggctgctgtttctcttcgccgacgagactctggaacccctgtggtcttctcttcatctaatgaccctgaggggatggagttttcaagtccttccagagaggaatgtcccaagcctttgagtagggtaagcatcatggctggcagcctcacaggattgcttctacttcaggcagtgtcgtgggcatcaggtgcccgcccctgcatccctaaaagcttcggctacagctcggtggtgtgtgtctgcaatgccacatactgtgactcctttgaccccccgacctttcctgcccttggtaccttcagccgctatgagagtacacgcagtgggcgacggatggagctgagtatggggcccatccaggctaatcacacgggcacaggcctgctactgaccctgcagccagaacagaagttccagaaagtgaagggatttggaggggccatgacagatgctgctgctctcaacatccttgccctgtcaccccctgcccaaaatttgctacttaaatcgtacttctctgaagaaggaatcggatataacatcatccgggtacccatggccagctgtgacttctccatccgcacctacacctatgcagacacccctgatgatttccagttgcacaacttcagcctcccagaggaagataccaagctcaagatacccctgattcaccgagccctgcagttggcccagcgtcccgtttcactccttgccagcccctggacatcacccacttggctcaagaccaatggagcggtgaatgggaaggggtcactcaagggacagcccggagacatctaccaccagacctgggccagatactttgtgaagttcctggatgcctatgctgagcacaagttacagttctgggcagtgacagctgaaaatgagccttctgctgggctgttgagtggataccccttccagtgcctgggcttcacccctgaacatcagcgagacttcattgcccgtgacctaggtcctaccctcgccaacagtactcaccacaatgtccgcctactcatgctggatgaccaacgcttgctgctgccccactgggcaaaggtggtactgacagacccagaagcagctaaatatgttcatggcattgctgtacattggtacctggactttctggctccagccaaagccaccctaggggagacacaccgcctgttccccaacaccatgctctttgcctcagaggcctgtgtgggctccaagttctgggagcagagtgtgcggctaggctcctgggatcgagggatgcagtacagccacagcatcatcacgaacctcctgtaccatgtggtcggctggaccgactggaaccttgccctgaaccccgaaggaggacccaattgggtgcgtaactttgtcgacagtcccatcattgtagacatcaccaaggacacgttttacaaacagcccatgttctaccaccttggccacttcagcaagttcattcctgagggctcccagagagtggggctggttgccagtcagaagaacgacctggacgcagtggcactgatgcatcccgatggctctgctgttgtggtcgtgctaaaccgctcctctaaggatgtgcctcttaccatcaaggatcctgctgtgggcttcctggagacaatctcacctggctactccattcacacctacctgtggcgtcgccagtgatggagcagatactcaaggaggcactgggctcagcctgggcattaaagggacagagtcagctcacacgctgtctgtgactaaagagggcacagcagggccagtgtgagcttacagcgacgtaagcccaggggcaatggtttgggtgactcactttcccctctaggtggtgccaggggctggaggcccctagaaaaagatcagtaagccccagtgtccccccagcccccatgcttatgtgaacatgcgctgtgtgctgcttgctttggaaactgggcctgggtccaggcctagggtgagctcactgtccgtacaaacacaagatcagggctgagggtaaggaaaagaagagactaggaaagctgggcccaaaactggagactgtttgtctttcctggagatgcagaactgggcccgtggagcagcagtgtcagcatcagggcggaagccttaaagcagcagcgggtgtgcccaggcacccagatgattcctatggcaccagccaggaaaaatggcagctcttaaaggagaaaatgtttgagcccagtca

SEQ ID NO: 4250 - DNA, 2583 bp, Homo sapiens
  source 1..2583: mol_type = genomic DNA
ctctctctctctcgctcgctctctcgctctctcgctctctctcgctcgctctctcgctctcgctctctctctctctccggctcgccagcgacacttgttcgttcaacttgaccaatgagacttgaggaagggctctgagtcccgcctctgcatgagtgaccgtctcttttccaatccaggtcccgccccgactccccagggctgcttttctcgcggctgcgggtggtcgggctgcatcctgccttcagagtcttactgcgcggggccccagtctccagtcccgcccaggcgcctttgcaggctgcggtgggatttcgttttgcctccggttggggctgctgtttctcttcgccgacgtggatcctctatccttcagagactctggaacccctgtggtcttctcttcatctaatgaccctgaggggatggagttttcaagtccttccagagaggaatgtcccaagcctttgagtagggtaagcatcatggctggcagcctcacaggattgcttctacttcaggcagtgtcgtgggcatcaggtgcccgcccctgcatccctaaaagcttcggctacagctcggtggtgtgtgtctgcaatgccacatactgtgactcctttgaccccccgacctttcctgcccttggtaccttcagccgctatgagagtacacgcagtgggcgacggatggagctgagtatggggcccatccaggctaatcacacgggcacaggcctgctactgaccctgcagccagaacagaagttccagaaagtgaagggatttggaggggccatgacagatgctgctgctctcaacatccttgccctgtcaccccctgcccaaaatttgctacttaaatcgtacttctctgaagaaggaatcggatataacatcatccgggtacccatggccagctgtgacttctccatccgcacctacacctatgcagacacccctgatgatttccagttgcacaacttcagcctcccagaggaagataccaagctcaagatacccctgattcaccgagccctgcagttggcccagcgtcccgtttcactccttgccagcccctggacatcacccacttggctcaagaccaatggagcggtgaatgggaaggggtcactcaagggacagcccggagacatctaccaccagacctgggccagatactttgtgaagttcctggatgcctatgctgagcacaagttacagttctgggcagtgacagctgaaaatgagccttctgctgggctgttgagtggataccccttccagtgcctgggcttcacccctgaacatcagcgagacttcattgcccgtgacctaggtcctaccctcgccaacagtactcaccacaatgtccgcctactcatgctggatgaccaacgcttgctgctgccccactgggcaaaggtggtactgacagacccagaagcagctaaatatgttcatggcattgctgtacattggtacctggactttctggctccagccaaagccaccctaggggagacacaccgcctgttccccaacaccatgctctttgcctcagaggcctgtgtgggctccaagttctgggagcagagtgtgcggctaggctcctgggatcgagggatgcagtacagccacagcatcatcacgaacctcctgtaccatgtggtcggctggaccgactggaaccttgccctgaaccccgaaggaggacccaattgggtgcgtaactttgtcgacagtcccatcattgtagacatcaccaaggacacgttttacaaacagcccatgttctaccaccttggccacttcagcaagttcattcctgagggctcccagagagtggggctggttgccagtcagaagaacgacctggacgcagtggcactgatgcatcccgatggctctgctgttgtggtcgtgctaaaccgctcctctaaggatgtgcctcttaccatcaaggatcctgctgtgggcttcctggagacaatctcacctggctactccattcacacctacctgtggcgtcgccagtgatggagcagatactcaaggaggcactgggctcagcctgggcattaaagggacagagtcagctcacacgctgtctgtgactaaagagggcacagcagggccagtgtgagcttacagcgacgtaagcccaggggcaatggtttgggtgactcactttcccctctaggtggtgccaggggctggaggcccctagaaaaagatcagtaagccccagtgtccccccagcccccatgcttatgtgaacatgcgctgtgtgctgcttgctttggaaactgggcctgggtccaggcctagggtgagctcactgtccgtacaaacacaagatcagggctgagggtaaggaaaagaagagactaggaaagctgggcccaaaactggagactgtttgtctttcctggagatgcagaactgggcccgtggagcagcagtgtcagcatcagggcggaagccttaaagcagcagcgggtgtgcccaggcacccagatgattcctatggcaccagccaggaaaaatggcagctcttaaaggagaaaatgtttgagcccagtca

SEQ ID NO: 4251 - DNA, 2400 bp, Homo sapiens
  source 1..2400: mol_type = genomic DNA
ctctctctctctcgctcgctctctcgctctctcgctctctctcgctcgctctctcgctctcgctctctctctctctccggctcgccagcgacacttgttcgttcaacttgaccaatgagacttgaggaagggctctgagtcccgcctctgcatgagtgaccgtctcttttccaatccaggtcccgccccgactccccagggctgcttttctcgcggctgcgggtggtcgggctgcatcctgccttcagagtcttactgcgcggggccccagtctccagtcccgcccaggcgcctttgcaggctgcggtgggatttcgttttgcctccggttggggctgctgtttctcttcgccgacggtgcccgcccctgcatccctaaaagcttcggctacagctcggtggtgtgtgtctgcaatgccacatactgtgactcctttgaccccccgacctttcctgcccttggtaccttcagccgctatgagagtacacgcagtgggcgacggatggagctgagtatggggcccatccaggctaatcacacgggcacaggcctgctactgaccctgcagccagaacagaagttccagaaagtgaagggatttggaggggccatgacagatgctgctgctctcaacatccttgccctgtcaccccctgcccaaaatttgctacttaaatcgtacttctctgaagaaggaatcggatataacatcatccgggtacccatggccagctgtgacttctccatccgcacctacacctatgcagacacccctgatgatttccagttgcacaacttcagcctcccagaggaagataccaagctcaagatacccctgattcaccgagccctgcagttggcccagcgtcccgtttcactccttgccagcccctggacatcacccacttggctcaagaccaatggagcggtgaatgggaaggggtcactcaagggacagcccggagacatctaccaccagacctgggccagatactttgtgaagttcctggatgcctatgctgagcacaagttacagttctgggcagtgacagctgaaaatgagccttctgctgggctgttgagtggataccccttccagtgcctgggcttcacccctgaacatcagcgagacttcattgcccgtgacctaggtcctaccctcgccaacagtactcaccacaatgtccgcctactcatgctggatgaccaacgcttgctgctgccccactgggcaaaggtggtactgacagacccagaagcagctaaatatgttcatggcattgctgtacattggtacctggactttctggctccagccaaagccaccctaggggagacacaccgcctgttccccaacaccatgctctttgcctcagaggcctgtgtgggctccaagttctgggagcagagtgtgcggctaggctcctgggatcgagggatgcagtacagccacagcatcatcacgaacctcctgtaccatgtggtcggctggaccgactggaaccttgccctgaaccccgaaggaggacccaattgggtgcgtaactttgtcgacagtcccatcattgtagacatcaccaaggacacgttttacaaacagcccatgttctaccaccttggccacttcagcaagttcattcctgagggctcccagagagtggggctggttgccagtcagaagaacgacctggacgcagtggcactgatgcatcccgatggctctgctgttgtggtcgtgctaaaccgctcctctaaggatgtgcctcttaccatcaaggatcctgctgtgggcttcctggagacaatctcacctggctactccattcacacctacctgtggcgtcgccagtgatggagcagatactcaaggaggcactgggctcagcctgggcattaaagggacagagtcagctcacacgctgtctgtgactaaagagggcacagcagggccagtgtgagcttacagcgacgtaagcccaggggcaatggtttgggtgactcactttcccctctaggtggtgccaggggctggaggcccctagaaaaagatcagtaagccccagtgtccccccagcccccatgcttatgtgaacatgcgctgtgtgctgcttgctttggaaactgggcctgggtccaggcctagggtgagctcactgtccgtacaaacacaagatcagggctgagggtaaggaaaagaagagactaggaaagctgggcccaaaactggagactgtttgtctttcctggagatgcagaactgggcccgtggagcagcagtgtcagcatcagggcggaagccttaaagcagcagcgggtgtgcccaggcacccagatgattcctatggcaccagccaggaaaaatggcagctcttaaaggagaaaatgtttgagcccagtca

SEQ ID NO: 4252 - DNA, 2174 bp, Homo sapiens
  source 1..2174: mol_type = genomic DNA
acatgacccatccacatcgggaagccggaattacttgcagggctaacctagtgcctatagctaaggcaggtacctgcatccttgtttttgtttagtggatcctctatccttcagagactctggaacccctgtggtcttctcttcatctaatgaccctgaggggatggagttttcaagtccttccagagaggaatgtcccaagcctttgagtagggtaagcatcatggctggcagcctcacaggattgcttctacttcaggcagtgtcgtgggcatcaggtgcccgcccctgcatccctaaaagcttcggctacagctcggtggtgtgtgtctgcaatgccacatactgtgactcctttgaccccccgacctttcctgcccttggtaccttcagccgctatgagagtacacgcagtgggcgacggatggagctgagtatggggcccatccaggctaatcacacgggcacaggaatcggatataacatcatccgggtacccatggccagctgtgacttctccatccgcacctacacctatgcagacacccctgatgatttccagttgcacaacttcagcctcccagaggaagataccaagctcaagatacccctgattcaccgagccctgcagttggcccagcgtcccgtttcactccttgccagcccctggacatcacccacttggctcaagaccaatggagcggtgaatgggaaggggtcactcaagggacagcccggagacatctaccaccagacctgggccagatactttgtgaagttcctggatgcctatgctgagcacaagttacagttctgggcagtgacagctgaaaatgagccttctgctgggctgttgagtggataccccttccagtgcctgggcttcacccctgaacatcagcgagacttcattgcccgtgacctaggtcctaccctcgccaacagtactcaccacaatgtccgcctactcatgctggatgaccaacgcttgctgctgccccactgggcaaaggtggtactgacagacccagaagcagctaaatatgttcatggcattgctgtacattggtacctggactttctggctccagccaaagccaccctaggggagacacaccgcctgttccccaacaccatgctctttgcctcagaggcctgtgtgggctccaagttctgggagcagagtgtgcggctaggctcctgggatcgagggatgcagtacagccacagcatcatcacgaacctcctgtaccatgtggtcggctggaccgactggaaccttgccctgaaccccgaaggaggacccaattgggtgcgtaactttgtcgacagtcccatcattgtagacatcaccaaggacacgttttacaaacagcccatgttctaccaccttggccacttcagcaagttcattcctgagggctcccagagagtggggctggttgccagtcagaagaacgacctggacgcagtggcactgatgcatcccgatggctctgctgttgtggtcgtgctaaaccgctcctctaaggatgtgcctcttaccatcaaggatcctgctgtgggcttcctggagacaatctcacctggctactccattcacacctacctgtggcgtcgccagtgatggagcagatactcaaggaggcactgggctcagcctgggcattaaagggacagagtcagctcacacgctgtctgtgactaaagagggcacagcagggccagtgtgagcttacagcgacgtaagcccaggggcaatggtttgggtgactcactttcccctctaggtggtgccaggggctggaggcccctagaaaaagatcagtaagccccagtgtccccccagcccccatgcttatgtgaacatgcgctgtgtgctgcttgctttggaaactgggcctgggtccaggcctagggtgagctcactgtccgtacaaacacaagatcagggctgagggtaaggaaaagaagagactaggaaagctgggcccaaaactggagactgtttgtctttcctggagatgcagaactgggcccgtggagcagcagtgtcagcatcagggcggaagccttaaagcagcagcgggtgtgcccaggcacccagatgattcctatggcaccagccaggaaaaatggcagctcttaaaggagaaaatgtttgagcccagtca

SEQ ID NO: 4253 - DNA, 2324 bp, Homo sapiens
  source 1..2324: mol_type = genomic DNA
atcacatgacccatccacatcgggaagccggaattacttgcagggctaacctagtgcctatagctaaggcaggtacctgcatccttgtttttgtttagtggatcctctatccttcagagactctggaacccctgtggtcttctcttcatctaatgaccctgaggggatggagttttcaagtccttccagagaggaatgtcccaagcctttgagtagggtaagcatcatggctggcagcctcacaggattgcttctacttcaggcagtgtcgtgggcatcaggtgcccgcccctgcatccctaaaagcttcggctacagctcggtggtgtgtgtctgcaatgccacatactgtgactcctttgaccccccgacctttcctgcccttggtaccttcagccgctatgagagtacacgcagtgggcgacggatggagctgagtatggggcccatccaggctaatcacacgggcacaggcctgctactgaccctgcagccagaacagaagttccagaaagtgaagggatttggaggggccatgacagatgctgctgctctcaacatccttgccctgtcaccccctgcccaaaatttgctacttaaatcgtacttctctgaagaaggaatcggatataacatcatccgggtacccatggccagctgtgacttctccatccgcacctacacctatgcagacacccctgatgatttccagttgcacaacttcagcctcccagaggaagataccaagctcaagatacccctgattcaccgagccctgcagttggcccagcgtcccgtttcactccttgccagcccctggacatcacccacttggctcaagaccaatggagcggtgaatgggaaggggtcactcaagggacagcccggagacatctaccaccagacctgggccagatactttgtgaagttcctggatgcctatgctgagcacaagttacagttctgggcagtgacagctgaaaatgagccttctgctgggctgttgagtggataccccttccagtgcctgggcttcacccctgaacatcagcgagacttcattgcccgtgacctaggtcctaccctcgccaacagtactcaccacaatgtccgcctactcatgctggatgaccaacgcttgctgctgccccactgggcaaaggtggtactgacagacccagaagcagctaaatatgttcatggcattgctgtacattggtacctggactttctggctccagccaaagccaccctaggggagacacaccgcctgttccccaacaccatgctctttgcctcagaggcctgtgtgggctccaagttctgggagcagagtgtgcggctaggctcctgggatcgagggatgcagtacagccacagcatcatcacgaacctcctgtaccatgtggtcggctggaccgactggaaccttgccctgaaccccgaaggaggacccaattgggtgcgtaactttgtcgacagtcccatcattgtagacatcaccaaggacacgttttacaaacagcccatgttctaccaccttggccacttcagcaagttcattcctgagggctcccagagagtggggctggttgccagtcagaagaacgacctggacgcagtggcactgatgcatcccgatggctctgctgttgtggtcgtgctaaaccgctcctctaaggatgtgcctcttaccatcaaggatcctgctgtgggcttcctggagacaatctcacctggctactccattcacacctacctgtggcgtcgccagtgatggagcagatactcaaggaggcactgggctcagcctgggcattaaagggacagagtcagctcacacgctgtctgtgactaaagagggcacagcagggccagtgtgagcttacagcgacgtaagcccaggggcaatggtttgggtgactcactttcccctctaggtggtgccaggggctggaggcccctagaaaaagatcagtaagccccagtgtccccccagcccccatgcttatgtgaacatgcgctgtgtgctgcttgctttggaaactgggcctgggtccaggcctagggtgagctcactgtccgtacaaacacaagatcagggctgagggtaaggaaaagaagagactaggaaagctgggcccaaaactggagactgtttgtctttcctggagatgcagaactgggcccgtggagcagcagtgtcagcatcagggcggaagccttaaagcagcagcgggtgtgcccaggcacccagatgattcctatggcaccagccaggaaaaatggcagctcttaaaggagaaaatgtttgagcccagtca

SEQ ID NO: 4254 - DNA, 2113 bp, Homo sapiens
  source 1..2113: mol_type = genomic DNA
agggacgcctgagcgaacccccgagagagcgggcgtgggcgccaggcgggcggggcactggggattaattgttcggcgatcgctggctgccgggacttttctcgcgctggtctcttcggtggtcagggatggcgcggaagtcgaacttgcctgtgcttctcgtgccgtttctgctctgccaggccctagtgcgctgctccagccctctgcccctggtcgtcaacacttggccctttaagaatgcaaccgaagcagcgtggagggcattagcatctggaggctctgccctggatgcagtggagagcggctgtgccatgtgtgagagagagcagtgtgacggctctgtaggctttggaggaagtcctgatgaacttggagaaaccacactagatgccatgatcatggatggcactactatggatgtaggagcagtaggagatctcagacgaattaaaaatgctattggtgtggcacggaaagtactggaacatacaacacacacacttttagtaggagagtcagccaccacatttgctcaaagtatggggtttatcaatgaagacttatctaccactgcttctcaagctcttcattcagattggcttgctcggaattgccagccaaattattggaggaatgttataccagatccctcaaaatactgcggaccctacaaaccacctggtatcttaaagcaggatattcctatccataaagaaacagaagatgatcgtggtcatgacactattggcatggttgtaatccataagacaggacatattgctgctggtacatctacaaatggtataaaattcaaaatacatggccgtgtaggagactcaccaatacctggagctggagcctatgctgacgatactgcaggggcagccgcagccactgggaatggtgatatattgatgcgcttcctgccaagctaccaagctgtagaatacatgagaagaggagaagatccaaccatagcttgccaaaaagtgatttcaagaatccagaagcattttccagaattctttggggctgttatatgtgccaatgtgactggaagttacggtgctgcttgcaataaactttcaacatttactcagtttagtttcatggtttataattccgaaaaaaatcagccaactgaggaaaaagtggactgcatctaatccatctttactgtcaacatctgtatttaaagaagaaagaaacaaaggctgaaaaggctgctcactctcatcatctagtgttcctcatgtgttctaaagtctttttgtaaaataaacacaaaaataaatttatgttgaattggcactttctatatctgaaattgtattatctatttttatttaacctttcttatattatctgaagatgaatatgtatgtggctgtattttgtatatatttaagttttaagtgacacttggatttctgatcagtgttgcaaaaaattgctactttgagatttatttccacagtgatatattaaacccaaaaggaatcatcatatttggatgcttaaaatagagtatacaagttttttagacccaaagaaaaaaacagcagagtctcagcatgatcagtcctgattgaatttcattatgtcacagtgatgcatgtcttagcactgattattggttttacttaatattccctaaaaacttgaggaaggaagatgatagaacatgagatactctttgttttgtacatactagaaaatacagctatcttctgatgagcaattgtgttgattttctttgcttttttcctcttatggagctctcagtgtgtgaaagttctaaagccacaagaatcaatgatgttttagctgctaatatttagtattgatcgtttcttttaaaaatgatttggggaacttgatctgtactgtaattttactaattccttgtgcagaggtgggtatggcaattagaagtcaagaaatgggttgtttagcttggtttgtttccctaacttctgattaactctctgtatgacaactctacagaagttgtgcgcgtgctttctcagcagcatttttccttcaaaatcatctttttaatcaacagtcattaataaatgtacatgtacgatattcaaaaaaaaaaaaa

SEQ ID NO: 4255 - DNA, 2083 bp, Homo sapiens
  source 1..2083: mol_type = genomic DNA
agggacgcctgagcgaacccccgagagagcgggcgtgggcgccaggcgggcggggcactggggattaattgttcggcgatcgctggctgccgggacttttctcgcgctggtctcttcggtggtcagggatggcgcggaagtcgaacttgcctgtgcttctcgtgccgtttctgctctgccaggccctagtgcgctgctccagccctctgcccctggtcgtcaacacttggccctttaagaatgcaaccgaagcagcgtggagggcattagcatctggaggctctgccctggatgcagtggagagcggctgtgccatgtgtgagagagagcagtgtgacggctctgtaggctttggaggaagtcctgatgaacttggagaaaccacactagatgccatgatcatggatggcactactatggatgtaggagcagtaggagatctcagacgaattaaaaatgctattggtgtggcacggaaagtactggaacatacaacacacacacttttagtaggagagtcagccaccacatttgctcaaagtatggggtttatcaatgaagacttatctaccactgcttctcaagctcttcattcagattggcttgctcggaattgccagccaaattattggaggaatgttataccagatccctcaaaatactgcggaccctacaaaccacctggtatcttaaagcaggatattcctatccataaagaaacagaagatgatcgtggtcatgacactattggcatggttgtaatccataagacaggacatattgctgctggtacatctacaaatggagactcaccaatacctggagctggagcctatgctgacgatactgcaggggcagccgcagccactgggaatggtgatatattgatgcgcttcctgccaagctaccaagctgtagaatacatgagaagaggagaagatccaaccatagcttgccaaaaagtgatttcaagaatccagaagcattttccagaattctttggggctgttatatgtgccaatgtgactggaagttacggtgctgcttgcaataaactttcaacatttactcagtttagtttcatggtttataattccgaaaaaaatcagccaactgaggaaaaagtggactgcatctaatccatctttactgtcaacatctgtatttaaagaagaaagaaacaaaggctgaaaaggctgctcactctcatcatctagtgttcctcatgtgttctaaagtctttttgtaaaataaacacaaaaataaatttatgttgaattggcactttctatatctgaaattgtattatctatttttatttaacctttcttatattatctgaagatgaatatgtatgtggctgtattttgtatatatttaagttttaagtgacacttggatttctgatcagtgttgcaaaaaattgctactttgagatttatttccacagtgatatattaaacccaaaaggaatcatcatatttggatgcttaaaatagagtatacaagttttttagacccaaagaaaaaaacagcagagtctcagcatgatcagtcctgattgaatttcattatgtcacagtgatgcatgtcttagcactgattattggttttacttaatattccctaaaaacttgaggaaggaagatgatagaacatgagatactctttgttttgtacatactagaaaatacagctatcttctgatgagcaattgtgttgattttctttgcttttttcctcttatggagctctcagtgtgtgaaagttctaaagccacaagaatcaatgatgttttagctgctaatatttagtattgatcgtttcttttaaaaatgatttggggaacttgatctgtactgtaattttactaattccttgtgcagaggtgggtatggcaattagaagtcaagaaatgggttgtttagcttggtttgtttccctaacttctgattaactctctgtatgacaactctacagaagttgtgcgcgtgctttctcagcagcatttttccttcaaaatcatctttttaatcaacagtcattaataaatgtacatgtacgatattcaaaaaaaaaaaaa
